United States Patent Application Publication US 2022/0267853 A1 - sequence listing, part 2

SEQ ID NO: 14 - DNA, 476074 bp, Homo sapiens
gcagatataagcaccatccttacaggctggcttcctgactgagagcagggagcagcaggcatggggcatgccgggtgccagttcaaagccctgctgtggaagaattggctctgcagactcaggaacccggtgagtgcttgccttggttttccatagggttccagtgaggtctggagcaagatcagggtctattctttcctgcctgcctctgcctcctggcaggtaaaaacactcatgctgcagggaatttggggaggttggattattttaaatcaaaacccgtcccaagggccaaagtagctgaacactttaatgaccaggatgaaatcaaggctgaagaatttatcagaaaagggcaaatttagaaaaattctaaaaacaaacaaacaaaaaagcaggtggaattgaactataatttgtgttctaagcattcgttgtaaaaactgaacagtgaattctcaggtttaaggaacaaagcatttgctgcatttaatgcataagcagaatgctacaggtactgactccgaagcacaagactgcacagtgtgcctcaccagagcagggtatgacacatccactctgttattctgtagggtcaccatctttagtgttaattcacatctatttagaactgtattcaaattacattagcaaggttttcctaaggagattggaattgttcaaatgaaacttgtgtgaatacttatgcaaatatcctgtaagtgtacgtttttgtgaaatagaaatcaattgcttgttattatgactaactttattcctgatgccactatataaacattaatacctataaatgtcattttcaggagaagtagatgtgcagtaatttacctgcatcgtttctgattttaaggtctacagttaacctatgggaattttctgctgacaaatgctttggtttgaagagattcagtaattgacattgaattacattttgctgaatcctccgagccagaatattctatctctctgtcttgaaataaaatacaagttaaaggagatgttttcttttttatgtgatctttaggatcaaaataatttcagttgaaagtttgtacaaaagttttaagttggccgggcgcggtggctcacgcctgtaatcccagcactttgggaggccgaggcgggcggatcacgaggtcaggagatcgagaccatcctggctaacacagtgaaaccccgtctctactaaaaaaacacaaaaaaattagccgggtgtggtggcggacgtctgtagtcccagctacgcgggaggctgaggcaggagaatggcgtgaacccgggaggcggagcttgcagtgagccgagatcgcgccactgcactccagcctgggcgacagagcgagactccgtctcaaaaaaaaaaaaaaaaaaaaaaaaaaaaaaaaaaaaaagttttaagttcaggaataaaggagtgagacagtcttcattgattgttagtgtgttcgtgtctgtgtaggtagttttacatttataaacagtgtatttcattgacatgtaagtttgttttagggaattagcctattttcccatgaaagagtgttatgggtggaagttggttcccaggcactgctctttctgctttatgcatatctacctcaaaacagttcagtgaccgaggtagccagactgcctactcctccttaatggatacttgagttttaaaaaattttcacaattacttttgctgctaaggcaaacatcctcatcagaaggttttatttgtttgataactgtttatttaaagtggtaactcctgcatcccacttttctttgacttatttttctttagtatttatcatcttgtaacacaccacagattttcttatttgccgattgcctctggatcctacattagtatgttacatgcatgagagcaggacattttccccaattggttcatcaatgtattctccagcacccagaacagtgcctggcacacaatggatgttcagtaaatatttgttgaataagtaaaagaaggaaggaataaagcatttatgcatctctgttatgtgccagatagtgggtgaacaagaaaagtgagttcctggcccacaaagagctatagtctgttcacagaaaagcaatgaaaaatgcaattaaatatttaatgaaaccacctcttgggatatatcctatagatgtccctgcacaaatgggaagtgatatttgtacaaggttgttcattatagcaatgcctagaatagcaacagagtagaaacaacacaagtggttccatgcatagaatttggagctgcctgactgggttcacatcccagctctgtcacttactagtttactttttcaggcaatttcttaacttagttttcttctctgtaaaatgaaattgtttgtaagtattaaatgagtttgtacatgtaatgtgcttgcaacagtacctggtataggagtgggagctgttttcttatttggtagaaatgggtggcctcagacatctgtggacatgaaccgtgggctgtgaggagaggaggcacagggtaactctcagttcatggcttgcacagttgggttagaacagaactccagggggataaaatgtgaatatgtttacatatcttaatgttattacagtggaaatattgagggcaggcccctctgggtgaatgtctttaaactgacctatttttcacagcattctcccattctccaatgataatctgtagattctttgtttttgaactatgaaagtgaggtgttggcatgaactgtggaataaccaaactgcctgagtgaataaatggcctcaaatacatgtttatttagtgagtaaagccaggaactatttgttgtaggaaggaagcttgtctgtttttacatttactgttttttttagctttttttttaaattgatgcataatagatgtacatagtgtcagcatacatgtgataatttagtaatttgtatcattcataaagagcaaatcagtatatgcttttacatttacttttaaaaaatctttcatatatttcatgattatagtttcttcaaaaaacatcttattatagattcaaacaaaaatttaaaaaaatagaataatggataaatagtacccatcatacttatcttaatacctaactctatagattgttaaaattctactattcttggaaaaagtagtttcttaccattattttaataccatttattttttcctcttgatttttatttattgtaaaaacagtactaaaacaaaagataaacattttaaagtcatctaaaattttattatcctaattaacttttgtggtcttttcttatccttaggcatacataatgaaatatttttacgtaattaaagtcatagcttttttcccactttatattgaagcctaacattttaaaagttactgtatggtcttcttatttaatggttttattgaataacagttcatcagttgtatacacataattatttgaccatttccttatgttgaggattaaggttctttccagctcttattgttatgaataacatcattatgcatgaaggacacaccttctcctggatcatttctcttgaataagtttcctggagaagtttctgggtcaaggtaaggaaacattgcttttgggcaggtggagatcagttgacaatgtctcacgggtgaccccatggatagttccagtgcaatgccatcaacattggcaaatattcagtggctttgagccatgcttttccacatgaatttctattaatttctacattttattctaactgtaaatcagtctaattaattacttattttatttttatttcttttaattttaatttttttaaattgacagataataattgcacatattcatagggtacatagtgatgtttcaatacaaataatgtatggtgatcagatcagggtaatgagtataactgttatgtcaaatgtttattatttctttgtgttggggacattcaatattctccttgtagcaatttgaagctatatgatatattattattattatttcatatggagttttgctcatgtcacccaggctggagtgcaatggtgtgatctcggctcactgcaacctctgcctcctgggttcaagcgattctcctgcctcagcatcctgaatagctgggattacaggcgagtgccaccatgcccagcaaatttttgtatttttagtagagatggagtttcaccatgttggccaggcttgcctagaactcctgacctcaggggagccacccgccttggcctccccaagtggtgggattacaggcgtgagccactgcggtggacctatgtgatatatcattgttattatatagtcatcctatagtcatatagagcactggaactcattcctcctatctagctgtaattttgtatcctttaataaatctatccctattctctccctctccctaccttcaccagctacttcttattttaaagaattaataacaacaacaacaacaacaacaacaacaagaaaatcatgtaagccaactgtaagctccttggatagctcttagttttgcagtctgtttgggttctcccatgttttaatattgaacagagcagctgagcctgtagcctgtgtactgtggatggtacacttcccctaatctatccttcaaatcatggagcagtgaccattcacagggtggttgttgtctccaggatcctacatctgttgacaccttggatctctgttctgaatcttgcctcctgtgactgctactcagtcctttccttccccgcccaactggacaggactctgatcccttactccattaatgaaagctgatatcctgtaagtgataccagctttttgggttgagctggccaattttactgaagacttgggctagtggaggagggttgaagcatagtttaatacgaggacatcaatgttttaaaaaactcatggttctctcccaaccatgggctggaagaggataatggaaacaacaaaactacactggccacagttttactaggaacatccttctgcccatggaaaccacatcccagaacccagcgacagatatccagatgtctaccatacataaagcaccgcattcttgatttaaaaggccacagtgataaaatgcatactttcttttagtcatgaataagaattatggtgttatgccagggctcatcctctgacctggcttgttggggaatagggagaagcctattagactgtctgagttcaaatgccatccctccaccagcattagaaagacctgagtcagctcacccaaacccaggctgaatccctgctgggctctgcctctgcctatctacctcctagagatctaccctggggctaggtagggagctttccaagataactaccttggaaatcactttttttcctttaagatgtaaagaaacatattcttaagtttcaactactttcttttaagatgtaaagaaacatgttctcaagtttcaactacttcaaacctcagagcttttgtgtgtatatgtgtgtgtgtttcttttctaaaacaaaataatctcatttctttgagatttttgtctgttactgttgtttattttgtctattactgaaatcaggtgctaaaaactgaacttggtgttacaaagaataattttattttgcaaacactaatcctgctagctacaatttctgtatttttctgaaattgaaaaaaaatttacagatatcaagcctcagaagtaaagtatgtcttatttcttttggacattgttttagaggttggatttttgctggttttgcatagttacatgttatagctcatcaactatttgttgtcaaatttgctgtaaggatttactaagggaatcagcagatgccagaaggtaaaaggtgaggtgcctgatctctctcatagtcaggttggaaaaagtcttgaactaactactcttgaactgctcctatggctagaggtccttggggtcagggcatcctcactggctgcgggtcagtagtggggctggggtgctgctgagcagccacctgcgagccagtgcactttctgctccacttctcagcagcggcccacacccaggggcgctccatacacaaacccgctcagctgcagactccagcactgcgggacaagattggcagtgagaggcgagagggttctcaggtggtgtaggagcccttgaactattctcgtttccagcacttacacggaggtgacacatttcttgcgattaggccacacggatgactgacatgatggcttctccctctctggctgcagtcatacagtagtgcaggtgagatggaactcctgataactcgaagctcccaccaagggctctttaataaaatgtagagtaattcaacttctgtttggctagatgagaagataaagttgataatcttcctacttgtcattaaatcgggagcctgtgggatcttggggcttggcctgggcttccctggccttcaggactcgccttaggctgaaccctgggaggaaactgcctcagccactgccaggccactgagggccatttgagtgtgtctcaggtttgctaagagcagtgatctaggaaaagcagttcagaaaccgaattaataaaagcaaacctccctttgtattttttttagcatgggctggcctctgctaagctgtttggggttggttggtttttcctaattcacaatcatggtatcagcagtgccttttctttaatttcaattgatctgaatttgcttctaaacctttaattttagctttattttcctcctacaccctctctcaaagcactagtgattaaatagacaaccaaatatatattaaaaaaacaattttgaagggcagtgagggaaatgctttgaagggcagtgagggaacacttgcagtgaaagcatctcagtgtttctttaagagtctggctgtgcggtgagcatctcttttgtcctgcatcattgcctgagtttaagaatgtgagaatagtggccgggcatggtggctcacacctgtaatcccagcactttgggaagccgaggagggcggatcacctgaagtcaggagtttgagaccagcttggccaacatggtgaaaccccatctctactaaaaatacaaaaaatagcctggcatggtggcatgtgcctgtaatcccagctaccgaggaggctaaggcaggagaatcacttgaatctaggaggcagaggctgcagtgagccgagctcgcaccattgcactccagcctgggtgaagagcgagactctatctcaaaaaaataaaaaaaagtaaaataaaataaaataaaataaaatgaaaaaaaaaagaatgtgagattatccagtcttctaaaggtatggaaaactgactggatttcaaagacaagccatccagtttctcatttaccaattcgactgtcaggctgaaaagagaaaataattctctctaggttgctcttttgctgaaattgttaccagcatattgcagagaaaattacaagatcatcaaaaagctaggtctgggagattttatttaggatggtggatttacgtggcttctgtgcaaaacaaaaactaataataataataataataataataataataataataataataataaaaacaaagacttactttcccaagaggcttttccttcttacttgtgaatgcaggtctccttgggaagcctagagttccctggtagagttatttactttggcccagataggcctgggtttttcaattacaggaaaggttttaaaaacaacaaacaacaacaaaacagtcacagtaacaataatgtgagagaccagaggcaaaggcagcctcaagtgttatttttatgagattgtattggaggccgcggctatttattggggaactggtcctcgtgaaaagcacatttcttttttcgatttggaactctggggggctcctttcaaggaaaccttacccgaggtcagctcttcgtgagtgtcctctcctctctctgcttcattcctgtcggggatgttttcctcccccactgcctgctgtcagctaagccagagagttcccctgaggggtagtacctctgcctggtcctacccgattcctgggctgtcccggccagacagcacctgtcatcctccaggtttgaagttggagctcctgggagaattgtacctgtgtgttcttgtgcccacctacttggaaaataaccattctttagggatgagagggaagcagccaggaggcacggtgctctgtcccggagccacagaatgatgtcagctcattcagaatgatgtcagaatgatgagtgtcagctcacagggcctgctacgaaagatcccaaatggaagctaaaatagtgctgtgctgtgatcccggcaggtcctgagagcacactctctccttcttcattttgtcacatcagcggagccagatggtgtcagagtatgctctttctctctgccaacaatcatcatgcacctgagcccaggacatcagtcctatttcccacactcctgcgtgacagaacttcttactcccatttcacagctacagaaaatgagccaggaagggtgggtaactcgcacaggcccatttgagggaagcagcagagctaggctgagactcgattttatctgatgcctgagcctatggcactcctggacaggttcctggagtaaacaacaccaatacagcactctgaatttatctgatgaagactggtgtgggtgaactaggaacaaatgccaccaaactataagaattaggaaacacttttgcacatgctagggactgtcaggaactactgggggcattaccacaggacagccttggtgctgtctccagcagagccttgaactccatgtccacagcacacactggcatgggtggtgtgagtcccaaattccaggtggggttaggcactgcccttaccacttctgttgtggggtttccttgtttctagtggtaactcaattatcctaacatactactcttgatacatcacatcatattgatgctggatatcttttgttttttttgagatggagtttttctcttgtcacccaggctggagtgcaatggcgtgatctcagcttactgcagcctccgcctcctgggttcaaacaactctcctgcctcagcctcctaagtagctgggattacaggtgccacccatcatgcctggctaatttttttttttgtatttttagtagagatggggtttcaccctgttggccaggctggtctcgaactcctgacctcaggtgatccatctgcctcggcctcccaaagtgttgggattacaggcgtgagccaccatgcgtggccgatgctggacatctcttaataaattctaagccaggtgtggtggcacatgcttgtagtcccagttactagggaggctgaggcaggaggatcgcttcagcccaggagttctaggttgtggttagtcacaatccccctacagctctccagcctgggtgacacagtgagacctcacctcaaacaaaacaaaaggaaatgaaacaaacaaacaaacaaacaaacaaaacctaccaacaacaaaacaaaaccaacaaacaaaaaatcccagattctaagtagtaatatggctaagcccaaagggaactcaaattactaactctttttagtttcgttccatctgttggctggcgtctgatcagaagggacccgcagttcctgtaaagccagttgatgcatccagtgtcgtattgtccttgactcagtgtggtctgtgcttgcaaactgactacacgtattagggcttatttggttttctattttaaggagttagtgtaagaatgaatttttttctctattttttccttatataacttgcccatcaaattctttccaattgtgtcattagaggcctggtgattacgtgcatgacaagtatttctttggttagttatcctctttttttcttatttttattgttcagacttgacagtttgtatatcttaaaatatcttttcattttctttgaaatatgtcttttgtaatttcaaaactactgaaattatacttcattcatccatagctttgatcaattttctgctctcttcttgttttactaaaattaaatttactcttttttacactttcatttacttgtgagttgtataatgttttatctttttttttttaagtctcaattcaagtagcctaatgcccttgttaaattactctattttacctccttgtacttaaaggtcattttgtcatatcttttgaaatgcagtagggcctctttttggacttcctatgccactgcatagatttacatttctgttttgtaccaattttattttttttaaagcactgaaacatcacactatgttctaatattttgtaggattagaatttttctagctcttctttcttcttaggaaatttttgtttttaaaaacacatttacttaccaattatattttagagccattttgacttaagaaattattccagttggtattttgattatgtttccattccaatataaatgcgaacttgggttgagagtgtcctctcacccttcctctttcctcactccctggagtcatcttggccaactccagggtccctgtgtatggagcacttgatgtcctgtatacccacctcccctgctgtatggccacctctatggaggctgtagctttccatagagtacctgcactcagccatggcagaaaaagcacaacgtcctaagtcactagtgcaaacatcctaactcgaccataataattgcggattcaaaaaatgtccataaatatgtatatttaactccattaagaatagttgtgtttagctgaaaatgctctatcgataccctaacgattggtgcttaatttctaatttttttgcagttgaaacaatattaaaataactcttttatacatattttagatactttcccaattgtttcctcattaaaaatctatcaaatgagaatctttgggttgaagagtatgtacatctcacaatttaaaaacatcttgcttacttgacttcctgaagggttgtaccaatatgcatctccttccagtgttcatacttaattttgattatttgtgtgtctccttggagtacttgagtggagaaagtattcctcattcatctttataatgccaaagtctctagctcaatgtttgagaaagtgctaaataaatgttcattgaatgaacattgaaagaaaagcaattatttttcaatagaaagccaaaaaacaaccctactcctcacaaaaaaagagagaagggagaaaaaaattggtttatttctttctgtcagtatccaactaactaaaaggtttgcaaaaattcacttggggaaggaattttggactttgatggagagatgtttggaagcctcgactcctaactgtaaaggatctaggcagatcaactgtaactatagttgctgtttggcatttggattatctcttagcttggacttgtgctttgttggaactccttgtgtgaacattgggctgtgttttcctgcagtgcttaacaacaagaacttcaaaatacatctgggaaagtcccctcttttgagaggttggcatctagaggccccaagtgccccaaagagacacaatagaatttcatgcttctttcaaagccctttgtttccaaagacaagggcaacagactaattatgtgctttactttagcttcctggatattctaaacttatggtgttttcctcttctctcagccaacgagatcttctggctagctcctccctttgaaaggctctctttctttcttattcatttacaattttagtttttgtacctaagcattttattctttgtggtttttagttgcaaccaaatccacataccgcatgagtcacttggaggatttaaaaatatatttagactcaatctggagattgtttgttcaagacagatggaaaattacatacttaatctgtaggcctgagcttctgtccaggtaccatcacaaattagttccaagatattgcacaaaatagtaatctttatgacataaaaggtgtaaaactggcacagtattacctatctcactggttgttgtgaggattaaataatgaatgagcaagtgcttgcaaatgcttcatggttatgcaaacgaactacttaaggatagggcttggtcttcacatctgaattcccaggagagcctcattcagggattgtgtacggctctgcttcatttagtttcacaaggacattcattccatcctcttggacagaaactaggtcatgttggttttcactgctatttccccagtccctgtaacagtgcctgacgtggtacacaattccgaatgaacgaatgagtgaaagcacttatttttattgccttagtacaccacagtttattgatctattctcccattgacggggtttgcatgacttccaatttttttttctttcgcaagtaatgttgtgtaaacacttttgaccattgagcatacctcttggttcatgtgtataatcccttcttaacaactgtgtatttggttaaattatatagtattcttaaggttgaaaccagtctaatctaacagaattaatatggttcaatttactacatagttattgaattattgggccatagaatttgcaaatccttagcttactaatattgtcaaattgctgtccaaagttcctgtttatgcatatggtcactgacaatgagtactctcaggctttttacattgtcccgaattggtgggtgtaaaatgatgatctcattggggtttaatttgcatctgcttgagtactactgaaactgggcatcatataaggtgttcatagtttgatcttgtctgctcatttcttttgactgtgttcaattctatcatttcctactattgatttgtaggcatttgtaggtattacagataactgcattatcagttatacatgttgaaatagatgcttcaagtctatggctggtcttttccactcttcaaatggcttttctgaagaacagagattttaaatttgtaaatagcttaagtttcttttgttgtttatgactttcgtgtcttatttaagcattaaaaagaaaaggaaaactgtctgttttcttctgaacattttaaaaaagtttcgtttacttttggccaggtgtgatggctcccacctgtaatcccagcactttggaaggctgaggtgggcagatcacttgaggtatggagttcaagtccagcctggctaacatggtgaaaccctatctctaccaaaaatacaaaaattagccaggcatggtggcgcatgcctgtaatcctagatacctgagaggctgaggcagaagaattgcttgaatctgggaggcggagattgcggtgagctgagattgcaccactgcacttcagcctgggtgacagagcaagactatctcaaaaaaataaaaagacagtttctttcactttttattgagacaggatctcactttttcatccaggctggagtgcagtggtgagaacacagctcactgtagcctcaaccccttgggctcaagcaatcctcctgcctcagccccccaagtagctgggactataagggcacaccatcatgcctggctaatttttgtattttttgtagagatggggtttctccatgttgcctaggctgaaagttgttgttgttttctcatatttagagttttttatatgatgatgacaaagacctaatctatccctgcctcctctatctccactctcagaataaccagttttatagcacaatttgttgcagaagaaattattgtccctttgatttgtcaaccacctttctcatacatcaagtctccaaatatgcacagctctgttgctaggctcttccacaggttgctttgcttattatggaactaatagcatggtgttttaattactattacagaaagctttgttatatgaaaggacaagttatttcaacctgttgatgaaaattgtctcaagtatttttgaccattcttctcccaaatacattctagaatcagctcattaagtatgataacaacagcaagatcaaagcaaataaaacaaaacaaacaaaaaccttttggaattccattagaattgcattgagcctacagatcaatctgggtaggattaacatctttatggtactgagttttttaatgcagtaatgatattaatctgttcatatatttagcttctttttgctgtctttcaataaagttttataattttctttatgaaataattgcacaaactttagtcaaaaatttcccccagatgctttatcttttgttgataatacaaatcatatgttatttaaaaacactttttttgattaatacttgctgttgtagaaagttattgaggtaggtattggattctccttctatgaaggtaaattcagaattttcttcctgtaataaaatattgtaatataatgtaattgttgtgctatatattttgaggttaaatgattaagtatacacgttcataatattattatactttttggtatcaatctttttgttatgtattaatcctctcaatcattgattgatatccttatatattgataagaatgacaactttccttgtcttaaagtcttctttgtttgatattaacataactaatttgtttaatatttacctaccatatctttttcatctccttccttttaaccattctatgtccttatattttaattacagccattctaaatagcatatagcattttctttttgaaatcaagcttgataattcttgtctttcaaatagtgagtttaatctaagcattatttgaaattaaagcatactatttgaaagtttctttagtgtaggtctgttgttggataacttggtttctgattatgtgaaaaatttcttttagcctcattcctgagagattgtttttctgggtatacaattctagattgacagaatttctttcagcaatttaaagatatttaactatctctgggttcttatttttgatgagtcttcagtaattctaattatttctttgaggtgatgtgtccttattcttgaattgatattgagatattctcttttacttagttgtgttgaagtttcactataccatgtcttagtgtagatttagctttcctagtaaatgtggtatgtactttatctatggatttggacttgtgtctttcatattttctaaaaaaaattttagccactagttacttaaatatagccactcctactttctctccactccccttgaggggcactctctcccttaaattgaatcttatatgttaagattcagctcatgaattgttttttctaatttattttttggtcactttcctctcctcagctctttgttgatttattttacttccagaaagaccagaaatgcaagaaaaatgacattcttttagcaggaatgcccctgtcgtttctagtcagcatactactgaaagcagaagtgatattccttcatttaaaattttcttccattttcatttggtctggaattcattgccaagccttttcacccctcagggtgtttggtaaatatattatctgtgttatttcattattgagaatatgtatatatctgtgtgtatatgcatatatatatgtgtgtgtgtatatatatatatatatcagtgtatacatatatatatcagtccctgtctctctatatatatcacaaatatatatacatatatatttgtaaaatttgttgtttaaaggccatttagctgtgtgtcattttttttaatcctactttttttctcttagaactttgtaaattgatgcattggcatctaacatgaaatgttttgaggatatatttaaggccagactgattttcttctcttgttagggagttgtcttttttttttttttgtctgtctagacacctgtagtagtaatagtttatttttgaagttcagtagcttgaagtttaatggccgtagtttaactacagcttattttatttttctgaaatatagtatactctttcagtctgcagatgaaatcttctctatttcagggaaattctcctatcttatatctttgaggaatatcgtcaaaaaatattttgttcaatttgttggattctttactttgggggtgccaattttccttatgttgtatagtctttgtttttcaaatatattagcttttgcgtcttaatatttttgcctttaaaatgtttttaaaaatcattattgttattgtaagctgtttcttattccaaaaattgaaatttaactagtatgtattttctttttatggtttctaaatcatttaacattccacagtgatgatttttttgttttttttcttagatccacaatctcttttttacttatttgtttatatcttttttctgagcccttgttttctgaatatttgtccttattaaagtgttcttcttaatggggcacttgtaaagaaattcttcattttatttgagttgtttcttttccaggcatgctttatgacttccttttgttttctttttctttttctgttggtttatttccttcctaatgtttagatagcagctgtgctctttgttttattgccacctatacttggggagttcagcccaggtattatatttgttcttgactctcttttcaataaatctgggaacagttttatttctccttcaatatctagtgtgatccctaagcatatcctgtatgctctaatcatctatagaaggagaagattggaaatggtcaggacagccatggagaagagtgagggaaatcatctgagatgcaatacaacctttattagaccagttgggctccgtgctctcctatgaaaaattgttaaacgttttgtgtaatgttcagttcattttgtggaaattgctctccagctttggattcttctcacatttctctatgtagtcctggaggtttcctcgagagtcagcctcattgttcactttccttgtttatttgatcattctcagtagcagtttttccaactcctctgtcagaagcaggagataaggagactcctttgggttgctcatctccatggatgtgggttttggggatagtcaccaggattatgaggggacattgttatggctttagagattgtcaactgagttggggttgaagtatggtaggcttatttgatctgctctagaaacttttttttctttttttttacgttttggtagtttttttctattaggcaaatacaagtttattcctgcctcctctaatttattttcttttctctccccccaccccacccattttgtctggaagaagaaaaagtctgtgaggaagtttcaatgtatcattttacccaggagtcctttttgtgtacatgttcatctgtatgtattgctaatgtcttcccaaatgccatcgtggctcagctgtgctgatggaaacatggaaaggtttatattcatgctcagcccacaaggtgagaggaatggtagtggaacagggatctgggcatccacgaaattcatggtgagaagtgccttgcggatgggaagctccggggtacaggactgaacgcttccaccctctgctggtcggagcttccctcctggaagagtaggagggctttgtggtggtttggtagtgggggcattgttttgttaactgctaataggtttaccagacggttatttttcttgagaggagagcctgtggcagcatctgtgccagcgcatttggacagcagaagtgccagtttctgcttctgattgggtcactttctggtgttaagaagtcagcaatggaaggtctgagatgtgcgagatacggtgaagccctagcattaatcagacagcattcctatttaacaggggtaagattcaaaatgttaagcaagattcgaggataataatgacatataagaagaaaaacgtgattaaaaatgtgatgagaaagggaaggctgcctttgcacccctgcagagaaatagtcttatgaaagccactcacacacaatggaaaatgacacagcagaactggtgtctggctacttttctcttgaatggagcaacttcaaattcagaacaatgaaagatattttttcacttgtgattttcagaagggtcagtgaccaccttgtaaataaaacactctgagatgttgttttttaggtttaattggaattctgttattatttcaagatgcttagagaaacttctcaacgataagattcaaggttttattttcttccaataatattttcatttgaaactagagatcggatgtggatttttaagactggactgaaaaatatttgtgattttagagttactactattttaatttggctttggcagggtcctttaaatgatgttgtcttcatgtgaagggaacaatatccagatactataaataaaaggattgataaattaatggcatgaaagatttagacaataaaaaggcaaatacaaagttggagaaagtatttgtaataccataagccatgaaaaggctgaattctttaattaaaaaattaaatacaaaatgatgctttgtaagtctgtaaaaataaagaacaacttaatagaaaaataggcaactggaagaacagagagttaatatgcaaggaattattatatgcttaacttgtgaaaaatgcttgatcttaataactaaagttatcattatgtttttgcatatcagcttgacaaaaaattaagtttgttaatcctaggtgctattgagagtgcaatcagagtaaatgataattggtttagtttttaatgagggcattttcactacatctatccaaattaaaaatccacattaaaaatcatatacacttcagtgcagtaatcccatttggcaatggtacctcacggatctacttacaaaagtcagccaaatatgtaaaaaaaacctcatgaagttaaaagctgggattcattgaactgcatctacttgatttcataatgtgcattggttttagtatgttgctgtcttgttatctgtaatcaactataatagagtaatatatttggtgttttggaccaaaattcatgctacacatatgtctgactttgatggcctttaccttttcaagaaaactgttgcaaatttgagcaaaattttcccagttgtaatatttcaatagtgtcatgtaatagaaaaaatttagaaacactcctaagagagttttcaatttcaagcagaaatgcttctcttctaagtaagtaccactttaattgataaaagaaaaacaacctcatgatatcactggccccaaatagaaaaacatgcaaattttcatgatgaagtgattggttaaataaattaaatcctacggtggaatattatgtagcctttaaaagtagcaaggtagaactataagtgctgttatggaaaattggttctaacacattagttatacatatacatgtattttgtaaatagatagtttatcctataggagagtggttataatctttctgtacttttaaaatttcttaaccatacatatgtttatttacatatttataatgtcaaaagttatatgagtcttggttctataaaccattttctgttttttatacaactacttgtcttaaaaaatagctattgtatgttattaaaaatgaaacagaataaaaaacccaagaaaattatgtgtttattattcttaatgctatcaagttatcatttaatatgaggtatattttttattttgcttacttatattcagtcagaattaatgatggaatcttcccccaccacctccctaccccaatactccagtaacttattaatttattacaaagaatgaccaaaatgacttaaataagtagttatctcctgagcgtccttgacctttctttatagtttaattgtggtcccttgaaccagagggtgatctgcaggcattttctttgttatcagaatgtgtgaaactaggtttcaggactgtgtcagagaactttttaatcatgatgcactttttgtcacaagaaatacttcctcgtggaatatttcaaagacggtgatttatttttaattttttaatttgagacggagtctcgctctgttgccaggctggcgtgcagtgtggtgcagtctcgactcactgcaacctccacctcccgggttcaagtgattctcctgtctcagctttctgagtagctggaattacaggtgtgtgccaccatgcctggctaatttttttttgtatttttggtagagatgcagtttcaccgtgttggccaggctggtctggaactcctgacctcaagtgatccgtctgcctcggcctcccagagtgttgggattacaggtgtgagccaccgtgcccggccaaagagggtgatttcttttcttctttaattataccagggatggaaaaactcttttacacctgtgttttgtcttcatggctttaggccactcatctggtcacatttagatctgcttacaaggaaggattactgcaatgggatatgaccatggcagttcaaagaataaagaaaccaaagtgaccagaagttcatgttagttcaaagcattataactgggaatctgaaacagtaagatatcctctttggtgtttgatggagcattcttagcctgcagatttttaggtttttttttgtgcatttattcaatggcttgcctactttttgtctggctataaacttttgtatttgcaaaatgatgtcacatgaattcaatacaagattatccaccataaaacaagtgaagaatgatgacagtaaaattaattttatgacaattgaggcttttctattaattttttgggctataccttataggtggtgtttttttttttcctcaaatgattaaattccatgtgtgaaatgattaaattccatgtgtcaaagttaattttcttttaactttgaaaatttgaggttgtacaaagtattgcaatcatttgagtagctcttttgtagtctgtgtcaagagattttactccagtaatcttagttttaggagtttattctaattttaagaaaataattcaaatgaaagattatttatacacaaaaatgttacttaacagaagaatgtgtgaattatgggatattcctttggtaagaatattatgcaacaagtaagctgatagttataaatcttgtttggcaatattgaaaaatatgcataaaatgaaggtaaatgagaagtggatgctaccaccaaagccagcaaaatatctatttgggtaaaaaagtcagaaatgttaaagaaattagaaaaataaaaatagttgctgtattgaagtatgggaaatacgggtgaagttatttatttctttaatttctgtaatgtcataagttctgaaataaataaaaatgtgcagaaaaaggaaagaagcaaaagctgggtctgatgggagaagaacaaggagatgacaccgtcacagatctggacgcaatgataaatgaactaggccttgtctgtgggctcctgtcccaaatgactgttctgagacacacagcagggattaaaatgacctccttcaagagatgaaaatattgtaataccttacaatttattcaggtgatttttttttttttttaattttctaggtccttttccttgctgaattcttctggccttgtatcctgtttgtaattctgacagttcttcgttttcaagaacctcccagatacagagacatttgtaagtttcactttttaatatactttttgaattaacctttggagaaaaaaaactcatagcactctttcttgttttttataaactctgaatgctgagtgaaatgaatagatagggtttcattatgacaataacaacatatctggagtatatgtcaataagccacaatttaggttttgtcttttaagaatgatattcacacaggttcactcaatctagcacatagatttattcttccaattaaaactgacacaatctgggcataagtaaatagccattataaatatagaaaggagaagaagtagaagtgggagatgcatttcatagtttatcagaatgatactgatagtaatgttgatggtggtgatgatggtggtgagaaaataatgatgctgatgatatgatgatgatggtgaagatggtgatgatggagatgatggtgatgatgatgacagaaatgataatgatggtgatgatagttataatggtgcaagagataatgatagtggtgattgtgatgacagagatgatagtaatgaagatgatgatgatgatgaagatgatgatagtgatgatgatgtagataatagtaactatgatgatgatgatgatggagatgatgatggagatgatgatagtgatgatggtgataataatagagataatagtaatgatgaagatgatagtgatgatgctggtgacgatagtgatgatcttcatgataataaagatgatagtaataataatggagatgatgattgggaaaatagtgatgatggtgatgatgatgaagatgatgatagtgatgagagtgattatgatggagataataaccgtgatcatgatgagggagatgatgatagtgatgatgctgacaataatgtagataatagtaatgatgtgatcattatgattgagatgatggtgatgatgatggagatgatagtgatgatagcgatgaaatgatgatggagataacagcaataataatgatgatggtgatgatgatgatgatgatgatgatgataatgaagagtagtgatgatgcagctgatgataatgatggagatgatgatggtgatgacaatgttgatgatgatgataatgatgatgatgatgatgatgatgctgatagtgataatgatgatgataagagtgatgatagtggacgatgatgataatgatggagatgatgatggagatgacagtgatgatgttgatgataatggagatgatggtaatgatggtgatgatgatgataatggagatgatggtggagataatgatgatggtaatgattacgatggagatgataatagtgatgatggtgttgttggtgatgatagtgatggtaatgatggaaatgatattgatggtgatgatagtgattactatgttgatgctatcagttgtgatggtgatgctctgataaactattactggtaacttcctgtgcttcaggaaaatggtcagatggaccattttgtttttctgggttgaaaccttaacaacatcactccttgagaaatagtggcctgctttgtctctatcaggctataccacttaaatatgtataatgtggttgactctgtaatcattacatcaataagggtttaataagtgttgggatttacccaaaacagtgtgtcagttatatttaggttttacacatattaggaccattcctatcagtttgtctttgttgtttggagactctattgtgtgttgcagaatggaaaaatgtaaaacccatgtgagtaaaatatcatttaagaaaacctaaaaagcttttcagggtttctactttattattattatcaataaatatgtattgagtgccttttgtgtttcaggctgagaataaaatggtggacaaggcattttccctgcctttgcagagctcactgtagggccagactattagactgtagtgggaaaattgccatgatgggattttatacagggagccatgtgagcacacaagagggtcagccaatccattctaaagaaagccttctcaggcactgtgcaactttgtcagaacaagagagtgcagaggagaaattgcctaggcagggcagacagcatggacaaaaacctaaagtagaaccaaaaggcagagatgtggctgaagtagtaagcagggtcaaatcaataaagggctttgtatgatgttgaggatggtgaactctcaaagaacatgaaggagccattgaaaggtttcaggcaaggtcataataaaatgagcatttaggggtcacattctggacactggaaaaggcagaatttgggattggtggagagcaacactagagaaggcaagatcaacttgtggaactcttgaataaccaggcaagagatggttgtgccctgaagcagtgggaaaagggcagattcaacagacatgaaggaggtaagatgggaagaaacaactggctggatgcatgaggacagggaggcctttgactggaacagctgagtggagagtgcactcccactgaactgacagggcacaggacatgtgggggatttggggagctgtgctcagcatgaccatcctgaatttgagggactcttgtgattgtcagagtgagtcgcctaatcaatcagattatgaatttggaatcacatagatgaggacacctaagaaggagaaacttccagaacataggcctcaagaagagcacattcaagggacaagtagaggagacaataagcagcaaccagagtgctggaagggaaacaaagaggtttggagtctgcctgggaagcactgaaagaaggaggtatggcagagtgacaggtgctgttgctgcatgagtagataaggactgacaagttctccagggcagttcagtagagggataggatgaggagggccaggctgcagcagcctgaagagcaaagggagtgaaaaaagggaaggtaagtgatagaaaaccaggtgtactgtgcaggagaaacgggcaaaacagggcaaaaaaagcttgcatgcaaccagaggataacgtggtatcaggactgataagaagcctcaaaatgatagtggctaatgcaaaattgtgaatgatttagttgtaaatgatagagagcactaagtctgccatccactgtggtagtagctcagtcctgccctatggaaagggtagcttatgatgttccttatcctcgaagtttccatccatccattaaacatttatcaaactcttgctttgtatcaggactgcagtccaacaaagatgtggcccaaagaaacactggaaatgtttcctagaggtatgcagatgagctttcctacagaagggaaggctttgtcagagcctcaaggggctcaagagtcaaaattgatcaaggactgcacgttgaagctccatcaagccccccatcagctctgtggggatgggcatggcgtgcaacctttgtgagcctcttctctataaagacagcaaatttcccctggctcccagggctgctgtgaggacttggtgagaaagccagtcaggagcatgcactcagcaccagcctggcatggcaatgactaaaaaatgcccatccccctccctcatgcttcccactgttttggggtggcctgatgttaccatgccaggtctttaatcttggagacaaagtgtgcccagggctgaagtcctcagtctctgacccactgagcactgtctgtggggccaccatttctgatgtgttcctggagagatagaggggacacagaagtcacgtcaaggaaatgcactatctgggcactgttgctgacccctgaagtcaccaccatgtggaagatgttctgtgcctgtcttgttacaggaagagctggccccgttcttgtgctgtgactgagagggaccttagaaaaggtgatatggattttacaactttagaatgaagccaaagactgcatatatgggtattttcactaagaataaataatcttccaaagttaagattatttgcataggaaagtgaaatttcctgttaagtgccttgagagattaaagcttgagaagctttatttatctgtcccagtaaattctgtttgtgctggtgaagttaggcttgtgatcacctatggtttgggcaggctgcacatgcaggaggacaggcacaagcccagggtgctgctgcttcctcgagctacatatgaatgtgaaaaccgctgtcagggcagcgctgcctttgtgttctggctttcagggactgggaaaagagaaagacaagaagcggtcacagaccctggggagacctgggaaagtgctccaggtttcagatgggccctggcaatactggggcgctggacaggcatctccattccaggtctgctccctggggaggtagtgaggtgtggtagaatgaacatttgacctggagtcaaagtagataagggctgacaagttttccagggcagttcagtagagggataggatgaggagggcccggctgcagcagcctgaagagcaaagggagtgagaaaagggaaggtaaatgatagaaaaccaggtgtactgtgcaggagaaacgggccggtaatcataagtttcatgttgctgcagccatcagcatcctcaccactcccaccctcctgatggtgtgaagggaggatatggttggggatgtgtaaacagcacattatccatagaggtggctattttgtagtgacatttgttctgaaaagtcctattcagtgtagacaatttttttgtattatacaatatttaacaactatatttaaacattaagaattcaacttgcattaagcttgaagtttttttgccaaaactaaaaactcctacatttttatatgagatgggaagaagcatcctttctattcttcctacccacagcttgtttacagagagcggtgtctggaagcttggctgtgcatcagggttatttccactcagtgaatggggaagcttgtgaatcctgcagctatatggctgctcagagccattctgccttgaaacatgagtactgaccctggaagaaaggtgttagatataaaggtttttccattttgtttgattctttttgtctgagcccttagatctcctttaaattaatagcaaggttaataatataataatatgatgttatatattacaatttcaactcaacaggaattccatttctggtagcaggtatacggactcatttcttctttgcatctatttctaggttatttgcagccccgagatctacccagctgtggtgttatcccctttgttcaaagccttctttgtaacactggatcaaggtgtaggaacttcagctatgaagggtcaatggagcatcattttcggtaagagaaacacaaagatctttttcagaaatctcagaaagctgatacatagaacaggcttctgctttttgtaaagcctcaataatttgggataggtcagagatcatgagaagtatagaaattaaagttttattaaattcagagtcatataattctgcctccaactaatggttagcttccagcaggagatctttccactgtcacttgcgggactcacagagtaataactgattagcaaatgccatttgcatgtaataatttgttttctgtaggttaaaactcttgacttcaaaattacttgtctagccaacttttcattttagtgccacatgcccccagaacaattattttttgagctacctactgggttttttctcctgtgctgctagttgactagaatcttgtcgccagctgagggaaaataaaactgggcagtaactctttatttgtcataaaccacctaaacggactacaggacagttaagttgccttctctgagtctctgaatgctgagctatgcctgtggttgcctacagtgtcagttggccttaaactcaagaagagaaggagaagaagatatttcatgtgagaagagacaaagtgagggggtttaacttgggggatactgaatgccctggaaacttctcccaggtgaagttaggaagggaaggaagtggctagcggattaagatagtttgaatttatcaggtatgaatgatctgagttttatttaatctatatttactaatattaaacaatctaagatatttaaatgtaaagcaaatgttgacatatatgatctttattttccaactctaagttacaagaggaaaattaaaagtttccagataattttcggcatatcaggtacaatatttataaatggtgttgttttagttcatttgggctgctataatgaaataccataaactgtgtggcttataagaaacaaatatttatttctcatagttttggaggctgggaagtccaagatcaaggtgccagctgatctggtatctggtgagaaccctttccattataaatgacaccttccagctgtgttctcacataatggaagggatgaggcatctctccagggtctcttttatacgggcactaatcctattcacgaaggctctgtcctcacgatccaatcacctccgctatatcatcttaggggttatgtttcaacgtaaaaatttggggatgggagatgccaactttcaggtcatagtaggtgcttactttttctgagacaaatcatatagaaatatgatataaagaggctcatttgaaaatactgtaaagtgataaccctgaaaagttcaatggtcttttcttgaatgtgtggagaagggaaatatacaaaactctgtctttcttggaagcattagaagagcttgagacttagcagtgtctttatttcaagtctttcttatgtctcttccttacttggattgggaggtttaaatgatgttgaagtgggaagaatatgattttgtggctaaacaatactggctctgttacctgtggttctgtgaatctgtgcaaattaattgacctctttgaatctgtttactcacttcaagtgttgtgaatgttaaagacaaatatagaaaacatctagcgcaatgcatggcacagaggcattcaaccaatgggaattgataataacaaattcttattactacggctgtaacaattataaaaatactacttgaaggccaggcacggtggctcacacctgtaattccagcactttgggaggccgaggcgggcagatcacctgagatcaggagttcaagaccagcctggccaacatagtgaaacccagtctgtactaaaaataccaagaaattagctggacacggtggcagatgcctgtaatcccagctattcgggaggccgaggcaggagaattgcttgaacccaggagggggaagtcgcagtgagccaagattgcgccactgcactccagcctgggtgacagagcgagactcattctcaaacaaaaaaaaccccccaaattacttgatatcaggaaataatctacctttgttttctttgtgtttttccacatcaacatcctcacttcaatgtgcagaaattcaggggttataaaagcaacctggtgagattcttcacctaacattctgagagtggtagtcaggttaatagctcaccagcattgcaaagcctttaactttgagaacgaagaatgaaattcctcactttgtctggtagtgcccaagtcagaggtataagaaatacaaaataaaatagggaaaggaaattgtaaggagtaaggaaagagggagagggagaaaggagacaagaaagagtgaagcacgctgtcagtagggcctctggtttcagactcagccacttgaccaagcagatttcatgcgttttcatattggagtaagtgtggattcaattgaagttcaagcccataaataaagactcactcctgattattttgtggtaattgtctcagttaaaaaatacctgaaagcggctgggtgcagtggctcacgcctgtaatcccagcgctttgggttgttggggaaaccagccccacaccacctggcaggtaccccaagtccagcggagacaaaggaaatagaaagagaataagagttcaaaggcgggtccaggggtcctgagcatcggaggctcgctcaccgcgcagagctctcaggctccgcctactttattggtttacaaagctctttgttcttagggcagatgggagggggaggaagggatgaggaaaaggattaatcagtgaaggagaactcctgagtcattcaataagaagtatagcaatggcggtttccgtgaatttccttgagcaaaggcgtgtctaaactacttaagatctttaatttatctggactgaaatgggtgggagcgggtttcaggaggagccaagatgtttgattatactccactgcttcaagggagtgttatctccctgagcaacctgtggaatgctgcggagctgttacgctctcgggcataaagacaggaaggcagtaaggagacttttctcctcagaagctgcccatggctgtctcacacagaggagaccaactcgtctggcatcccagcactttgggaggctgaggcgggtggatcacgaggtcaggagttcgaaaccaccctggccaacaggctgaaaccctgtctctactataaatccaaaaattagctgggcgtggtggcaggcacctgtagttccaactattcaggaggctgaggcaggagaagagcttgaaccggggaggcagaagctgcagtgagcagagatcgcaccactaaactccagcctgggcaacagaacaagactgtctcaaaaaaacaaaaaatcttgaaggcaaatatcacagttaatttagttcataatgtgtctggaattggtgggttcttggtctcactgacttcaagaatgaagccgcagaccctcatggtaagtgttacagctcttaaggtggcacgtctggagtttgttccttctgatgttcggacgtgtccggagtttcttccttctggtgggttcgtggtctcgctggctcaggagtgaagctgcagaccttcacggtgagtgttacagctcttaacacggcgtgtctggagttgtttgttcctcccggtgggctcgtggtctcgctggtatcaggagtgaagccgcagacctttgcggtgactgttacatctcataaaagcagtgtggacctaaacagtgagcagtagcaagatttattgcaaggaacgaaagaacaaagcttccacacagtggaaggggaccctagtggcttgccgctgctggctagggcagcctgcttttattcttatctggccccacccacatcctgctgattggtagagccgaatggtctgttttgacagggcgctgattggtgcgtttataatccctgagctagacacaaaggttctccacgtccccatcagattagttagatacagagtattgacacaaaagttctccaaggccccaggagaggagctagatacagaagtgtcaattggtgcactcacaaaccctgagctagacacagggtgctgagtggtgtgtttacaaaccttgagctagacataaagattctccaaggccccaccagagcagctagatacagagtgtcgattgttgcactcacaaaccttgagctaaacacagggtgctgattggagtgtttacaaaccttgagctagatacagagtgccgattggtgtgtttacaatccctgagctagacataaaggttctccaaggccccacctgagcagctagatacagagtgtcaactggtgcactcacaaaccctgagctagacacagggtgctgattggtgtatttacaaaccttgagctagatacagagtgcccattggtgtatttacaatccctgagctagacataaaggttctccaaggccccaccagactcaggagcccagctggcttcacccagtggatcccgcaccagggctgcaggtggagctgcctgccagtcccggtgccgtgcgcccgcgctcctcagcccttgggcggtcgatgggactgggcgccgtggagcagggggcggcgctcgtcggggaggcttgggctgcacaggaacccacggaggtgggggaaggctcaggcatggcgggctgcagtcccgaggcctgccccacgggaaggcagctaaggcccggcgagaaatcgagcgcagcgccggtgggccggcactgctggggaacccagtacatcctccgcagccgctggcccgggtgctaagtccctcattgcctggggccggcagggccggccggctgctccgagtgcgggcggggcccgccaagcccacgcgcaccggaactccagctggcccgcaagcgccgcacgcagccccggttcccgctcgcgcctctccctccacacctccccgcaagctgaaggagtgggctccggccttggccagcccagaaagggactcccacagtgcagtggtgggctgaagggctcctcaagtgccaccaaagtaggagcccaggcagaggaggcgctgagagcaagcgagggctgtgaggactgccagcacgctgtcacctctcaataagtttccatgacctccctaattcctcaggtaagttcactttgggcagaaatcctgggtaccatctgatgtagcttatggttatgaaaatcagcttcctcattcctgcctttgttggggggtttccccttcattttaacaagaggatttcagagcagaaatatgaagcactgcaggcaacagaagtggatattcttgtgttagtggtcactcctattttgtttaatttaaaatgctttgtaatgcgaatgtgctgtctaaacccgaccctcacttccctttcactgtctgacaaccttcgggaggcggatcgccatacccatgctggggcactcccacccttagtctacagcacccggtgccttgccttctgggctttgattgggtgacctttcatttccagtttcttgaaatgtttccagccatttcctactggtctcatttggtggtcatcaatattttaatttatttttttctccattctcaaacatgcccagaccccctgagaatcatctgaccctctctgcctcttttccaaccaccatactgcctggttctcagccttatttgattatcacctgctgctgcctcacctcagcttctcagtttgcttttcactctcttgacactcttttttttttttttttctgagacggagtttctttcttgttgcccacgctggagtgatatgatgagatctcggctcaccccaacctccgcctcctagacttataattttttttttttttgagacagtctggctctgctgcccaggctggagtgcagtggtgcgatctcggctcactgcaacctccgcctcccgggttcaagcgattctcctgcctcaacctcctgagtagctgggactacaggcgggtgccaccatgcccagctaattttttgtatttttagtaaagagggggtttcaccatgttggccaggctggtcttgaattcctgacctcaggcgatctgccccccttggcctcccaaagtgctgggattacaggcgtgagccaccgcgcccggcctatccttgtttcttaaatggctttcctgacatggagacgtaacagcattagattcgccagggagaaggattccttctgtgcctgccgtcccattccgatgctttggggccctccacaatgatgagtactcccctccccttcctccgcaccttccaccgcatggtcggcctttctctttttgtattccccatctgtccagcccttacacagcccaaggtcttcctcttctatatgcagtcagctctgtcgtggtcagctacctgctcgcgatgcagcaccatggcttctgcacactgaggaaagacaactccggatgggtctggggtttatttcccagcccctttcataacttagtggagagctggcccaggaggggtgagtgaagaaagaaaaaacgatccaagctcctgagcccagagtctcccctcctgacccagccacttgcctaaggaagccctccctgtaactgcagtcacttgtctacctgcaatagagcattttagggctgggtctctgtcctggggttctctccttgccctgcctaggcatgtctcttgatggactgttgaaaacttgggaattatgtgctttttgctaggtttttatttttaaatttctcctccaataaaacttattttatttttacaccgtgtttagtatttcaattttgttttctttcctacttcaggttataaagataatttcttacattattttcttaaagtattatagtttttcctttcacccgctggtctggaattcatctgggttttacgtctatgtatggtgaaggtaatgatttaactgcattttttttccatttggataagtattttttcagttgtattattaaacagtttatcaatttcacattgatttgtaatcccattgtgacatgaattaagtttttgtatgtggtgcatctgcgtctggcttctccaacttgttatagccccagccattccttgaactataccctgctgtcttactgtagctttctaatgtcttgatatctgaaggagtaaatgtctctatcttgcacttctcctttagggaagtctttgttcttccatgtaagtgtaacaaccttgttgtacaagtcagtgaaaaatattattgggatttttattggagttgcattgcatcttgagatcctgatgcattatttaatttatttaggttttctttagtgtctttcaacatagctttatagtattttttcatgaaggttatgcatatctttcattaacttacttccttgttactttatatttgttgttgctattgcaaatagtattttttaaaaagttacactatgttacttatcattgcttgtgtaatggaaataaagttaattttaaaaatcaactttattgatctatacaataacatttaagagtacatttcaatgaatttgacatgtctatgcacctgtgtaaccaccatcatgattgaaatataaagcatcttcattttcctcagaattctcctgtgctctatcccagcccaacctacctccactcaccccacatcttcagatccaggcaatagcttgtctgcttttggtcatctagattagatttgccttttctaaattttatataaaggatatatccttggtgtttggcttctttcacccagtaaaatgttttgagatttatttatgtggttggttgtattagtatggtcatgcaccacttgacaatattttagtcaacaatggactgcgtatatgacaggggtcacatagaattataataccatatcttaactgtactttataaatgtgtagacatgcaaatgcttaccattgtattacaactgcctacagtattcagtacaatgacatgctgtacaggtgtgtaggctaagagcaataggctacaccacatggctaggtatgtagtaggctccaccatctaggtttgtgtaagcatgttctgtggtgttcacacatgatgaaattgcctaagaatgcatttcccacagtacattctcttctttaagtgacagatgactataattcattcctttttatttttcccatgggtaaggatgacccaggatgttcttttctgtttttttggttaatttttaaaaaaaattttgtttctgaatatatattttaaaagtctttatttttaattattgtggatacatactagttttatatatctctgaggtatgtgcaatattttgatacaaatacacaatgcataatgataaaatcagggtaatcaggatatccatcatctaaagtataaatcatttgtgtgagtgtgtgtgtgtgagtgtgttaggaacattccagtttcactcttttagttattttgaaatatgtaataaattattgttatctatagtcatcccagtgtgctactcaacattacatccaactccttctatctaactgcacttttgtacccgttacttatcccctctatatctcccacctcaccactacccttctcagcctctggtaactatcattctactctctgtctctatgagtttaattattttaagctcccacatataagtgagaacacataatatttgtctttctgtgcctggcttatttcccttaacataatgccttccagttgcatccttgtcgttgcaaatgacaggatgtcattcttttttatggctgaataatatacgtactacattttctttatccatttatatgttgatgaacactaaggttgattccatagcttggctgttttgaataatgctgcagtaaacatgagagtgcagatgtctctgttttttttttccttttggattggatttatacacagcagttggattgctagatcacatggtagttttatttctagttttttgaggaacctcccttctgttctccatagtggctgtactgatttactttcctgccaacagtgtacaagagttcctttttcccaacccctcactaacatttgctattgcttgtctgtttaataaaagccattttaactgggatgagatcatatctcattgtaatttggattttcccttcttggatgagtagtgatgttaagcaagtgttcatgtcctagtgacccatttgtatgtcttcttttgagaaatgtctattcagatttttgcctatttttcattgaattgtttgtttgttttgtattgagttgtttgagcttgttatatattctggttattaatcccttgtcatatgtgtagtttgcagatcttttctcccattctgcgagttgtttcttaacttggtttgttatattattttctttgctgtgcagaagcttttgagcttgatgtgatccatttgtccatttttacttttgttgtctgtgcttttgaggccttactcaagaaatctttgcccagacctatgtcctggagtgtttccccaaagttttattctattagtttcatagtttcaggtcttagatttaagtctttaatcaattttgatttttttttaatatggcaagagataggggtttagtttcattctgcataaggatatccactcttagcagcatttattgaagagactgttctttcctcattgaatgttcttggagcctttgtaaaaaatgaggaatttaatgcttggatttatttctgggttctctgttctgttccattggtctatgtgtctgttttcatgccaatactgtgctgacttggttactaaagctttgtagtatattttgaaatcaggtaatgtgatgccatcagctttgctctttttgctgaggattgctttggctattttaggtctttgtagctgcatataaattttaggattttaaaaaatgaattttttttctatttctatgaagaacatctttggtattttcatagcgattgcattgaatctgaagattgctttggggaggatggacattttaataatattgattcttccaatccatgaacacggaacatctttctaactttttgtgtgtcctcttcaatttctttcatcagggttttatagttttcattgcaaggattttttgcttttttggttaggtttattcctaggtatgttattttatttgtagctattataaatggtattgctttcttggtttctttttcacattgttcactgttagtgtatatacatgctattgatttttctttgttaattttgtatcctgcaactttactgaatttgtttatcagttctaatagtttcttggtgaagtctttaggtttttctaaatatgagatcatgttatatgcaaacaaggataatttgacttcttcctttccaatttggattccctttatttctttctgttgctggattgttctggctgggacttccagtgttatgttgcataaaagtagtgaaagtgggcattccagttccaaatcttaaagaaaaggtcttcagttttcccctgttcagtatgctagtagctgtggttttgtcatatgaggtgtttattgtgcttgattgtgttccttctatatccagttttttgagagtttgtatcataaaggaatgttgaattttatttaatgctttttcaacatctattgatatgattatatagtttttgtcctttgtcttttgatgtgatgtatcacattgattaatttgcatatgttaaatcactcttgcatccttgggatggatgaatcccacttggtcataataaatgtaatattaaatgtaatattatatttacatgtaaatttaaatgtaatattaaattcagttaaatgtaatattaaattcagttttgttggtattttgttgagaatttttgcatctatgttcatcagaaatattggcctctggttttcttttttgttatttttttgtgtatatgtctggttttggtatcagggtaatactggcactgcagaacgagtttgacagcattccttcctcttcaaccttttggattagtttgagtaggattagtattaattcttgtttaaatggtaaaattcagcagtgaagccattgtttgggtcctgagcttttctttgatgggggaatgtttattactgttatcttattacctgttgttggtttattcaaattttggatttctttgtggttcaatattggtatgttgcatgtatctaggaatttatttatttcttctaagtttttcagttgaagaggacacacaaaaaatagaaagatattctatgttcatggattgcaataatcaatattaataaaatgtctatgcttccaaaagcaatctgcaaattcaatgtaatttctaccaaatcgatgtattgatatatagttgctcacagtagtctctgatgatcctttgaatctttgtggcatcagttgtaatttctccttttttgcctcaaactttatttatttgggtcttctctgttttttcctatgtcagtattgctaaaggtttatcaattttgtgtatctattaaaaaaactttttgtttcattgatcttttaaagaaaacttctgctctgatctttattatttcttctactaattttgggcttgttttgttcttgcttttctaattctttaagatgcatactgtattagtcaattcttatgctgctatgaagaaatatccaagactgggtaatttataaagtaaagagatttaattgactcacaattctgcaccgttggggaggcctcaggaaacttacaatcatggtggaaggggaagcaaacatgttcttcacatggcggcaggagagagaagcatagagcaaagggggaaaaagccccttataaaaccgccggatctcatgagaactcactcactatcatgagaagagcatgggggaactgcccccatgatctaattacctcccatgaagtccctcccacaacacatagggattacaattcaagatgagattttgggtggggacatggccaaaccatatcacatagttaggttgtttatttgaagttttttttctttttttaaaacttttgtgatgtaggcatttattgctataaacttgcctcttaatactacttttgctgtatcccacaggttttggtacgttgtttttctattttgatttttttttaaacaattttaaaatttccttcttaatttcttcattgacccagtggtaattcaggggcatattgttcactatttctgtgtttttacaacttgcaaagttgatcttgttattgatatctagttttattccactgtggtcagaaaagatacttaatataattttaattattttgaatttttttagacttattttgtggcctaatatataatatatccttgagagtgttccatattctaaaaagaagaatgcagattctgtagctgttggatggaatgttctgtaaatgtttattaggttcatttcatctatagtgtagataaaatcaaatgattcttcattgcttttctgtttaaatgatctgttcaatgcaaaatatggggtgtcaaagtctccagctgtgattatattgagatctctctctctttagctctgttaatatttgctttttatatatggatgctccagagttggatgcacccaatttatattattatatttatattacatttcgctgtctgagaggtcacatatctctgtcactgcaggattggtcactgattacttagtttgtttggtgaggttgtgtttttctggatgttcttgatgcttatggatgttcattaatggctgagcattgaagagttaggcatttattccaatctttgcagtctgggcttgtttgtacccatccttcttgagaggactttccaagaattcaaaggggaataaatgttgtgacctaagcctgtggtcactgcagctgtttcagcactagctgtttcattcctaagcccaagaatgctgcaactcttgaagactcccagataatcagccttgttggacttagggaagttaagagagcattctctgggttaccagttgaagtctcttgctctcttccttctgtttcccctaatcagaaggagtatctttccacactgggctgcctggaattgggggaggggtgatgcaggcactcccatggtaccatgttgggtcacacctgaagctcatgttcttcctgatgagtacagtactggggcttacccaaggcccatggccactacttcctggctgctgctgatgtttattcaaggttcaaggtcaccttactcagcaggtggccaatcctgctgggactgggtccatcccatcagggcagcagattctcatctagcctagatgggtctagaaatgccattgggaagcaaaggcctggaatcaggggcttcagaaatctgcctggtactttattttacagtggctgaactggtatccagcttgccagaccaagtcctctgtaatattccttctcccttcctcaagcagaagtctttccccaagctcactgcctggagttggtggagggttgatgtaagcactctaatggctactacatctggtattgcattggtactgcaactccactgccttcaaaaccagcagaacaccagggcttatctaaggactgcagttcttgtggcctgcctgccactcaaatttatttgggatctcaaaccactttatcagcctgtagtgaggccagccaggacttggatacctcttgctgtggcacaggatgctcatctggctcagggctggtctaaatgctccctctgtgggcaccagtagaattctgccctttgttgcattctattgtgatagggcagcactgagtttcagtacaaagattcacacttagtttgctctccctccctcaagcacacagaatctttctccatgctgcactgcctgggattgagtgaggagaggtaggcaacgcaagactgtcctttctatcttcttcagtgcctctttccatcttaaatgttatgaacattaaaaaataaatctgtgtgtggacaaatattttaatttttcttgggttaatacctaggagtagaattcttgggataaatgtttagtgtatgtttagctatatagtgtatgtccaggctgtttgttcgaaagtgttgtgcaattttatactcccaacatcaatacataagaattccagttgctccacattcttgctaacacttattatgttgttctctttaattttagccattatactgttgtattgtgctttctaattgtagttttaatttacattttcttgatcaggaatgatgttaagcatctttttatgtgtttattggccatttcaatattttttgaggaaagtgtctgtttaaatattttatgcaattgattttttatttttggttttattgaattcttagagtttttttacatatactggtcacaagtctttaatcatatgtatacatattatacatgtattgcaaatattattttctcatttgtgctgtgtcttttgaagagcaagggttattttgataaaatataatttatcacttttttctattttgagtagtgctttttgtgtttttctttaacaaagaaatatttgcctaatatttttgaagattgttcagattttttcctgtattttctatgtttaataattttagcttttgtttataggtacaatttattttcagtttatttctttctatggtgtgatgtaacttttgaggtttatctttttacatatgtatatacaattctagtagcatttgttgaaaaagctattctatttcattaaaatacattgggacctttgtttaaaatcagttgatttgttaatagtatgaagggctgtttttggactctcagatcttgtaggtttcatttcacaacatcagaatatagcaaatattgcaataaagtgagtcacataaattttttagttttccattgcatataaaagttatgtttacactatattgcagtctgttaagtgtgcaatagcattgtctaaaaaatgtacataacttaaataaaggaacactttatagctaaaaaatgctcatgatcatctgagccttcagtgagtcaatctttttgctggtaaagatcttgttttgttgccgatgactgctgactgatcagggtggtggttgctggaggtggaagtggctgtggctatttctttaagtaagacagaaatgaagtttactgcatcattgactgtttctttcatgaaagatttctctgtagcatatgatgctgttttatagcatttacttacagtgggacttctttcaaaatgagagtcaatcttctcaaactctgtcactgacttaccaactaactttatgtaatattctaaatcctttgttatcatttcagtaatgttcacagcatcttcaccagaagtagattccatctcaagaaaccactttgcttgcttatccataagaagcaactcctcattcattagttttattatgagattgcaacaattctgtcacatcttaaggctccacttctaattctagttcttttgctatttccatcacatctgcagttactttctccactgaagtctggaacccactcaaaatcatccataaatttgaatcactatctatgactctatagctttatgaaattcatttcttaaataataagatttgaaatttgaagttacttcttgctccacgtgctgcagactggatgtttgttagcaggcttgaaaacattaatctccttgtacgtcttcattggaactcttggataactggctgcatggtcaatgagcagtgatattttgaaaacaacatttttttctgagcagtaggttttgacagtgagtttaaaatatacagtaaaacatgctgtaaacagaggtgctgccatctaagctttgatattccatttatagagcacagaagcagttgatttagcatagttcttaagggccctaggatttttggaatggtaaataaacactggcttcaacttaaggtcaccagctgtgttagcccctaacaagagagtcagcctgtcctttgagactttgaaggtaggcattgacttctcctctccggttaatgaaagtcctagatagcatcttccaatgcaaggctgtttcatctgcattgaaaatctgttgtttagtgtagacacttacaccaattattttagctagatcttctggagaacttgcttcagcttctatatcaatgcttacatcttcaccttgtacttttatgtaatggagacggcttctttcctgaaacctcatgaaccaacctctgctaacttcagactttccttctgcagcttcctcacctctctcaggcttcatagaactaaagagaattaggacctttctctggattagactttggcttaaggaaatgttgtggctgatttgatctatccagacctctaaaactttttccatatcactttcttatcatttgtgttttcactggagtggcacttttcattttctttaagaaccttttctttgcattcacaacttcattaactgttagtgaattgcatttattaactgcttggtgaaaaagtcctagctttcagcccatctcagcttttaacatgctttcctcactaaacttaataattcttaatcattaataaacatgggaggtggaggttgcagtgagctgagattgtgctactgctctccagcctgggcaacaagagtgagactctgtctctaataataataataataattctaataattctagcttttgatttaaagtgacagacatgtgactcttcctttcactcgaacaattagaggtcattgtagggttattaattagcctaatttcaatatcattgtgtctcagggaacaggaaggcccgaggagaggaagagagatgggggaatggccaaacagtggagcagtcagaatacacacaatatttattgattgagttctccatcttatatgggcatggtttgtggcatccccgagcaattatgatagtaatatcaaagatcactgattacagaacacaatagcagatataataataatgaagatttaaaatattttgtgaggattaccaaaatgtgacacagagacacaaagtgagcacatgctgttggagaaatggcattgatagacttgctcagtgcagggttgccatgaaccttcaatttgtgaaaaatacagtatctgtgaagcacaataaagcgaagcataataaaacaaggtaggcctgtacacaattcaataattgttagtatattcagagctgggcaaccatcatcacagttaattttagaaaaatttccccaacctgacaagaaaatctaaatgtattagcatacacttctcatttcctcccaatctcccccacgcctaaccctgggcatacaactaaactactttctgtctcgatagattttactattctggacatttcctacatatagaatttgtataagttataggctttgtttggtgactgccttctttcacttagcacgatgtttttaaggttcattcatgttgtagcatctaaaatccttcattttaaaattgatgatcaactaatattcccttgtatagatacaggacagtttctttatcttttcctctgtcgaagtacatttgagttgtttccacttttagcctattatgaataatgctggaatattcatgtgcaagttttaaaataaatgtatgtttttgtttctcttgagtatatgctaggtcatatgatagctctacgtctaacattttgagaaaccgtcagattgtttttcaacgtggctctaccattttgctctcccatcatcagtggtagaaagcttcaattactccacattctcaccaatacttatatttctgttctttagattgtagccatctaggtggatataaggagttatcccattgtgattttgatttacatttccctagcggtttatgatgttgacaatctttttatgtagtttttggccatttgtatatcttccttggagaaatgtctattcaaatcttttgcccattttaaattggattatttgtctttttattataaagttgtaagaattcttcatatattttacagacaagtcccttattagatatatgatttccacatctttcccccccattttctgggttatctttccactttatgattgtgtttttgaagtaaaagtttttaattttcatgaagtccaacttatctttttcttttgttgtttgtgcttttggtgtcatatctaaaatgctcagcctaaccttcaatcataaggatttcctgctatgttttcttctgagttatacagtttagcttttacattttagtctattatccattttgagttgacttttgtgtatggtgtgaggaagggatacaacttcattcttttgcatgtggatatgcagttgtcctaaagggttaccttctatctatagattagtttggagagaattaacattttaaaaacattgaatcatccaatccatgagcatgatatagctctccatttattttaagctttctggaatttctctcaggaatgtttttgtagctctcagttctatgtatatttcattaaatgtattcctaagtagttaatattttttggtattgttttaaacattttgatttctcaaagaactaagaatagaactaccactctatacagcaatttcattactggatgtctatccaaaggaatataaatcattatattaaaaagatacctgctcttgtgtatttactgtagcacaattcacaagtgcaaagttatggagttgacctagtactgtcctcagatccttcctctctggctcagatgaatgggagcagtaatgtgagtcagccataacaaccttcttaggagaattacttctgcctttggatctgcttagagataattctcatttgataacaatttgccctgtttgtctaagcaaaaattaacaaaaattgtaatagaaagaataatcatattgcttcacattccttgcttattcttgtagtccttatgctgaaaatgcacatatctcagtgttagtctcaccactgccgcttctcttcctgcttatttacacagtgctgggtgctggatgatcctcacaccaccctattaggtaggtaatattttgatcttattttaaagataatctcccaagtgtgacactgctttaaacacattttgactccaagggagctctcattgggtctaagttttctcatcttcaaactgaggaagggacctgaataatgatttccaaggccccatgtacttctgacaacctcaagtgggtccttcacagaattgcaaggatgtctctaggtgcagcattggttcctggccctttgaaggggtgattctcagtgtcagtctgagggctgggaaagttcagtcatctctgcccagtggccttctcttgatctccccactgtaatctcttttatccccttccctttgcaagtcttttcctagcctggcaggtcaagcattacctgataaaagtctcaataaagacctgtactcagaaaggaggaaactgctctccacccaaatcctattatagctctgggatttccctgctgctctggaattcactctctctctcacacatacacacaaattaacatttaatcaggattttctatgtatttttctgctataaacatttctcatgttaatgatagttcctaatttggtcttaaggacaaattgaggtacttttgagataataactagaaaaagaatgtaaaacctgctcattattacaggggaaactcatcttgaattacatcagtttctataatctgataattctatggtttccgaggcgaatctcatgtatgggtgaggcaggagagtttgaatcatggttcatagctttcagaggtcatttttagcctttaatatgaggcctcagtagagaagtaatttcttgttgtgcttttgaaattctgatccattcaagttgaaggccacacttaaaaggtaagatttctggctggtcatggtggttcatgcctgtaatcccatactttggaaggccaaagtgggaggatcactggaggccaggagttcaagatgagcctgggcgatatagcaagatcctctctctacattttttttttaaagcaaagcaaaacaaaacaaaaacaggtgagatttctgttgagtgtacgtagcaaccacctgtagtagaaggtcctctaagccagtgctcagttctctgggctccagacctagctttgctgcaaacattctgcttgcttttagcaaattcactttgattgtctgggccacatttcctcatctctaaatagctgacttgaaaggcattgaatttattttattcatcagtaaatgttgaacctgctctgacttcattataggttgtgagaattaagtgataatatttgtggaagagatttactgtaactctttgtgatgtaagctttgttattttttcatggtagatatgcatgttgacaactgttaattcattttcactatgttctctaatttgtaaaataaaggcatggaattaaaaaactaaaacattctccgtaattatctctgtctcctcctcatgcacagatcatatcatgtccgtactgttcactgatgtatttattccaggcaccgtgtgcagggcatgctgtataatatgtgttaaataaatttaaaaaatggcttataaacataaaatggctaagctttcagataatacagagaatgagaacgattttctaattttaaatttgtgaagattttttaaataatgatttctcttttggatgagggtcaggtgaaatgggctctcagggtagatgatgagagtgtaagttggtacaagtttaattgaaagcaatttggtatcaagaatcttaaaaaatgccaaggaaacttattcttgttaaagagtttcacttgcagtatttattctgtttaaagtttgtctaggttccaaactgcagctgaccccaagaaagtcaacaacctggcctttttaaaagagatacaagacctggcagaggaaattcatggaatgatggacaaggcaaaaaacttaaaaagactttgggtagaacgatccaacactccaggcaagtaaacctctcataactgtgacactacctacctggacatagcttaaggagagctgtggaggctatgagaacccagaatgctaaatgctcaactcctgcctgtgctaaactttcatagtgagtctttgatggatgaggccagcacctgcagacggttgtggagggtggagctggattctctctcctcaaccccctcggaaggcaccttgtgcagtgcacacactgcataaccttcagagggctgcagcccatcctgactttgtctccacagttaccttctcaccactctgcctactcctttacactcttcggctgttgtcttcctttcttgctttctcttattctgtttttaaaatctgtccccaccttccccaaacacacacacacacacacacacacacacacacacacacacacacacacacattcccaattcatttcctccttcttgtatatttggattggtcttttccatgttagtaaccctttaagactggccttggatgatttatttactttgattacaaaccttttggattattggggtggattattccctaaacaaaagcaatttctgtttattataaagaacatccacattataaatggcttcatcttatttataatctatagtagggaaagttaggatggataaagatcttagagagttttgcttacaaatggagaagtttgcacctcagaaataggcagccagttgcctctcttcacatccctgagtcattgcctattgtgatatttgttaataaatgggggcattcagttaaatttgaaatttaaataacaaaaatttgttaatatatgtatgtcccaagtgttacatacttgggtaagaaataatttatttctaatctgaaattgaaatttaactggatgtgttctattttaaatttgctaaatctgataatcctaagtatatagctccaactataattcctatgtaattttttctttcttcatggagtgtatacaaaaccacgaaataaagagtttggcagaaacatgaagaatgggcttcccaaggcagatggcattatgtggtatttttaagagacaaaatagcacctttgtccaggatggggcagggctggccatggcctgcctgaaagctgatttcacaatggacccaaaatgtatcaaaatagaccagaatggttccaaacaccaaatgatggagttcttatattacactctattttggggtcattctacttttataaaatttgattttcaaatgaggtttttaacatgctatttaaagaagaattaaatttttttgagatgaagttcccactttatttctagttttctattatttgagccattttctgtgagatatgtaacttaaaataatctgaaaaattataatttcacttttttctcttcaagtttttccttcatttttttctttttaaaaaaattttcatttattccctctctcctatcctgaatttttgcaatgcccagtgaaattagatactaattaaataatacaataccctttggcaaattgttgaaatttggtttaccagttaaattttttccatgaatatacttagatttggaaatctatggtgatagctttcttcagataaatcttatgaagatagatttattcttcagttttggtgtatttgatttttgggccagggctcttggatactccatttgactttagaattaaaagtaggcatttagcatgtgctttttcattgatgattgaactaatatctcttaaaccttctttattatagattcttcttatggttccagtttttttacagtaagtatcttaacaatagtttgaaaattagtcttcagagacagaatggttaagtttacaacactgtttttaagtttacattttcaaagattatttctaatgacttgtataacaattgtatagaagctggatttgagagagccaaggtctttgtagatacgggctaaaagacaagtttgaattttctgaagcaaggctctgggtctgtgaaaagcagaggtgaaacctgaggccagcaggtggtgggcgatccacagagttgctttgtaagatgggtacagagtttatctgatcccagggatggtctgagatttgtgcttggcacataagcggtgactccctcgaggcacgaagccctcagttaaggaactagttatcaacaggggggattttgacctccaaaggatatttgtcaatgtctggacatatttttggttgtcataactgtggaccagtggggagggtaatattaacctctagtgggttgaggccagagatgtcgctaagaatcttacaaagcacaagacagcttctacaacaaagaatcatctgacccagaacatcagtagtccggttgataagcctcaagttaaggtgcaaccctgacaatattaaaaattcttccttgctcatattgcagcaccagacactgactgactgtacaggactttgtagtaacattgcattaacagaagcatatgtgtctgtatctgtttaattctaagaaagatttagacagctcaaaaaaaatatgccataaaaccattaggagaaaagtaaaagaataggggccagctaatggattggaatgaagcaagaatgtcagtgcatccattaaataatgacactagcaaagagtattgaacaaacactcatcttaacttggagatttctgatgcaccaggtcaaaaggaaaatatgggacacacactcaaaatcttacaaataatgaaagaacttaaaaatagaataaaccatcactttaatgattaaattagcatttaaaaaagaaattataatacctgatgcttgtgatgttgtagcttactgatataatctcatatggttgtgacaatgtaaaaagatataataatttttggaaaagcaacttgattttcttgctctgtaattgttctgaaaattaatgttatgtataatacaagggaaataaaaagctgtatgcataaaatgttcattgataatgatggataattcaaatttcccaaagtaagataagttgaccttgatggccttcttagtacagtcacttaatagtgagtatggtatgtggaaaatgagtatgttattagatcaagtgtaaaaagcagaggacagtatcatatccatcgtatgtttgcgatgtaaaaacatttcggtgcaaagaattgaaggaaaaaagatttgttacaatgaaagagttctatgttgcttttttattatagaattctgataaagatgttataccgtttgattttcactgagagtgaaatggctatctgaataatctgagcagaggaatggtgggacttgagttatgtttttggaggatttctttggacattgtgtcaagcagagaccgacggtagccagagcggaagtgggagcccacgtagggaatcagctcatccttctatgcaacattaaatggaggtattttagaacagacgcacagttagtgagggaggtagtgagatgtgagggtggttttgatatattttggaggtaaaatcagtaggctctgttgatgaatgtgaggtaggttatgagagaaagagaagaatcaaagatgactctatgtggtttgacctcagtaattggaaaaatggagtggccatttactgaggtggggaaagactgaaacaggtttttctgaggggagaggaggagagggtataaagggaaatcagaaattgatttgggggatgtcagtgagatatccaagtggcattgccaaggaggttgtgggagtttccagtttggagctgagataaactctcttggctggatatatcaatttagaaagtgttggtgcataaatgagacttcaaggtcatcaagggagagtgtgtagacagagcagagaaagagggctgagcaccaagcacttgcatttgaaaaagagtatcaggcaaggaggaggaaggtgagaatgtggggtgttgtggaagcccaggaaggcaattttctaggagatggggatgatccattgtctcaagtgtggctgattgatcatgtaagaagaggatggagaagtgccactgggattagcagcatggagttcattagtgatgttgacaagaaaggctctgatggaatgatgagggtaaaagcctgactggagtgggtttaaaagagagtgggggcactccgggctcagtggctcatgcctgtaaccctagcactttgggaggctgaggcggtccaatcacctaaggtcaggagttcaagaccagcctggccaacatgatgaaaccacttctctactaaaaatacaagaatgatccaggcgcgtaatggcaggtgcctataatcccagctactcgagaggctgaggcacgagaattgcttgaacctgggaggcggaggttgcagtgacctgagattgtgccactgcactccagcctgggtgacagagcaagactcggtctcaaaaaaaaaaaaaaaaaaagagagagagagagagaatgggggcaggtaagtggagacagagagtgtatatgactcaagatggtaggctgtgaagcagtgaagtatggggtggaagctgctgggcattgcagaggcctttgctgtctgttcccaccctgctggctctctaatttctccccagctaagatggacagttccccgagagctcagacatctggtcacagggccccatgtcaaacacatgctgagagtattttgctttctgttcttccccgaagtcagttcagcttgagagggcaggggagctaacaaccccattgcaacccacagctggggtgaccaccagactcacattgcctgggactgagagtcccttgttccaggaaacatctcagtcctgggcaactggggaaggttggtccaacttcccccagcaatggttcaactctgggcagtacctttgttcctgagaggctttgaggattcaagccagcatggcctgtgcaggtccttgatggctgcattgacttttccctctttccctctttccccactgcaacatggatgttgcagtgaaccttctccagaccattttgaagtgagtgaaaaagaaaaacataactgagtatcaatatgttgtttttttaccttatttttaaatgggaaataaaaattactaattgttggatttaaaaaaacctcacaataatgttaccttgaaacaagaggagcttctgcacctccacgaacgtccctcatctgtctgtgtacatattttatatacaggcagtgatgttgttcagagcgtgtgctccctgatttaaaaaagtcagcgccatattttaatatttcatatgttgttatagtttataaatggccagttttaatcgctgcagcattctttccacctcctcagctccttcttcctgggaccatctcctgaataagccacctatatacaagtccttgttgcaggggaacctaaacggagacaggagatatggatttattttccttctttattattattattatttttttagagacaaaaaatgctctgtcgttgagcttcaaactcctgggctcaagccatcctctggcctcagcctccctaaatactgggattataggcgttaatcaccatgcgtgcgtgcctgcctgcctgcctgcctgcctgccttccttccttccttccttccttccttccttccttccttccttccttccttccttctttgcttccttctttacttccttccttccctccctccctccctcccttccatctttcctctctcctttcttccctccctctctccctgttcagcacagatggaaccatccatttttttccctaaattttttcaatcgatggtttattgaatccaaggatgcctaacacacagttacgaaaggctgactgtacttcactgtatacttctgaaaaacaaggtcattcttgaacataaccacagtacaattattagaatcagaaaattaacactaatacaatagaattatttaacctatagactttttccagatttgccaattgttctaataatgtccttaacagcaaaagaaaatcttggatcatgtattgcattcagttgtcctgtctttagtttcctttgttctggaacggtctttgtttttatttcatcatgatttttgaatagatcacttattttgtagactatctatctcaattttggggttgcctgatgtctgttcgtgattgcatttggggttttgtacttatggcaggaacagcttgtgttttttaagatggcagataataacatgctgataggaatgaaccgatagaggggaaaagagagaattgctggatgatgctcttgaggggtgggagagcaggagggctgagctcagcctgaggactgaagcactgaatttggctggggatagatttttttttcttttgccagtggaatatatgatagattgtgagaagagaagagagttgagtgggtattcaagggaaagatcatccaggaatggaccaggggcacgagggcaatggggacaagaaagaggtgttggcagaatggaatgtggggcctggtagggccaaagagtcattagagttggggaactgtagaaaaggagtggggttggtcatcgaagagtgaggtgcataaagttgtagctattgataatgaaaacaaaatgaagattttgaccagagaaatgggtgattcaagcaggtggaagaaaatatcattggatggaagggagataaagtaacagaggggatttgaggatcattagatatggaaattactgagaatggtggctgaagtcatgccgaaaagcatggtagtgtgctagaagccagaatcctccagaaatggaaagagctcattctgggagcttcccaggaccctgctgagttctgagaccctcttttcattccactgagagtggtgtgaggaagagggagtgtgtctcgtttggagtagttggacctctggagaatgcttctttttctgtttgtttgttttaactctatctcatctgaaagataaatgctgtgacttttatgagtggtctaaaatgcaggactcacttttattgaagaaatgggaactaggcagcaagaagagaaccagcaactgtggagcttggatcacagagtgtggggtagttgttactgggatgtcatggagcattggggtgtttttccacctagggagagcatgcgggctcagtgaggcactggagacccatgttccttctatttttgcacttagccattcttggcatataataagaaagcctcgggtatctagagaaatccaaaggctctatactatgggccagctgcatttgccttctgatcaagccatcagtgctcagtgaaatgttgggtttttttgttcatatttgaattactctcttttctttatcatttacatgtaaagaatagatcattacattcttatccaggatctatgtcacagactttgttgcttcaaaaactgtagaagttggtacagcttgttacaaaaatcggccttctttttcttcttaccccatccatatttttccctccttgtccatatttttaagccattaaaaaaaaatcctccaactgcacagaatagttttaacattgtgttcagcagattggcaaatctgttcaatgtagtgatatattaagtgtgagtttctactaggagaatgtctacaattttgcacctttgtagcatctgtctgtctcatttactttattaataaaactccagagggaaacttttggtgtattttttttcccatcagatggatctcaataagaccgaggaggtaatattgaaactggaaagcctccatcagcagcctcatatctgggattttctacttttactgccgagactacacacaagccatgatcatgtggaagatggcatggatgttgcagtgaaccttctccagaccattttgaagtgagtgaaaaagaaaaacataactaagtatcaatatgttgtttttttaccttatttttaaaatgagaaataaaaattactaattgttggatttaaaaaaacctcacaataatgttaccttgaaacaagaggagcttctgcacctccacgaacgtccctcatctgtctgtgtacatattttatatacaggcagtgatgttgttcagagcgtgtgctccctgatttaaaaaagtcagcgccatattttaatattttgtatgttgttatagtttataaatggccagttttaatggctgcagcatatatcattctggtaaagtactatatactgtaatttacttaataaatttggcattggatttttggttgtttctgagtttttcactattagagataggcttgaatataataatttcaactaatttcttaagaaattatgccatagttgcccagtatagcattcagaactgataagctcagttgcttcagttgtgtaattcagttagctggacgttggtctcctatgctggatttgacccccatgttacctggggtgacctttgggagcatcccttcccgtggtgggcttcttatgccttaatcagcatggccctcttttataaccaattgaattattttgtgtaaactcattgtatgaataatgggttttattatttttcattagcaaaggtttatattcttctctgttttttaactgttacttattctatctgccattggtgagagccacattacccttaagctacaacaaaaagggccctgtcctggggcctgtgctttggggaggtccccgttctggctttccctggactgtgcctctgctcatggctcagactgcccatggggtgaaggggatgtgtccacggagcccacacaccctgattccctctcaccctggagttccctaatttaatgaccagatcatggtcaagcctcttttctggcccctccttctgagggcaagtcttaacactggactgtggctcctgcagcccaagggtattctagggatggctgcagccattggcaggagtgtggggtgggaggcacgggtgctgttgggctttgtaggctggaggacctacctatgtgcactgaggccccttgaggtacagaccaagctgagggtggggagcacataggggaggagtggactgaaggttggggccagggacaggtgctccccaaactcccacattctggtgcgtaactctgaggatcacaaaattctaaatttgaatgtagctttccaagttgttatgaagatctatttgtcaatgtaggaaaatggaacgtattttgatagttagttagcttgatttataacttaaatatttgaacatatttgaaatgcctccctttgtattcttgcccgaagctctgactgtgttagcagtgaacaacgaaaataattggctattctgagagatgcaaaatttaaaatgagaagatattgatgacagttgttgaaccatatcagcttcagtataaattgtatttccatatttggcttcagtggcatgatatcaagaaaatctgcattcatagaagtatttgcaagtggtaccaggtttcagtgatatatcttataatcctgggatacgcttcaatacacaaagttgtcataaaagatttttcttgatgaaaatctacaaggaaataatctgtttggaagcacagcttatgattgtgttggtctcatgttgctaaaatgcagatatattccaacttctgttgagtgcattttctaatctacaaatttaagcatatttatttataaaataaaatattaatattttaaaaataaaattaatatgtatatgtagattctccctccccaaagctccttgttctttgaaacagtttaacagccactgattaacccttgacctattcagatccataggttaagacagggtggaggattgaggtacatggtattgccccccaaatattagactgattatctgaacttgaagcagccaggctgactgttcatttgcttttctaacatagcagccctttgcaccctggctggcctcatcagctgccctgcggcaggaagaatcaaggctgagtataaaataacacctatggcagagccaatgcaaacttgagttctgtgtcaaaggcagagtggaagatggcctaagttctcaagtgtttcaagagaagaccttacctcttacatttagttactagttcagggagttagggtcacattaaagccacaaagaatgctgacatgtaaatggtccagccacatcttgcaacagcactaggggcccagtccatgggatgtaagtaaacctagaattgatgctacttgttttgctaactacccactcatattgctttttgttttgttttggttctagttccttaatatccctagaagatttagattggcttccactcaaccaaactttttcccaggtttctgaacttgtactgaatgtgaccatttcgacactgacatttctgcagcaacatggagtagcagtcaccggtatgggtgccttgtagctattgctatatttcaaaacgtttaactacttaaattcattgacagttgacatagagctaaaatgatgttcaaaatgatttaattaaaatttcaaattcaaaaaagtatgaattgtttctgttaatacaagacaaaaatagaataaaaattttgaactcgaaactgaatttgactttctaccactgttgacattctgcagtcattgctaatataaatgatatttttaagttaaaaataactgattttaaaattctttgactttatttcatctaatattagacctatcactagctctgtgattttaatctttcctctctctaagctcctattgggaggaaatattttaaaaatggcaaagctagtaagaggaggcaggttgatgtggacttacagagtccctaactaaataagcagccctaccacaggggagggaatggaattatatagctcttttcttgatccaggatattattatttcctgaattaccaactgagtctgagctttttacttttaattcccttcttttctctatttttctatctttggctatttctctaagggaaatacagtgagagaacaacaaagttggaattcatccacccatttatctgttcatctgtccatccatccacccacacatccattcatccatccatccatctgcctacccattcacccactaaacaactcatcaacctctttatacatctatccatctattcgtccattaatccatccatctatccatctattcatccattaatccatccatccgtccatccatccatccatccatccactcactcatccattcatctgtccatccacctccccattcatctactcaccaacccaccaacccattcatctgttcatttatttattcattctctcattgaataaacaacgagcacttcctatgagccaaacacttccccagagagtgggaataaaaagctgaataagacatagttctttaatgagaatgcatggacacagggaggggaacaacatacaccaggtccagtcgtcgggtcgggggagaggggagggagagcattaggacaaatagctaatgcatgcgggtcttaaaacctagatgatgggttgataggtgcagcaaatcaccatggaacatgtatacctatgtaataaacctgcacattctgcacttgtatcccggaacttaaagttaaaaaaaaaaaaaggcatagttcttactttcaaggaagtcatgtttagtaaaggagagagatatgtcaataataaaaaacaaacaaacaaacaaacaaaaaacaaagaccacagagtaaggatctgacatctgcttcaggaaaaacttcaaggaggagttttgaagggtgagttggagtttatcaaagagatgagggagcatttccaggaagagagaagactgtgagatacttgggcttgctgagagctgtgaatgtttgacattcagtgtgtctgaggtacagtgggcagtagcagggggtggcatagaaaggagcccaggccaaaacacgagtggccatgggagcagtagaattagatctgcattatagaaagacactcctgggccggtgtgaggagtagattggaggcaggtagttctggggttcaggatcctgggagcaagtcttccatcagccactttctcctgaggtctcagtctcctgaactattattattattattattattagagatggagtctcgctcttttgcccaggcggcagtgcagcagtgagatcttggctcattgcaacctctgcctcctgggttcaagcaattctcctgcctcagccaaccaaatagctgggactacaggcgtgcatcaccacgcctggctaatttttgtatttttagtagagacatggtttcaccatgttggccaggctggtctcaaactcctgacctcaggtgatctgccctcctcggcctcccaaagtgctgggattacaggcgtgagccactgcgcccaaccctgaactattgtacaatgagattgttatacacagagatttctacaatcccattcagaattttgctgcttcatggagcaaactaacatgaaaccctctatggccccaaattccacctttccacctgttgcttctttcttcttgttgcttgtgactcagcacagtgagacccacatggaatttttttttttttttttttttttttagctttctgtaagagaaagctagctcattaacgtttaactccattttcaggttaggttagttccactgggaagtatttcttatgctgagaacaaaacccagaggtggggtgcgagatgaataaaacacctcatcgaaatcttcccagtgaccttaatttaacagactcatttagaagctcaagtttttgtacatcatccaaattacaacaacaaatttgccttacaattgaaaatgtaattaccgttaagaatgtaattaaaataaacaattttctattaactctccagcgagtcaaagctaaggaacactattacaaaacatactttgagaggtaactaaaaattgtcttcatgtctcttgtctccaagaaaaattcttttgcttgatgagccaattccaatgtgaagaggaagggatgagtggcctcatgtggctttaggctactggtccaattatgttatgcactaaaactgttaatctacacattctgaattctctgttgtttagcaacaaatttctgaatccaagttgtctttcactttttgagaaagattttatacttttataagtatgctacactgatgtcactattttttctctcctttctggaactctgtgagtaattctaataccttctgagaccagtagagattaatagttacagctcagctttggaagccagatcatttgggtttgaatcagaggcttaatctaacaagtgggactctaagaaaaaggggataattacagcacctacctcatagtgttgttggaggactaagtgagacctcccatggtgtattcttagtctaggtcctagtacctcttcaacatacaataaatgctggttttaatctcagacaccaatcttttttcctcccatgatgccatgtaaaggcaatcagactggaaacaaaaaatcttgtatttctgggattttccccatctttaacaccttcctgaagtccccgttgacttggtctgtctttgtgaatgtcatggattgtgcttttttttgtagacctcactgcaattataaggatcctatgagataatgcttgtgaaaatggcttattagtggctggcaggtgaaggggctcagtcaatgggtgttgaatcatcatgatctgaaacaatctaatttctaaatgaaggttcaagattcaaacacaccaagaaatttatgtgtttttatgtttgcagttgctgaggcatactccccagagattttgtcataccttgggggtcttcgatttatattttgaatgtgtcactactagatagtgccatgggttttttgggtagctcatgaattttatatgttgataacttgagttaggggaactttttcttatgacttcaaataattattgagaatacagttttaaagactccatagtattttatgctatggatatactataatttatcctttccctggatactagacacttaactggttttcaatattttatcagtatagaaccaataaaatattgtcgtaccttaatttttgctcagatatctgattaagcttcttgagaaagacttttagaagtgaaattattgggttcaatgacttgaattttataaagctcttgaaatatgttttaaaattatcttctggaaatgttgcaaccatttgtgccagggagcatgggacacttcaccattctctctatagcagcaagtgtttattctgtttgctttttctatctgatgccccagtggtgtttggtcttcatttgctcttcctttagaggtgaaaaaaggtattttttttctggattacattaaacatatcaaaatattcaaacaactgctggtgtaaatcttttgttattccaacagagccagtttaccacctgtccatgcagaatatagtgtgggatccacagaaagtccagtatgatctcaaatcccagtttggctttgatgatcttcacacggaacagatcctgaactcttcagctgaactgaaggaggtacacatgcttgactgcttctcacaccgctgggcctttcctggagactggatctagagcatgctgctggggcagggtgagcgggtgccacgggagaggcagccagacaggagagttcggtcaaaacccgagctccttacgcagaagagacccctactgtctccagcttttctagaagtgtctctttcttcttaccatgtagttttatcccagaatggaaaggcagcttagaaataatatgacacttgattgctctgggaactagcagtgggagaggccaggtcaagtgagggtgtgagattctgaagacagcgctagtggggtccaggtaggaagatggtgcaccagctgtagtgagtggggatacaagtgggtgaatttccaggtaaagagatagttttcattagaagagtaggagctgtacgttatggatgcctgctgggttcaccaaagttgagcctcttccctaactaggtgaaataagggagttggactggatgatcgatccccaagacccagttcactgttggtattgctgaggttctgggagatatcttttagttacagagtcccttttgtcactccagcccatttgtaggcacttctgctttgcatggtgcaggtccaagaactatgcgggacctggagctttggtccatagactccacctccagggttagagcatttctggtgcagctcctaggtcagtgttgagttaggaatgtttggagaggacccactctcttccattaggatctcagtccatgctggttatgtagattttgctcacttttttgtgagttccccacaacctggtcttcccagatagcacttttcacatttcagtgcagctagtttgtgttcagactgttgctttcagtatttagactctggatctgtgctctcagtctcaggggttagatggttgggttgcagccagcagaccctcatgctggcttggtgtttgaaaacccagttctaccaggtaggtttaggcttcaccaaagtatactaaattttgtgcttcttgtatccctggcacaattttattaatcatctcacaattttatgaactatctacctaccacaggacttgaaattgtgacccttgggttttctcatggatgctgatgtagatggaatatgaaaccccagttggctgacttttattctagttttctccatctttataaccccgttttctcattatattatagtttgagtgaactatgtaaaacttttaccttagaatgttcaatatattgagattagaattaaaaggaaagtgatcagaaaataccactgtgtatatcaacagagctccatggaaattgtacatcatgtgtgtgagctttctattgctgctgtagcaagttacccccaacatagtgccttaaggcaactgacattttcttttatcatagtgttctggaggtcagatgcctgaaatggtctcactgggctagaatcaaggtgtctgcagggctgcaatccttcttgaggtcaaggggacatactgttgtgggggaggaaaaattctttttttctctattattccatcttcaatggctggggctcatgaattaacctgataaaagacagataaagaagaggaaaaccagttattgtgtaggtatgtatgggagttcacaaagagaaatgtgtagatcttccctgatgaccattctgtttttcactttcagtatagtattcaataaattacatgagataataaatactttattataaaataagctttgtgttagattatttttccaattgtaggctaatgtatgtgttctgagcacagttcaggtaggctaggttaagtttggttatgttttgaggttgggtgtactaaatgtattcttggcttatgatattttcaagtcatgatgggttgatgaggatgtaacctcattgtagatcaaggatcacctgtattttaaggaagcagccagattattaaggcttatatgccatccaaggctatctatacaaaggaaagggggcttggggtttctgagtagcaaggcaagttatgggaaggtgaggggaggaaatatatggtgaatgagttatcctgttttgcagagaaatctcccaggtgatcagagttatttggagaagcagctctctttttggtaggagacatctttacagatgaaaattatcttaataatgtaaattttctttataaatctaaatttcctttaccaaaaggaaatttatactctatttttaaacagttagggaacggtaagaagtttttcctgcctctgctggttttcagtttgtctttagctcaaaataatccatatgccaaagaaacatactttggggtggcgtattctgttttcttgctttttccagcttccagtggccatccacattccttgggtctgagcctctttctcaatcatcaaagccagcaatggcaggtctagttcttctcatatcccatcacttgggcactgacatttttgcctcctttctccaataaaaacccttgtggttacactgggctcaccaggttacccaggataatcgcccatctcaaagccaggtgataagtagccttaatttcatctgcagccttaaatctcacttgccatacaacataacatattcatgggctcttgggattgggacatggacatcttgggggaacattgcctgcttcccacccttcgtaagtgtaattgcctggtgagctcttcctgcccactgcacagacaaaaccaattcattgagactgcagtattgcagtagagaaagggtttaattaatgcagagctagccaagggaaaaaactggagttattactcaaatcagcctccttgagaactcagagggtagggttttttttttttttttttttttggataatttggtgggcaggggactaggaaatgagtttcgccgattggttggggatgaaatcacaaggatgtggaaaaatgcaaaagtctgaaaaacgtctcaagagaccaatcttgggtttgacaatagtgatgttatctataggagcaattgaggaagtcacatatcttgtgatctttggccccatgactcctgagcagcaagggattatagaaggcaagctagggaccagtggctgattatcatttagctacacctacattttagcagcattcaagccactctcataatcttaatcttgtggccttttattagtcttacaagggcaggttctgtacctgagaaatgaggggattcatcttagggagggactactatcaaccttgctaaaaagttaaactacaaactaaattcctcccatggttagcttggtatatgcccaggagtgagcaaggacagccagcctctgaggctagaagcaaggtggagtcagccatgctagacttctctcactctcataatctgcaaaggtggtttcacagggccctttccatctgcatcagcctgtgagcctaggccctccctggggtctgtctgactcctgaccctgtcactctctgggcctgctgggggcctcagcacatgctgcccctgcaagagaatagtcctcctctttccctgcctctgcctcctgaattggaaaatgatttatctaacctcacatcctctgtggatctcctgtgacctcacttcagcctctgcctctacttcttcaaccttctataatagggcatgtcccagggagcctgatggctgcatatctgcctctcataggctgtgagcatctgagtggggacttggccttatctatctaacatgatacatggtattgttgattatttttaattaagggaaaaaaatagaacaaaacatcagggaccctgtgctttgacagtcacaggttaatattttaaatcctgatccaaaaggaacctaaaagtgaacacatgggactaaaattaagctttctgactattgtcattgtttagtcaattcaggctgttataacaaaagaccacagacttgtaaacaacagaaatttatcttggtgtgtcctcacgtggtagaaggggtaagggaactccctgggtctcttttatcagggtgctaatcccattcacaagtgttcaccctcatgatctgaccagctccccagggccccatctccttataccatcaccttgggggctaggatttcaaaatacgaattttggcggggaggccacaagcatttagaccatggcagtcaccaacagaatctcttaaagatggcattataattgttgtaaaatgatgtaataggggaatgtgcttcattatatcataaacataagtatttacaaagcagtgttacaggaactctgttgaagttctttttttttttttttctttaagacagagtctcactctgttgcccaggctggagtgcagtggcacgatctccgctcactgcaagctccgcctcctgggttcacgccattctcctgcctcagcctcctgagtagctgggactacaggcgcccaccaccacgcctggctaatcttttgtatttttagtagagacggggtttcaccatgttagccaggatggtctctatctcctgacctcgtgatccacccgcctcggcctcccaaagtgctgggattacaggcgtgagccaccgtgcccagccactgtgttgaagttcatgtataaaataaaggagatttggttcaaaaacattaaacagtttctgacccaggacttcaatttgaatctttccaattttatccacttttgatagtcagaaaagaaaatgttcttggcaaaacaactttgttagtccgaagtatgaattaaactgggctgacccatgttcacttttggcctaagaatgaaaagaaacaagatttgatgtcatctccatgtccttggcctggagaaacagctgttcctattgtttgtggatgaaactgaaaaatataactttttttttttaactaccaagtcttccctcaaggtaaatcacatagatatcatcacttacttcttcaatcaagcaaatgtaagaacttttactgtggcaagatcgtggtgttatttttagaagaggaaggttctaggaaaggagctttatgtctaaatattttttcatattgttgtcagattcccacagacacttccttggagaagatggtgtgttcagtcttgtctagcacatcagaggatgaagctgagaaatggggccacgttggaggctgccaccctaagtggtcagaagccaaaaactatcttgtccatgcagtcagctggctgcgagtctaccaacaggtgctgtcccctctctctatgttctgttcaaaggtgtgccagtttgagtgtccaaatccattctcctcccctgccctgccatgtttactgttggattttatgtccctccaaggaaagggccttaggagccccacatcctggccattgagtgcaccttgtcccatgtgcatcaactggctccagctccataggcctaggccctcaacactcatcaccaaacagtctatcctaggcttgcacacacaccttggcaactcagaagttcctagacccatgctctgttattggtgcatgagattgccctggagtactatgaccagctctttggacatttgcatgctagcattgggcatccctctagcactttaagctctgaactggccttgtctcttcactctggttttgaccagaagctctgtgcacaaacagtgactgtgatttcagtgaccataatttaacaacacgaagggaggctctagtctgtctttatagggatgttggtgtggggcagagggcctgagtgattagattgctcctggcctcagaagctcatggagccctggctgtttcacagctttgcgcttcttggggaggttttggagactgtgaggcagagctcccctggcagtcacttcccatttgttttatcaggctttgccgtctctgtctcatgtttttccttaaagaacacacctctttaactttgttctccgctaatatgtgtcatgtataaaggccaaaatctcaaatggtagataaaacatccttaaaaatatataggtgttgtcgtctgcttcgtggcactaaagtcatccggcactaaaataatcaagggacagtgctgaaatgaccagcatccaatggtctagtggacacacttgctttgtgcattatctgggtaacataactcatggttaattaaggcatagttagcacacatacatgtacatcgtgcacctctccatgccatcaggcttgggcaagaatgatctatttttgtgtaatgttgatgacaaaccacagtgctaattgacttcagtatcatcctcaccatgtccgtgtcgtaaaatgacacttagtaaccatgtattaactttggtatatatttaaaaatatgcaaatatatttatgctatcctaaatatgttcgtttaggttttaaattgtatttcatttgtttagaggtgtatgttattcccttctctctttttctcttttgggggaaaaaagagaaataaggcagagattataaagttgtgtgcatccattgttgcaacatgaaatctttaatttctgagtagaaattaaatcatactgcaattgctaacagacattttaatttaccaaaaaataaagattggctgtctgtcatctagagtggtatgttaatatttcttaactaaatactgttctttccaatttgctattattaatgctagtattttggtttccgaatttgtaggtgtttgttcagtggcaacagggtagcctgcttcagaagacactcacaggcatgggccatagtctggaggctctcaggaatcagtttgaagaagagagcaagccctggaaggtggtggaagctctgcacactgcactgctcctgctgaatgacagcttgtcagcagatggcccaaaagataatcatacatttccaaagatgtaagtcgcatttccctgtttgattattgattaggtagatgacacagaatgttaaagagtgcgtgatgatactgttagaaacacattctgtaaaactacagctaaataatgaatttcttgttagcaaatgggaaatcagaggctttcattgtggaccatcaccagggtagaagtcttggcagcactctggatgcctattcagaggctgcaatcgaccgaatacgggagcaatgtttgagaaggtgtcagtttcctagattttagattttatgtctttggcatttgtttaaaaatgaataaattcatttcggaggcatttttatgtacagaactaccttacatgagtagctcttttcctagaatcttcctcttcaaaaaatatgtttttatatttacttaaagattttgtatagttgaagtgtttacataaggtccagaaatattgtagaagtaggaaatggtggaacttgtttcttcctttttaagataaccacaattgattcaccaaaatagccgactagatctttttccttagtaggtgtggcagtttgtagtaacttgaatcttattatccttctgaagttaaggctgtctttggaaaagaagaatatgatttctcaatattatctcaaaaatgtgcatttcaaaccaggtcacacaaattcttgctctctgtgtaccatgaaggagagttgtgatgacagaattggataggaccatattgtgttcttatgattacttaagaaatagcaattctaaacacttccagttctttcacattttctggaacttttagcaaacaggatcttgcttttgaaggtcctatttcctaacttttacttaagagatgttctggggcctgaggtgcttgcgctaaaggcagaaatacagttccctatccgggccataaaagctacaggaggatggatgcagggagccagcaaggatgccttgaagtagtgttctaggcaaagggcagggacaaaacatctgtcataaatgaacaaatgcagggacattgcactggggatattgaaaacctccctgctggtctgtcacttaatgcacattaatagaaacaccacattaagtcaccgtaattatcctacaaatctcgaatgccccctggcactttagcctaggattttgcctgctctgtgccaggccaggggattgaagccccaggaagctgtacttggctcttagtcctacagagatggggggaagctgaagactataccacactctaggtacaaagctaggatagcccacattcttctgcccccatataaaatttccacacattctcagtgccaggaagatgaggcccaaacactggctttgctgtccatctgctgtttttttttctttgttttgttttgttttgctttgagacagtcttgctctgttgcccaggctgaagtgcaatggcgcgatcttggctccccgcaacctccacctctcagactcaagcgattctcctgcttcagcctcctgagtagctgggattacaggctcacaccactactgcccagctaatttttgcatttttagtagagacagggtttcaccgtattggccaggctggtcttgaactcctggcatcaagtgatctgccctcctcggcctcccaaagtgccggaattccaggcgtgagccaccgcagctggccaccttcagccttatttaaatctttctgagattcacatgcacccttagcagaaaattgtatatcttttatcattagctttggtccaagaaaccccatccctttttcactaccttgtcttcatagccaattgttcatatctttttctcttcctaagctgcaaagttcacccaaaataaatggaaatcacaccagactctcagttttctactgagtttttcgtgtcattacagactgccttttctcctccaggttctttctggttcctgcccacgtccctgcagtacgggtggctgaggtgtgggagctcttcacccaggctctagcagatagcgtggattttggcaaggcgaggactcacagaggtgcctctgcgccttccagcaaggactcacccttcaatgtcgcacgttgttgtgaatgtgaagtgtctgttcacagatgtggggggaatagtccctagggtctggccatgtggtatccttgcttgtcagagtttaaagagacttgacagtaagatccaggttccaagccacacagcatttcttttttccttggggaaaataaaataatctctttctcactttctagctctttccaagtgccactctgcttccttctcagtgtaatccaaagagtcagaacaatgactgacctaagcccagttcattctgcagatggccaattccaaaagccatgtgtccagcttcactctagcatgaggtgtcaggagtctggtcagcagccagaaagcccaagcatgtggctctgatggagcaattgctccgccttgtagggtgatgacgtggggatgggtaccagttcctgctggtgtcttgtaggagaattatcattgggaccttgctcactctctctataccctttacggtgcttgggtccatcagctctccagctagagaatagcagcaactatttatcaagcctgtgttcaaccccaaactatcaagatgccatgaagagactgaccactatggcacagaagtcgaaatggacgccaggcactcaaagcagtgggatggctccagccagtggaacattttgcttgggcttcaagtagctacatctctttctgcttttctccttctgtagcttgcttcgtttatcacaggtgaggattccatgcagttgctcaaagacacagaaagcctggactcacctgctctgggcagttctgctgcccacagtgtggctatgccttgcttctccctctcccgtatttattcccaatttcaggttcttcacattatcaaactcattttctttccagcttctcttctcagttgtttcttccatgtctggagcccgttagtctgacattctagggactatttgtattgagctgcctgggtggtcgttcttcctttgaccttggagaatcctacaggcattgccaattggctcaagttgggaccactgcgatgggtcctgtataccatcacacaccatctctatattttgaaacttttctcaaaatatttttctatatctcattaactataggcttcaaggcaaatgtttttagaccccatgtgaaactttatcctaaccctcacttcttttacacacacctaggaatatactttcccattttggggtaaagagaatgtttaatccatattcagtattgaaagaatctcccaatcaggtgactcaatgcaatttgtcaagaacctggttgtgtgatgaagtgtgactttcagtctagtgaacacacttctcaaagcagtggaatattttcctttgaacggaatttttatttccctaattggcacttcgaactacttttcattttatttcatttatttatttttgccctcagattacagcatctgtggaaattgcaaagcttgctgcaaaacctgccccagtggccggcactgaagagatttcttcagcttgatggagctctcagaaatgcgatagctcagaatttacattttgtccaaggtaagctagctttggtgttatttgtccctgactcactaagagtaaatgtgaaatttattggaaaatggacttgaaactgcctgacacattgtaaagttgggagataactttgctggtgtcatatgcatatttatgctttactctgatgccttctaggggatttaaaatacagcacaccaaggctaaataaacaataagggcacagtgaagagcgcatccttctgttttccttaagcccatgctgtggcctatgacaagcagtgtcctaaggctgggttgactttcacattcacggcagcatctgtggttttcaggctggaaagggaccagagtgcgttgtgaataagcgtatcttttgtattctgttccttctactgcctcctcccaccaatgcttcttggtgtccggtagggagagtgtgttccccctgggtttgcagaatgcccttctttgaactttcttgactatggtgagcattattctttcttccctcttctgaggaagttgggtttggacttttgcccagatgggctgcagccttttcattttctcagggaggagagggaaaaagtgaggggggatgttactttagaagtaaaaactcattctcactagtctttggaaaggacaaaatgatattacaatgactcctgttttcctttctaaggaagagaagaaaatgtataataataggtcaagtttttaaaaaatccatgttttcaggatccagtttattgattcatggccatgtataaaagtcaagcttacttaccttaggtgaataataatcaatttgtctactttgcagaagtcctcatttgcctggagacatcagctaatgattttaaatggtttgaacttaaccaattgaaactggaaaaggatgtgttcttttgggagctgaaacaggtaaagcacaacaaataattataaataagcatttttaataaaacattcaagaagctcatgcaatattcagttttgctccttttgtgaattgtgctagctaaaaaagggaacaatatgcaggtttttcaaaactttatgttgtgtttaaaatgtttatcattgcttattatatttgcagttcttgagcccatgaagagggtatctaagcctctttaaatgttactccttcccactcttattaatcttttagatgttggcgaagaatgctgtctgcccgaatggtcgtttctctgagaaggaggtctttttgccgcctggaaactccagcatatggggtggtctccagggactgttgtgctattgtaactcctctgagacgagtgttttaaacaagctacttggttcagtagaggatgctgtaagtattctaccatcttagctcttctaagggcacaaatttaagattaaattcaccaaagatgctaatatttaacctggagtttcgatgaggaaagttttgccgtaagcccacacacttaaaggaagctggctctctgaactccagctgcccttcaatgctggcctttctgtctgactgaaaggttgtatgccacccgcctggccaaaacctacttgaaattcctcaaactttcaaaacataccacttcttcttttctggcttcctggatccttgatctgcttcattcttggctgcacatgctaagaaaagcagaggagtctctggtgattagtcaatcccagcaaaactgtggctttgagtggttacaagctttaaaagtcatattcctctcatgtaactgcccaggacaatgggctacccctgttcagcgctcaagtgggactgcagaatgttgaacgatttgtttggaaagattattttgtcaagttccagccctattcttcttactgagaattaaaattacaatatttatatttttagagttcatttttctctctcagtattaccttttttttttatatccttatataccatggaaataaaaccagtgaaataatgaaactagtgaaatataaatggtgtctcagcaaaatgaaaattgggatagtaattgaatagtgtgcataattcaatcaccgatttcttagcatctactctgtgcatgacagtatgctgaagggagtacaaacatgaagaagacactatcttggtagagaagggcaaacaacagtgagagccttggagctcagcatctaggagtcttcccaaataagtcaatgagccttagatgaggtgtaagatttggaagcaaagagaagtcaggagaggatgctaagcaggcagaaaattatatgtgaagggctgggcatagtagctcatgcctgtagtcccagcactttgggaggtctaggtgggcagatcgtttgagcccaggagtttaagaccaacctgggcaacatagctaaaccccatctctacaaaaatgaaaacaaaaattagccagatgtggtggcacatgcctgtaataccagctactcaggaggctgaggtgggagaattgcttgagcccagcaggtcaaggctgcagtgagccatgatcacaccattgcactccagcctgggtgacaatgtgagaccctattaaaaaaataaagaaaagaaaataaataagaaaagtgtatgtgaatgcatgcaggcacaaaaaacattacctgtttgcaaatacctttcttgctactagatgtcagctctttcctggcagaaatcctatctcaaatttatttttatctgtaaagtctaacttgtagtctcatacgaagcagggaactatgtatttataggttacatatacttgaggtagccttttggatgatgcctacgatacgtatcactaacaaatcaccccaaagctcagtgacctaaaacaaaacacattattttctcgctcttctgactctgggttgaccagtctccgtggggtggttcttctgatggtcttactgggcatcattcatgtagttgcagtcagatggccgtgagggctggagtctggttagctaggatactgagacgagggcctctcatcctcctctcagactcaagatgtctcttctccaggtaacctctccatatggcctttcagcagggtagccagacttctgacatggctatccagggatcccacacacaagcaaaaacaggcaaggagggagagtaggagctgccagtcctcagagaaggtagaactagaactggcacaattcacttcagctgcattctatgggtttacgtgagccagatctcagcctagaggaattgtggaaggtggtactgagagtgagactctcagggggtctggttcacaggctacttgttgcaactagctaacacagatagctatgacactgagtcccatcctactttattattggattaagttttatttttggacttattaacctgaacatgagtaaagattcaagtctagaactataacttagataattaccatgccatagggcacgatctttgatgtacagtttgagtggaccccttgtttagtgatacagggtcaaggctgcgtctcaaatacccacatctgaattgctttatttattataagcaatatcttcttttcttgttaaggatcgtattttgcaagaggtcattacttggcacaaaaatatgtcagttttaatacctgaagaatatttggactggcaggaacttgagatgcagctgtcagaagcaagcctttcctgtactcggctcttcctgctgctgggagctgatccctctcctgagaatgatgtcttttctagtgactgtaagcaccagcttgtctccacagtgtaagtacatgtttggtgggaaacttataaacaattgggacatcagaatgatttcaactgccccttctacacaaatgatagatcaatatggtagattatattttgaatagaaagaggttcaatttattttaaaaatattaacctactggtactgttggaaagcatctaataactgtaaaatatgaaagagttcccttaatgtttaaccactgacttaatctttcattagaaattgaggatccctggtaagtccaaggtatgcatgtgatggaagttcttgttaattactcagaaattgtgcactaagtacaaatgggaagcttctcttgggagctgtaactctacagaaaattcgccttgattttattttatgactctgtgaattatatgtgtgatcaatttccattttccttgactgctaggatgttcttcgtcaaatatgtcaaatagggaatatatattttcttaatatttaagttcacttcctgttatggcctttaattttcctctttttttgtccttcttgatttattgtcttatattttatgtattctcataaattgcttttccttatttttcaaatcgaggtagaggagtttgtaaacaaacttaaaaaattagtagaactatttgaaagattctatttccttacataagtggactgccatgcatttgcatatatttgtttttagaaaaatttataatgatctgtcatctgcaagatcatttttaaattttaattttctctggattctttttgattgcaggatatttcatacacttgaaaaaacacaatttttcctggaacaagcatattattggaaagccttcaaaaagtttatcaggaagacttgcgaagtggcccaatatgtaaatatgcaagagagtttccagaacagactattgggtaagtcagtagcctaaactacaggaatgggggatgctttccccttttagtgaggtgacataatttcctgagagtccatcctatttaacaaagcggggcttaaaatgggtggctctccaagcacaatttggcattgtgattacttcatataattttttctcatcaattatgacaagacttaccagaagtcctggtttgactgagctacattgttcctgcaaaatttataatagtgactgcttttactctcaagactgtcctggtttgggtgataaatacttctatatgcagactagtcatgatcctactcacaagagtccagattttctgttgtggcccttctcactttacttagcattaagattgatgctcacactggggacaactccccatgaacctatagaagaaaacacaaactgtttttctctatacacacactcaacacttccaacactgctgtgaccatatgtgtggatttgttccacaacaagcaattctccacttctccattgacactaactgggtgtcctacaattcgattcaattctcgcactgtctgcctggaattagcatcagatcctgcaggttaagggctcagtcccacaagattgcccctacttcagacgccaaccccaagtccaggcttcccttctcacttctgatcaattgggtataaatcaggattcccatgaacccctcgttgtgttcagtaatttgctggtacaagtcacagaatgcagaaaaacagcttacttcctaggttactggtttattaagcagatataatttaggaacagtagatggaagaaatgcatagggtgaggtatgtgggggcatggagcttctatgccctctccaggcctatcaccctcccagcacctccatgtcctcatcaacctatgagcactctgaacactgtccttttgggtttttatggaagtttccttatgtaggcatgatatattaaatcactggacattagtgattgactcaacttccatccctctctcccctacctagaggttagaaggcaggtaagggaatgggaggagggagaacctgaaagttccaaccttctaattacagggttggttcccctgacaatcagcccccattctggggctatccagcgcctctagtcaccagtcattcattagcctacaaaaagacaccacttcctacattccaagggtcttagcagctatgtgcctgtcaggaaacaatggcctagaccaaatatatatgtatgtttttattatgttaatggctcacctctttccttatcagcttcataaaaccaaaaattccctaaaatataaatattacaaactcataactgtatgattcacagggagtcctcctgttccccagagatctactttttggaaagatgccagcatgtaaaacttgcacttctgacctctgcttttttactctagagctggttgtctatttccatctctccttgggaattatcttctgccctggttttccagcatgccatgacactgctccatcacagtggggttatcagcttctccttagaaagcctgcatcttggacgtcagggacttggacaggaaatgggagtttctcattccttttctgtggctattacgaccttgccttttcttatttcatgctgttttttaaactgctacttttagaggctgccagagatactccctctgtagctctcagtatcaaatccacatatggtaagatgggcctttgcattttctacagattacactataaaactcttctgtatagcagcagtattgggttgatggtaacttctccaatgagttggccatgttcttctgggttgagtactcatcctacactttaactttctcctatactacctgtcctcattatcacttattattgcccacttttgactcttttcagaaacaggctacagagagtgatatgcaatagtggcaacaggcttgtggttcagaagtctcaatgatactgataattgcaaatatttattgtgctttctatgattatcttgtttaatcctcattcaacctgtgagataggtaccattatgatttcattttcagatgagaaaattgaggctcagaaagattttattcctagcataggtctcaaaagtattaagcatcaaagtcaagaatgcaaatccaggaagtctcactctggatcctgtaagcttaaccactctactttctttggacagacccttgctgggggctgatctctgtgaaaaggcttgcactgtcacagaaatataactagtcttattaagaaacggaatttaaaaaaaatatttttactaaatatgtatattattttattaatttattttttatctttattattttctttcttctagtaaatttagtgtgattgttgttctttttcttgttcttgactttcagattttcttattttctaataggtacttttaagacaataaattttcctctatgccgagctctaggtatatttcacacattttaatatgtcattcaactgccttctggcatgtaagagaagtcagttggtaatcttataaaagctccattgtatgttatgagtcatttttcttttgctgcttttaagattctcactttgtctttgactttcaatagtttcattatgaggtggcttcgtatgggtctctttgggtttatgctacttgaagttttttaacttcttgcatttgtatatccatttagttttcaaatgtggggtgttttcagccgttaattctttaaatacactctctgcccctttctctttttctcgtcttctgcatgtgtacattggttggcttgatggtgtctcataagttccttgggctgtgttcatttttttttctttgctcctctgatttgattgtttcacatggcccatctttaagtttgtgggttctttcttttgcctgaatttctaaattcagttattctattttttagctccagaatttctgtcgggttctttgtaaatacagccatgcatcacttaataatgtggatgcgttctgagaaatgcattgttaggcaatttttccattgttcaaacatcatagagtatatttacacaaacctagatggtatagcttactacatacctggagtatacggttagcctattgttcctaggccacaaacatatacaggttattctactgaatactgtaggcaattgtaacatgatagtaagtatttgtgtatttaagcctatataacagaaaggtaaggtaaaaatatacgattataatcttacgggaccaagcatcattatgtggtatatgactgtaatctctctctctttgctaatattccactttgtttataaaccattttctagatttagttttgtgtttttcactgtgttttctttgagttcattggccatatttaaggtagttgttttaatttatttatcaagtaagtcagaggcctgcatttctttagcggacaatctctggagatttatctggttcctttgaatcattcatgttactctgttttattttggtatgtcttgatacgttctcttgagatttggacacttgaaaaaaatttccacttcccccagcttttgtagcatggctttgtgcaggggaagaccttcattgcccaaaatgttttaaaggctcagggtcttttaaatcttttctgaagatgtgtattccctaagcctaagtgtgtgtttttattccacttccctgcatacatactatctgctttaaaatgtattattcagtctcctggttcatctcaaaagccttggatgtttattgtattcctatgtccataattgattactcctagccgcctgcaggtctgcagactccctgcagctctaacatgccacagtgactgactgctgctttcagtggcctccaacctggcatccaaactatgccacttttctcatctgtgctctacatcaggcaagacagaaaccagtcacttcggcagcccctaggcaagccaaatattgccagcaagttctattttttcccttgtatactgagggaggaacttgaaattgatacacatcttcctgacagtggcatattgtgccatgaaggggatgaagagtgaatgagaaaaatgtcacaaaatttcacaatgagtgtgacattttcttgcattattagggatttacctggttgttgcatcttcttaactgatttctagtgcaatggtgcaatctcacctcactgcaacctttgcttccaggctcaagtgattctcctgactttgcctcccaagtagctgggactacaggtgaatgccacagcacctggctaatttgtatttcttgcacaagtggggtttcgccatgttgcccaggctggtcccaaactcctcagctcaagtgatccacctgcctcagcttcccagagtgctgggattacaggcatgagctacaacacctggaatgtttcttcatatttatccatcttgaggacttaagatgtgtggacttatatatttattgtctttgaacaattccatattactatttctttaaatatttcttttacctcaatttctttttttttcttattaggactgtacttacgtgtgtgtgtgtctgtgtgtgtgttcgtgtgtgtgtcccaaatgtttcttcttttttctatattgttcctcctgttttctttagtctctatgcctcagtctgggtggtttttctctgatttattttctagttaagaaattctttctgcagaatgtgtttaattaagcttactcctttaattcttaatttcagttatatgttctagaattttcattttattttataggttttactaaatattttctgcctgataacttcaataattttattttctgggtgtcagtatctattgtatgcttttcctatttttttccccaattcctattgtttttttatacaactttttttcttttaagaggtagagtctcactctattgcccagggtggaatgcagtggtacaaccatagctcactgtagcctcgaattatgaggctcaagtgatccttttgtctcagtctcccaagtagctatgacaacaggcttataccaccatttgcagctaatttttttattttatttttttgttaagatagggtcttgctatattgcccaggctaatcttgaactcctgggcttaagagattctcctgccttggacacccaaagcactctacataaatctttttattaaatgcatttcagacattatatgtagagataatgcgacactctgcatgatttttttttcctccagaggtgctttagttttgtttctggcaggcagtgagagtggaggcatatcgctttaattcagtcaggaattaaactatttttgagcatgctatgaaactttgtgagagctcaattgtttcttgtcttcttttactactggggtgtagccttctgggggtatcaagctaaatttgtggtgtttactaaaggcaatttttcctcagctgtctgtgaatttcagtttctttcctagtcttgtgaggcttttgaaagttcttattttcgtagcctctcttccctcatttttgttttggaaacaacagttgcccacagtggaaaagtagcttcaaatgttggacttcatctctcctgtcttccctattctgtaatgttggcacacaaattcccagtgcctcagtagctctctgatgccttaaaaatcattaaaaatattgttctcacttttctggatgtttgtagtggaagggttggactacaacaatctagtttgctacatacagaaatttttttccaatttagaattcaaagctgtcatgtcactaacctctgagtgagaaaggctgtgcctgtgactcagtagttcagccttgagaagctttctcagcatgagtagtgttgtggtaaagagcttgaatgctgacgtcagactaattagtttctaatcttggctttgcaacagattagccatgtgatttggtggcaaattgcttcagtttccttatctataaataagtttcataatattaaaggaattaatacttaagacagtatgtgatgatcccatcacccaggtagtgaacatagtatccaatagttagtttttcaacccttgcccacccctctttccctaatctttagctcccaatttctattgttgccacttttatatttatatgtacaccatatttagttcccacttataaatgggaacatgtggtatttgattttctgttcctgaattaattttctgagaatactggcccccagctacatccatgttactgcaaaggacatgatttcattcttttttatggctgtgtagtgtttcatgggagtatatgtaccaccttttctttatccaatcaactcttgatggacatctagctggattccatgactttgctattgtgaatagtactgtgatgaacatatgtgtgcatgtgtctttatggtacaatgatatacattcctttgggtatatacacaataatgggactgctgggtcaaatggtaattctgttttcagttctttaagaaattgccacactgttttccacgatgttgatctaatttactttccctctaacagtgtgtaagtgttcccgtttctccacaacctcaccagcatctgttactttttgactttttaatgatagccattctgactgcagtgagatggtatctcagtggttttgatttgtatttctctaatgcagtggagtattttttcatatacttattggccatgtgcatgtcttcttctaaaaagtgtctgttcatgtcttttgcctactttttaatggggttgttttttgcttgttggttttttaaattccttatagattctggatattagacctttgttggatgcatagtttgcaaatattttctcctgttctgtagggtgtctgtttactctcttgatagtttcttttgctgtgcagaagctctttagtttacttgggtcctatttgtcgattttttgttgttgttgcaataactctgatatcttcatcttgaaatcttttcctgttcccatgtgcagaatgatattgcctaggttatcttccaggatattgatagttttaggtttaacatttaaatctttaatccatcttgagttgatttttttatatgagatgagaaagggatccagcttcaatcttctgcacatggctagccagttattccagcaccttttattgattaaggaatcctatccctattgctagtttttgtcaactttgtcaaagatcgatggttttaggtgtgtggccttacttctgggctctgggctgtctattctgttccgttggtatatgtgttttattttttatttttattattttaccagtaccatgttgttttggtttctgtagccatgtagtatagtttggaggtgggtaatgtaatccctacagcattgctcttttgcttacgattgccttggctattcgggcacttttttgattccatatgaattttaaaatagttttttcaaattctgtaaagaatgtcatcggtagtttgttaagaataacattgaatctgtgaattgctttgggaaatcttaataatattgattcttcttatccatgaacatgggatgtttttccatttgtttgtatcacctgtgatttctttgagcagtgttttttaattctcattgaggagatctttcgccttcctggttagctgtattcctaggtattttattctttttgtggctattgtgaatgtgattctgttcttgatttggctttcatcttggatattgttggtttgtacattgattttctattctgaaactttgctgaagttgcttatcagatctaggggctctggggcagactatggggttttctaggtataggattgtatcatcttgcaaacaaggataaaactatccctgtttggagacttcctctcttcctgtttggctgccttttatttctttctcttgcctgattgctctggataggactttcagtattatggtgaataggagtggtgagagtggtcatccttgtcctgttacagttctaaagggaaattcttctagctctttcccacttagtatgattttggctgtgtgtttttcatcgatgggctgttattactttgaggtatgttccttcattgcctagtttgttaagggtttttaaaatgaagggatgttgaattttatcaatagccttttctgcatctattgagatgatcatgtggtttttgtttttagttctgtttatgtgataaatcacatttactgatttgtatatgttggaccaaactttcaaccctgggataaagcctacttgattgtagtggattagctttctgatgtgttgctgatttggtttgatagtatgttgttgaggatttttgcatctatgttcatcaagcatactggcctgaaatttttgttgttgttgttttgtgtctctgccagggtttggtatcaggatgatgctaggctcatagaatgagttagggaggggtccctcctctgcaattttttggattagtttcagtagggatggtatcagttcttctttatacatttggtagaattcacctgttgcttatttatttattttttttgagacaggatctcactctgttgcccaggctggagtgaagtgatgcagtcgaggctcactgcaccctcgacctcccagggtcaagcaaccctcctgcctcaacctccctagtatctggaactacaggcatgtgccgccatgcccagcttatttttaaattttttgtagagacagggtcctgctatgctgctcaggctggtcttgaactcctggactcaagtaatccttctgcctcggcctcccaaagtgctgggattacaggtgtgaaatactatgcctgacctttttggtagtcttttaaattactgattcaatttcagaactcatattgatcagttcagggatccagtttcttcctgttttgatcttggcaatttgtatgtttccaggaattcattcatttctttcagtttatgtagtttgtctgcatagaggtgtttgtaatagtctttgaggcttttaaaaaaaaattctttggggtcagttgtaatgtcccctttttcatttctgattgtttattgagaccttgtccctttttttctttattagcctagctaacagtctatcaatcttatttattctttcaagaaaccaagctctgcatcattgatcttttgtatgtttttttgtgtgtgtgtcttcattttccttagtttagctctgaatttggttatttcttgttttctgctagcttgcttgcagaaaccatgtgcagaaggggttggtttgctcttgtttgtctagttcctgtaggtgtgatgttaggttatgaattttatatctttctaaatttttgatgcgggtgtttagtgctataaacttccctcttcacactgctttagctatgtcccagagattctttgttgtatctttgttctcattagttttctaagaattttatatttctgccttaattttattgtacctataagtcatgcagaagcagtttgtttaattaccatgtaattgtgtagttttgagcaattttcttggcattagttcctatttttattgtgctgtggtctgatagtgtgtttggtgtgacttttttttttttaatttgctgaggattgtttttatggccaataatgtggttgattttagagtatgtgccatgtgcacgtgagaagaatgtgttttctgttattttgtggtagaggattctgtagaagtctgttaggcccattttgtcaagtgtcaagttcaagtcccaaatatttttgttagttttctgtcttgatctaatattgtcagtggggtgttgaattctccttctattattgtgtggttgtgtaagtttcattgtaggtctctacgaactcattttatgagtctggatgctcctgtgttggatgcatatatatgtaggatagctaggtcttcttgttggattgaacctttaccattatgtaatgcccttctttgtcttttaaattattgttggtttaaagtttgttttgtctaaagcaaactatagcaagccctgctttttttctgctttccatttgcttggtagatttttcttcattccttttctttcagcttatgggtgtcatcgcatgtgagatgggtctcttgaagacacatatggcgtcttacttctttatccaacttccactttgtgtcttttaattggagcatgcatagttttagcctgtttacattcaaggttaatattaacatgtacagatatgattctgatatcatgttgttagttggttactatgcagacttgattgtgtggtttctttgtaatgttaatgatctatatacttaagtgttttttttttgtggcgcccagtaactgtctttcatttccatatttagcactcccttaagtatttcttttgaggcaggtcttgtggtattgaattcccttagcatttgcttgtcccaaaaggatcttatttctcctttgtgcgtgaaagctctgttgttatttccttagcttggtctgttctgctgtgaatacttgcaattgtattatgaaattcttatagtgtgtttttcagctctgtgagtgagatcagttctattctttcttgtaatgaccatttcatttttcagctcctgtatcattgccttatattccttagatttcttggattcagtttcaactttctcctatatctgaatgatctttgttcttatctgtatttctgaagtgtgtcatttcagccatttcagcctggttaagaacatttgctggggaactagagcagtcatgtggaggaaagaagacaatctgactttttgagttgtcagagtttttgttatggttctttctcatctgtgtcagctgatgtttctttaactgtgttgtaatttgaatacagtcagttgactccttttctggatatttttagaggaaagaggctttgtgcagggtctttatttgtagttgatgatagttctgttttaaattctttgagaaatctccaaactgttttaaactgtggctaaactaatttacgttcctccagcagtgtatacctttaccattttaccaatgtagttttatcacatttttgttaattcaatgcgcaggtttagagtgctatgtctatgttaatagtgttcatttcttaattttgtggggaatcaggatcacatattctttcttgcacactgttctatttttcttgagttaataattgtctcatgattttcgtttgacagttttctatgaattaatcaccaatttaacccatacttgtcaaacctgtacaatattaatatggtaaaaacgttagatggtctataaatgtataaatgtcttcttctatttttcctgttgacttaatgctctatggtcttcatgctccatttgtagttttgtggtcccctagagccaggggtcactctctggtgattcttttacttatatccctgaagagtccctactctgcttttctgtgttggaacttgtttcctggattctatgttttatctttcttggtttatactcttgttttagagaagcatatcttccagcaactttttcagggaacactttgtaggtaagtgatttttagagcttgtatgtcttaaaatgtcttttttttttactctcaaatttgattggtaatttagttgggcataaaaacataaatttgaaattagtttgcctcatgtaccatggtatattcaatccagcatgccaatatattgactctctctgtctgaaatttttaggctgagctgatagcttttagctgtgagcaaccctgtctatttactccagtatgtctgaaaagtatttttatttatttatctcctgtcttcaaaaagtttgggaagaactttatttagtttatagtgttcttgttgataaactccttagataaaatttctaatttttcaatgtagcttccccgccgcttttccttctcactgataaactttacgtttcttttttagtccaaatattctgagattgtatgaagacttaagttagtgtgatacttaaaaataaacattttggaaaatgtttttggattacttctttggtaatttcaaaccctgccttgtttttttctttctagaactcctgttagccatcagttgaaccccctgtatgaattcctaactttataatcttttaggatattttttcttctactttctgggatattttctccatttgatttaaaatacttctttaaagattttttaaatcatatttttaatttttgagaactttttcttattctaaatatgttcattaaaatagtttttttgttcttgttgcatcttcttttatcacattgagacagtcctttattttaaagtttatataagcattttcgattcctactggtttttatttttttcttttgtgtgatctgtcttttatgtgtaaactttccccagtttgtaatgattctaggctgttcattcatatttaaaaatgaggcactagaatggtgatggaaagtgccatgtcaaagggggtggcttgtaaagtgggagacatcactctaggataatcgggcagtaagccaatctcccataagatgattctcagttattggcatagttgcacatcttttcttttaggtggttcaatttctccaaagcttacacaatagaattcttgaaatacctgctaacaacacacagatggaaaggaatagacctgactgccagcattatggaaacaaacaaaaaatgaggtgatgaaaatatcattgttcaaaaataacaggttaaattaatccccactatttccagtaatgttgttacatccataccatcagctgtgtctattactggaagctctgtatcagtctggttttatttcttcagactagtcaatctctagctttctactgacataggagaggagtggatgcctggctggggtgatggagagagtgtgttagaattcattcttgctcaaaattttatctaaacccatctgcatatttttagttcaacctctcatgcttatagtcagatgcttatacctctaagtcatgagactttgggggattctgtgaaggaaattaactttaccctcttttgatttctttttcttgaagtttaagcttaaacttttccttctctgctatgccatataccccttgtctatttgctttcttccttctaactctttctcatctgccgttgtttccttttccattcattttatctatgtggttgtatatttttatattatctactctcatttcagtggtgttttggctctacttttcactggatattccacagcttgatagggaagtcctaagaaagtccaagctggtgggaattatacacacatttagaggtgtatgtcagcatagaggtctggtgtacagagcagataacaatttgagttgtttgaaccagaacttgtggaatgagtggaatttgacagctagcaactgaaagaagagtgttcaaatacttgcttgatatagtctcctcacagacatcagacacacaaatctttccatgttgaactttgaaatattatagctttgagtaaatgaatgtatcataaaaatttttcatcatgatacacagacatgggtaaggtgagatgaataataactgaagtaaattaatagactgtgtgttctcttttgcttgtgttgcatgtattgtgcacacctgatttgcttacatctttgctactcaaagtgtgatccctggaccacagtatcaacatcatctggatcttgttagatatgtagaattgtggccccatctcagacctactgaatcagagtatgcattttaagaagacgcctagatgacttgtaagcacaggaaagtttgagaagcactggctgttgttatgcattcatcattaggttatacattctttatttcctccttttcctattagaacaaaacaaaacaactacacatgataagtatgtggtataatagagacatcatttattctagtcaatacattatctgtggttacttaaattcatggagtgcagttttatgatgcagataaagcatgaactgtttggtgttttggcatgggttttggaagcagatggacttggtagcaaacattgcatttgacacagattcttaattacttttacccttggtaaaataaaaatttacatagttttctttactgagttcttatgaagattaaataaaatgatgtttctaaaatgcttagcacagtatcgtaggcacatgcaattaatattagtacccttttcttcctcaccgaaatgagtgtcaaaattttaaggcattacaactaatggccagggaatttgatatggaagattttatttacctattttgtttaaaaaattatttgatactgttgagctttttaaattttttaatttttatggatacatagtaggcatgtatatttatgagtaacatgagatattttcatacaggcatgcaatgtgtagtaatcacatccatgttgacatatacatatatccataaaactgtaatcacaattaagacagtgaaagtcttcatcactcccaaaagcttcttctctattgtcaattccggcttcctgccctgtcaccaggctaccattgctctgctttctgtcactgtatttgagttttcattttgtagagatttttataaatggacatatgcagtatgtacttttttgtctaacttattttacttagcataattaattagcattaattagtgtgagattcattcatgttgtagtgtgttcagtccttttatcactgagtactattccatcatatggatgtatcacagtttgtcaatccattcacacaattcacaatttggttgctgactctttctggctttacaagtaaagctgctgtgaacattcacggacaagtcttgtttggaaatatactttcttttccttaaaattgaaatgttttgattatgtgggagttgtatgcttagccttttacaaaattcacaaactgttttttaaagtcattgtacccttttacactcccattggcagtgcatgagagttaaaatacctccacttccttaccaacacttggtatgatcagtcttttaaattttagtcattccaatagatgtgtagttgtatgctattatggatttaattcgtttatatgagtaataattttgaacacctatcttttcatggacttctatgtcatctgtatttttgttcataaattgtatattcaaatctttcccactttttaaattgggttatttgtttattatttagtttataattttcctgtatatacaggatacaaactctttatcagacatacgctttgcaaatatttcctcctggcctctggactgtcttttcattcttcttaacaaagtaatccaggagaaacattttaattttgatgatattttgtttattttttttgtttgttttcttaatagatcctgcttttggtgttgtagctaagaaacctttgctaactcacagggttgcaaagatttttgcctatatattttttctatgagtttaatagatttatgtcctaaatttaggtctataattcattttgtgttaatttttgtatgtggtgtaggcatatactgaagtttattatgattacttttgcataaggggacctaattactccagcaaaattttttatgaaggctattctttttccattgacttacatttgtatttttgtcaaaaagtagttgtataaataagtgggtcttcttctgaactctgtattttatcccagtgttctatttgtccatctttataccaaaattaactatcttggttatcatagctttacagtaaaacttaaatttaggtagtgttagacctttaattttgttcttttttttaaaaaaaatgtttttaactattctaggtcatttgcctttccatatgaattttagaatctgcttgtcagtttctcaaaattatgctggaattttaaccaggattgaattgagtctatagatgaattaagggagaattaactttttaattattttcaatgttctagctcatggtatatctctccatttattttgtcttctttgtttttccttaacaaatcctgttgtgttcattctaaaagtctttcacgtcttttttcagatttatccctaagattttaatactttaaatgcttttgtaaattgattcttaaaaattttgatcttcaataatttgttgctcatacaaatatatataaatatacatttaatttttgtaaattcatcttgtatcatgcaaacatgctaaatttactttttagtatttttatagatttcatcagattgtctataaatcatgttatctgtgaataaagatggtttaattgtttttgtatgtcttttatttattttattcattcttattacactggctataacttctagtataatatggaatagaaatgatggaaggtaacatctttgtcttttccttgatcctggaagaggcgcatttaatctttggcaattgagtgtaatgttagctataggttttcatagatactttttattaggttagagaaattttcttttattcctactttggcaagagcttttaatcaggaatagatgtcagatttgtcaaatgtttttctgcatctattgagatgatttttctttttaatttttttgaatttagtttttgtaaaaattctagtcatatagtaaattgcattgcttattttaaatgttaaattaaccttgcataactgagataaactccacttgatcaaaatatattacctttttatctattattggatttaatttgttaaaattttgtttaacattttgcatcagtttttatgaggggcagtggtctttagtagtctttttaaaatttgtctttgtcttatatttataggtaatcataacctcatagaattattcagaagtattctcttattttcaattttctggaagagtttgtgttggatgggtattatttctcacttaaatgtttggtagatttcactaatgaagccatctaggcttttagggttttttattagaagatatttaattacaaattcaatttttaatatacattagggccactcaagttgttcaatttagtatcataaggattttttttaaactgtattctattattaacttcttaatttgtatagaatcagtggtaatagcacctttctcatagttgatattcataacttgtgccattttttcttgatcactctgcctagaggcttatcaatcttattattgatcttctcaaacaaccagcctttgatttcattcatttttctctaatgtttttatttttacttccttgatttccactcttctttctttattctacttagttttggtttaactgactcttctaattgctttgcatgggagatgaggtcatcaatttgataccattttgttttctaatgtaggtgtttaatggtatacattttcccctaaatgctgattttagaggcatcccacaaatactggcatgttgtactttcattttcattcagttcaaagtactttctatgtttccttttgattccttttttcatctatgagttatttagaagtgttatttttcaaatatttgggattttcaagaaatatttctgttattgatttccaatttaatttcattttaaccagtgaacattctttgtaggactttaatcctgttaagtttattgggacttgctttatggtctggaatatgatctaccttggtaaatgctccatatgcactggagaagaatatgtattatgttgttgttgggtggcatttttttataaacagcaattacatcaagttgtttgatagtattgtacaaatcttctgtatccttactgatattatgtcttgagcagcattgaaatctcttgactataattgtacatttttctatttcttcttagatttgtattcatttttgtttcatgtgttgtgaagctctgttgtaatgttcacaaacatttagaattgttatatgttcttgattgatacttttatcatcatgaaatgataattatgttatcatctgaaacctactttgtctgatagctttcttttgattagtgttagagtggtatgccttttccatccttttacttgtaacttatgtccttatatttcaagtgcatttcttacaagtagcatacaattggatcttgttttatccaatcttacaaattttgcctttttttgagcatgtaaattatatattaggttggtgcaaaagtaattgcttttaaataaatttatcatacctttaaaagcaaaaaccacagttacttttgcatcaacctaatagtataaagtaaataacataaaccattttatgtgattaatgttcccttctgctagttctatcattcaaactgctgtcatttttgattgattaatttttctcttctttatgggtcatatttttctgcttctttacatgcctgctaattttttattgaattccaaatattacacattttaaccttgttttgtgctaattatttttgcatgcctataaataatcttgaaacaaattgcttgaaataatttgattctttaggatctcgtttttaagatttgttaggcaggactggcaaagtgctcagtttgatgataaatacttcccactcctgaagcaagaccccttttttgtactttactcaatgactaatgaattatgaatatttcagtctggctgatggaaacaaagtgtattgctggtcctgagcaccagaaacggttatctttaatcctttaaaaaaattatttatttatttatttattttgagacagtctcgctctgtcacccaggcaggagtgcagtggcgtgatcttggctcactgcaatctccccctcccgggttcaaacaattctcctgcctcagcctcccaagtagctaggatcacaggcgcccaccaccacacccggctaatttttttgtatttttagtagagatggggtttcaccatgttggccaggctagtctcaaactcctgacctcaggtgatccatctgcctcggcctcccaaagtgctgggattacaggcgtgagccaccacacccggacacctttaactcttttgggtgttttcttccatggtctcaggtagtttcctcaaatgcctgtgttgattattactcatctgaatactcaagcgaagcacactgacaatttccttgccttgtgcagccttctctggcactctgtcctgtggtttctagctgtctttcagagtctaagctttttcccaactcagcacgtccactggactctggtgcagtctctccttcctgtgccatggcctggactcccttaaagcagcaagctgggataatcataggtctcgctctgttgtttactgcctttcatggatcagtatattacattgctcgatggccagtgactggtacctcatcttgtctggaagcacaagtcaaattagaagattcctactcatctttttttttttttttttttttttaacattttcaaccatattaggtgaactactctagcatttttcactttattagatttgtctgttataaccagtttataattaatgtagaaaatgtctttttatttagcttttcctgaggaatctccttgttttgaagaaaacatggattggaaaatgatcagtgataattattttcaatttttgaataacttactcaagtctccaacagcttccatatccaggtaagttatcagaatccaacttctaggtcttgatttaattatcatctgaagataatcaaaacctaattataggatatgcactctttaaaatttatgagcctgatttagatattgacacaatctttcatatgagctgttcaataaatattcctttaatagagtgtgtgactcaagtatcaagttgtttaatagaatgtatgactcaatggattttgaaaggaaatacagatcgtagtaagaagattttccttcaataataacatgatttataatagatgctccaaaaataaggtatttgttttgaaaaattgtcttagctagttacctagagtttaagcaggaaatcaattctatagattctgttagtttcaaagactcctgggagagagaagtggtctttggaactaaatttgtcggactattttctgctgtcctatttcagcacgtgtattgaaatgcagatttttatgtctggttatgaatagtgtgtccagtttaaaggtatactcggttatttgtggggtgtattggaacatgatgggagagatgttttgcataagagcagtaacgctcaaacttgagaatggattaaatctgtgaagactgctaaaaataaaaatgtctgcaccttgccccagtcatatgaaatcttgctctgtgtacaggacccaggtttctatatatttcacacattctataggtggttccagtgcacaccaaagttggagaaccattctgctatatctgtctagaatggggattagtcattcctatggaacttcttaagcccagctattagtaggaacagaagaaaggacaatgggatggatcctctagagaatcaattccttgcttaggtcagatttttaattcctctttcctgaaagcctcaaaaatttaatagccctagaaaaccagcacaaaactagtctatatgtgcacaaggacacatttaattttatatttgtggacccatagcagttggcacagtgtctttcatcatggatagtggtagataattagatgttgatttaatgaatgaaaaatcattgaacattaagtgcaatttatattaagaaagctgaacttgaaatgacaaaacctgggtcgtctcctagtcatgccacataataacagcttgaacctgtcaattaaaaaaataaaaagtttcttttttcatgaaagggaaataatgacgtgtacttcaaaaggctgttgtaggaatgaactaagatagtagttgtgaaagtgctttataaactaaattactaaagtaatataaaaacgtggcaataatactattagtagtactacttctacttcaatttattattctattgctactccataaccctctcagttcccaatacaaataagttttatattctcctctatcaaggcacaatgacttggatggtagttaggcatctattcttagggagggctggatttaggcaaggtttatgttgaattcctaatagaactttcccttttctgatgggattttttccctaggaattatttcaaagaagccattctgtcctaaaaataacaactaactaaattaagaccatatttttgtgtggggtgctcaggtctcagctatcagggaagtaaacagcattcttgcctttgataggtcttatgtctgtcctatgtcagacagtgtgttatacaacaagagcagagggttaaaaaacttaggaagtaatttaccctgtaaggcataaatagccaataaaggtcaaaaattccttacccacaattctgaactcttacaaagtctgaaaatagaggcttttcttatggttgacatcacaactcattcagcaaagatttatcatgaactgatgtgaagcagtttcaagtgtattatcctgcgtcgcgagatcattcacaggtctcactgcgaaagtgttaatacggtgatgatcagggctgtcccagccctcactgagatgcatgaatacatatctgatacctgtatcatgctacatttctaaaggatgaacatcctgaattctgaaacacatgtaaccccaagaatgtcaaaagtggacttgtaagttctgagttagtagaagttagttctgcaagtgtggatttctgttacaagaggggacttacagtgtctgagttgctcttctgagaactctgtattttaaaattaaacacctggcgataagctaccccatatataataatgagtttctgacagtaggatgtatatagtattgttgaaagagcactggaatttgccttccaggactgggagtgcccacaccttgctgaaaccctacaggcatggtttctaatgcactccactatctgtgctacctttacatgccaagacattttgaaatggaattaaatcctaagattcttctggcataaatagcaaacttatctttaataatcatacatattattgttaaatatgccaggggaaaataattgagaatgctttctttttggtggtaggaaacattttaagctaaatatatataacttcattgtgcatttctaaaacactttcaaatcctcacattagtttaatttctgttggaaatcatgttgtctattaaatgtttcatttgtgttttactatcaataaatgagtattaacttggaaatttgataaatcaaatttatttttttattttatactaaaataattctattaatattacagggctttaaatttcacaaagcaccttctaatgatggaaaagaagttgcacacccttgaggatgaacaaatgaactttcttttatcatttgtggaattttttgagaaattattgttgcctaatctttttgactcctccattgttcccagtttccacagcctcccatctctcacagaggatattctgaatataagttctctgtggacaaatcatttaaaaagtttaaagagagacccatctgccactgatgctcagaaactcttggaatttggcaacgaagtgatttggaaaatgcagactctcggaagtcactggataaggaaggaaccaaaaaatcttttgagattcatagaattaatactttttgaaattaatcccaaattactagaattatgggcctatggcatttcaaaaggaaaaagagctaaattggaaaacttctttacacttttaaatttttctgttccagaaaatgagattctgagtacaagttttaacttttcccagttgttccattcagattggcctaaatcaccagctatgaacatagattttgtacgtttaagtgaggctataataactagtctccatgaatttggatttttggagcaggaacagatctcagaagctctgaacacagtctacgctatcaggaatgcatctgatcttttctcagccctttctgaaccacaaaaacaagaagttgataaaattttgactcacatacacctaaatgtcttccaggacaaggattcagctttacttctgcaaatttattcttcattttaccgatatatttatgaattattgaatattcagagtagaggctcttcgttgactttccttacacaaatctcaaaacacattttggatatcataaaacaatttaatttccaaaacatcagtaaagcatttgcatttttatttaagacagcagaggttcttgggggaatttctaatgtatcttactgtcagcaattgctttcaatttttaactttttggagcttcaggcccaatccttcatgtctacagagggccaagaactggaagtgatccacactactttgacaggcctcaaacagctgctcataattgatgaagattttcgtatttctttatttcaatatatgagccaattcttcaacagttcagtagaagacctattggataataaatgcttgatttcggacaataaacacatttcttccgtaaattattcaacaagtgaggagtcttcatttgtttttccattggcacaaattttttcaaacctctcagcaaatgtcagtgtgttcaacaagtttatgtccattcactgtaccgtttcatggcttcaaatgtggactgaaatctgggaaaccatatctcaattatttaagtttgacatgaatgttttcacatctcttcatcatggtttcactcagcttttggatgaattggaagatgatgtgaaagtctctaaaagctgccagggtatacttcccacccataatgttgctagactcatattaaatttgtttaaaaatgtaactcaagccaatgacttccataattgggaggacttcctggatctcagggattttttggtagctttaggtaatgcattagtttcagtaaaaaaacttaacttggagcaagtggagaaatcccttttcaccatggaagctgccctgcatcagttgaagacatttccattcaacgaaagtacaagcagagagtttttaaattctctgcttgaagttttcattgagtttagcagtacctcagaatatatagtcagaaatctagattcaataaatgactttctttcaaataatctcacaaattatggagaaaaatttgaaaatatcatcactgagctaagagaagcaatagtatttcttagaaatgtatcacatgatcgagatttgttttcctgtgctgatattttccaaaatgttactgagtgtattttagaagatggctttttatatgtaaatacctcacagaggatgttacgtattctagacacgttaaattccacattttcctctgagaacacaattagcagtctgaaaggatgcattgtatggttagatgtcataaaccatttgtatttgttgtctaactccagtttttcacaaggtcatcttcaaaatattttggggaatttcagagatatagaaaacaaaatgaactctatattaaaaattgtaacttgggtgttaaatataaaaaaacctctttgttcatcaaatggctcacatataaattgtgtcaatatttacttgaaagatgtaactgactttctaaatattgtacttactacagtctttgaaaaagagaagaaacctaaatttgagattttattagctcttttaaatgattccacaaagcaagtaaggatgagtatcaacaacttaacaacagactttgattttgcatctcagtccaattggagatattttactgaattaattctaagaccaatagaaatgtcagatgaaattcctaatcagtttcaaaatatttggcttcatttaataacactggggaaggaatttcagaagcttgtaaaaggtatttactttaacatcctggaaaataattcctcttctaaaactgaaaacttgttaaacatatttgccaccagtccaaaagaaaaggatgtaaacagtgtaggcaattccatttatcacttagctagttaccttgccttcagcttatctcatgacctccaaaattcaccaaaaataataatttcacctgaaataatgaaagctacaggtcttggtattcaactgataagggatgtgttcaactccttaatgcctgtagttcatcacactagtccacaaaatgcaggttatatgcaagctttgaagaaggtaacttctgtcatgcgtacccttaagaaggcagacatagaccttttagtggatcagcttgaacaagttagtgtaaacctaatggatttctttaagaatatcagtagtgtgggaactggcaatttagtggtcaatttgcttgttggcttgatggaaaaatttgcagacagctcacattcttggaatgttaatcatctgctgcagctctcacgcctgtttcctaaagatgttgtggatgctgtgatagatgtgtactatgtgcttcctcatgctgtaaggctcctgcagggagtacctggtaaaaacatcactgaaggcctcaaggatgtctacagcttcacactccttcatggcataaccatttcaaatatcaccaaggaagacttcgcaattgtgataaaaattcttttggatacaattgaattagtatcagataagccagatattatttcagaggctttagcttgttttcctgtggtttggtgctggaatcacacaaattctggatttcggcagaattcaaagatagacccctgcaatgtccatgggctcatgtcttcttccttttatggcaaagtggccagtatacttgatcatttccacctgtctccccaaggtgaagattcaccatgttcaaatgaaagctcccgaatggaaataactaggaaagtggtctgcataattcatgaattagtggactggaattctattcttctggagctctctgaagtcttccatgttaacatttctcttgtgaaaactgtgcagaaattttggcataagatattaccgtttgtcccaccttcaataaatcaaactagggatagcatctctgaactctgtcctagtggttccataaagcaagttgctttgcaaatcatagaaaaacttaaaaatgtcaactttacaaaagttacatcaggtgaaaatattcttgacaaactaagtagtttaaacaagatccttaacattaatgaagacacagagacatctgttcaaaatattatttcctcaaatttggaaaggacagtacaattgatttctgaagactggagcctagaaaaaagtacgcataatctactctctttattcatgatgctccagaatgcaaatgtcacaggtagcagtttagaagcattatcaagttttattgaaaaaagtgaaacaccttacaactttgaagaactatggcccaagtttcaacaaatcatgaaagacctaacccaagattttagaatcagacacctgctttctgaaatgaacaaaggaatcaaaagtataaattcaatggctcttcaaaagataactttgcagtttgcccatttcctggaaatcctggattcaccgtcattgaagacattagaaattattgaagattttctattggtcacaaaaaactggcttcaggaatatgcaaatgaggattactccagaatgatagaaacattattcattcctgtgaccaatgagagttcaactgaagatatagctttgttagccaaagctattgctactttttggggctctttaaaaaatatatctagagcaggcaattttgatgttgcctttcttacccatctgctaaatcaagaacagctgactaatttctcagttgttcagctgctttttgaaaacatcctaattaatttgatcaataacttagctgggaattctcaggaagcagcttggaacttaaatgatactgaccttcaaataatgaatttcattaaccttatcttgaaccatatgcagtcagaaactagtaggaaaacagttctctctctgagaagcatagtagatttcacagaacagtttttgaaaacattcttctccctttttctaaaggaagattctgagaacaaaatatctcttctgctgaaatatttccacaaagatgttattgcagagatgaggtgagtatacttttgctttgtgtcatatatgcagttgcgatatatctcaaactactttattttctggagtatagacatgtcaaaaacagtatttgtatctaatacctttgaaagatctttgatgtaaatttgtcttaataaatattttatcaaaatgtcaaggtaaaagaattttgattactgtcatctagtaaaatataaacccagcccagggtaattaatcacgtattattcttacatttttagattatgaaaacaattatgaattctattttatatggatctgaaaaattagttttcatagctgtacatgcatatacaggattgacataatttgaattgctatactaactgtctaatcaccaactaggggcttaagtattctcaacccaatgaatctactgtggtatttgcatttagagacataaaaattgataatcacattatcttcttttcatatatctttaaaaatctcgtttgaagtttgccagtgaaaaggctggagggaaattccaatttattccatgatgtctgctttagtcaagtttcaagcagagtaacaaaaatcatcaaaggatttaatccaaggaaatcagcttacacaattttgggggctggctgagtaagtctgcaatcagtagggctgactgtcaggaagggaggcccacagtaggcaggggcgcccacagcaggcaggggcgctgcgggcatgagtgaaagctccttgtccacagtggtcaggaaggaagaccaggggaagggagagccactgactatgaatacccagcagtggttttgtgcctctaagttacagaggttctatgccctctttcagagttttcctggcccactcaggacagtatcccttctgactaatttaaagttaactgatcagggattttaactccatctgcaaaatctctttatagcaacacctaggttagtgttcgattgaatagctgggagaagatgtacttatattacaaaatggctataactcccatctatcctagaactctcatgagagaatctcccctgtagcccacccagatgagaaacatacaagaaaggggcttcttcagctattgtttagcctagtcatgttgatacatctgtctgagcaatttgctagtacttctaaagctcagaaaaatataaatatgctaaccacttttcagacacttatctcttacatcaagaatcacattgtagtcattttactttctttcctaagtaaaagcccttttaacctttttcataagcaaaagtttgtggctttttaagttgctaggtttaaagaactgtaacagaatttgttcatgaaattcctcactcttttcattatttggcaacaaaatattgagtttcatctgaaattattttagcatgtcatcttttgctcagtattatcttcccatgatgctattataaaacaaataaaataatataaatcactatgtatcttaatatttccactgttaatgtattaaaaattaaattaaaagtatatatatatatatatttacagttttgtcccaaaagataaaattctagaaattctgaaactggatcaatttcttaccctgatgatacaagacagattgatgaacattttttcaagtttaaaggagactatatatcacctaatgaaaagttcatttatattagacaatggagaattttattttgatactcatcaaggactgaagttcatgcaagatttatttaatgcccttctcagggaaacttcaatgaaaaataagactgaaaataatatagactttttcacagtggtgagtcagttgtttttccatgtgaataagtctgaggacctcttcaaactcaatcaagatcttgggtcagctcttcaccttgtaagagaatgttcaacagagatggcaagacttctggatacaattttacactctcctaataaggacttctatgctttgtatcctaccctccaagaagttatacttgctaatctaacggatttgcttttctttataaataattcattccctctaagaaacagagcaacattagaaattactaagagattagttggtgctatttcaagagcaagtgaagaaagtcacgtcctgaaacccctcttagaaatgtctgggactctggtcatgctgttgaatgacagtgctgacctgagagatcttgccacatcaatggactccattgtgaaacttcttaagctggtcaagaaagtttcggggaagatgtccacagtttttaaaactcattttatctccaataccaaggacagtgtgaaattctttgacactctgtattccatcatgcaacaaagtgttcaaaatcttgtgaaagaaatagctactttaaaaaaaatagatcatttcacatttgaaaagataaatgatttgttggtgccatttcttgacttggcctttgaaatgattggggtagaaccttatatatcatcaaactctgatattttcagtatgtcacctagcatactctcatatatgaaccaatctaaggacttttctgatattttggaagaaattgctgaatttttaacatctgtgaaaatgaacttggaagatatgaggagtcttgcggtagcatttaacaatgagactcaaacattttctatggattctgtcaacttacgggaagaaattctgggttgcttagttcctataaataacatcaccaaccaaatggacttcttataccctaatccaatttccactcatagtggccctcaagatataaaatgggaaataattcatgaagtgatcccttttttggataaaatattatcacaaaacagcacagaaataggatctttcttgaaaatggtgatctgtctcaccttagaagctctttggaaaaacttaaagaaagataattggaatgtttctaatgtgttgatgacatttactcagcatccaaataaccttttgaaaaccatagaaacagttttagaggcctccagtggaattaaaagtgactatgaaggtgatttgaataaaagtttatattttgacacacctttgagtcagaatataactcatcatcaacttgaaaaagcaatccataatgttttaagtagaatagctctctggaggaaaggacttctgtttaacaactctgaatggataacttccacaagaactttgtttcagccactttttgagattttcattaaagcaaccaccggaaagaatgtcacatcagaaaaagaagagagaaccaagaaagagatgattgactttccttatagtttcaaaccatttttctgtttggagaaatacctgggaggattatttgtattgactaaatactggcaacaaatcccactaacagatcaaaggtaattaaaaagctgaattcactttgtttttttctctaccgcagtagctataaaatagaaccatgcaggaattacagtgaatcggggtaagtagttcttcttgacttcaactttgtttacactctgaagttggcttcaacatagagcaattcaggtccagtcattctttttcataattcgactcattatttggcattcaaatataattgcagtttattcaaaatatttcaaaagtaagttattttattctcagaagcaaaaacctcttattctattcactcatcccaagactagttgcataaacaatttttctgttcatatcctctggcagccaagggtcctatgactcagtatacacacaagaacatgaagctgcttgcttcacagaaaattatgctttcagttgtagctaaccacaggaaagggccaggcagctgctggcttctgcccttttttgattctgccagacttcacgtggttgatccacctccaagccctcctatcgctgaaagttatgtccatagaaacctgttcttaaaagctccagtcttgctagttgtcatgccttggaagcagtctgttgccttaggttggagaccctgtgcctcttgatgtgcagaggcccagagatgctgcagctgtccctacctgtcctttctgtgggtgaaaatactgttagggtggtccctggtctctgtttctccctgctttcctctctggcccacatggagattggagatgccatgtcaaccctggttcatttgccaggcaggctgacttattttctgttggttctattactccagagatgtaccttgaatccagtcatgttctatgagttggaaagatgtctttagttggtgaaacaggtagccactggcacaaataactattgctacctaggaatttgactgctagttttcagagcttccttcttcatctcctccttgcttctgatgtcaaactatattttgtttgactttagtgctcttctctgaattgtcttttgagctgaggtggtcctggcaaccccattctccaccaatctcaggttttatctcaaatttttcagttctccacagagggagtttataccttagctcttcataccatcatgttttgacaccttttcaacatttacctttgcatttcaaaagaatagaacaaaagaagaaagaaaagcaagtattaagcttattggccacaaaattgatgctttgaaataattctggagacctaaagttttctaaaggtccagaatgtgttatctgtgttttcttatgttcctatgaagaaaatatgattatgcagggagggaggatggttcttacatgtgtgttataacttaacctacacagtagagatgcacatgggttgcacatttttacccttttatgtcattgtatatatttttttgctaagtgttgttgagatttgtgaagttttccagcagactgtgaagccctcagaagccatggagatgctgcagaaagtgaagatgatggtcgtacgtgtgctcaccatcgttgcaggtgggctgctcatataacaagtgctctgcaattgccctgtgccagttttcagaactcaggtgtcagagagatgagtatattgcacttgagtttcttttagaacaaagcacagctgtcttagtctggcaaccaggccttgagggatctgcccctcccaacctcattcccaccactgggcctctactccagccaaattgaacggcccgttcctgcgcctttgctgggttttctggtctctgtctttgctcatggaatgtgcttcccttgtcttcttgacctaaactacagccgtactctgtggcctagagctgggggtgtcttgtccagaagtgttcccccatctcctttactggcaaagaccttgaggagactttgatcacgtgcagtatcgtactttcttctttcttacatttcctccctctgctacagtcaatattttttgaagatagaaactgtgtcataaccttctgtgtgcatttcctgatgggtgctgagtagtccctgcagtaacctgaattccctacagccgtggcacttattgctggtattatagtttttggtgtcttcttttcctgctgcagtctgtaagcttactgggaacaggatcagtctcttgctaaattctgtgtctccataatactcagcatagtgtccagcaatagtgactatattgtaaatgaattaattcatctgctaagatgatacttgccaaatccattcctgcacatttcagtgcaatctcctttcaatgccactgctgaaggagagtcccacgagctgctttagagggtaactagatgatcttagggcttttctgaaaatgtgaacattagactttagagcacacttgagtccatggaatggaccacagttgtttaagtaattcacaggtgcacagaggtgctgccatcctctggcccagtctcctgagcagggctgcccagagccccctcagtgggctactgggcctgagtaccctgtcttagctgatggcagtgggttttgacaacatgaatcgaagcccagaagaggaggggaggcgaggagaaatggggaagccaagggtggatccgatcagatcaagagggaaagaaaaaagtgaggggtcatctgagtagggcttactccatatcctggccccggactccctgccccctagctcatctgatccacatgttcattcttctgcctttccttgatttactcctggatcattattattatttcgattactatcaggttgttatattatgatttgtagattacgtgttatttcctctggaaagcttttcttcacctaccctgtctggggtcacatggccttagctccttgttatggctcttaccaccgtgtgctattctgatgatgaacatgtgtctcttctacagttgtgagaacccagagactgtgcctgtctattgatcactacaaacctggcacatggggattagaacatgggaaatgttgattgacatttgttgaatgaatgaataagtgccagaagctcttctatacttacgtcatgtttcactggaattaccaaatgtgaaatctgttcatgggggagtgctcagcagcgagaagtagtgggtgggctgttggcatgttctgggcctattttgtacgactgagcaaactgtgggggcctggggaggatgttgtagagaggagtctggtttacccaggaaggggcacagtggacgtattcccaacatccactatcagaagaggaagggttaccggccccaggatggctaattggtgggtgtgggccactgagtctgtgagccaggagtatggaccagcatctactggggagcggtatggaggagaaatgagccttgggcagaaccagcatgtcaaatccatttttcaaaacaaaaaagataaatttttctttgtattgataagtgctagaaagaagctaaagtatggccatgagggtgagagtgaggggtggaggagaggagaagaccttgagggtgcagttcagggtgaggacatttcaggtgagacttgcgtagtgaggatgtgtgtctgccatgctcatggttatatcttcccagggtttaggaaacatactgacataggcatgataggcattcaatcaatatgtgtagaaggattggataggtcaatgcatgagggctggcactaggttgggcacttgtgactgcttgagttaatctacacaatcactgatgggcttcagactagtgtgctgggactcgtggtctgtaaggctgcctccttactgtcacgatggggcactcaggattatacaccttcatgactggtaaggctttattgccccaaatatctttgagggcagagtcaaacatgactgttaaaacaagtgatgtcgtgagaagtgctgtaatggaagaagcaggcgctttgagattgaacaggctgagttccttgattcatgctgagtgacacagggtagcttctgaatctctgtgagccttgaagaaaacataggggaacacctatttcaacctatgtgagaggattaaataaaatgagtcacctccaaggggcttatcctaaggagatgccttgaacatgctagttgccctgtcctgcaagttgaagatgcatctccctgcatgccattgggaaaactacttctcagcttagagggctagttcataagtaaaaactggtaatttagggactgtctatcacagggttagttctaatctgctcactcatccctttttttgtaatacaaatggttgtttgaacagaagaattgattggtcattgggtctaagaaacatggaaaaggagtaagaaacagagggagaagtgggacaagcttgatttaaaaatgaaaccccaactgctgtgtaggggttttgcatgtttttttttcttttaagataatctgtatttccaattagatgttatgaacattggtgattaggaatattgctttctgttgtcaaatagaaatcagtaaagtgttacaatctaagtacaagttaggatggttggtacatgatttcagcatttggaagtgtgctcaggtaaaattcaaatcaaacttcttcctcgttcttgaatgcttatcttccatattgaattcagccacgtttgaagacacaattatctggacatttcacagtcagctaatataatggtttttaaatgaattaaacattcattaatgtatgaatttatatttattttgccattctgtattgcagctgctaaattaatatagcatacttgagattacattagtaacagataattaatttttaatttttatattttatttcaaggaaactcaagcataactaacatttaaactgccaccccactgtccttattgaattgttactccatcctgtagaataggagggcagtgacagatcccataaagttaaagggatggggtggaattgaccaatgtgggcaaatagcccctcctctcccatcatataaagggaacaagaataagatctgttattattattgttgctgaaaatgcactatattttcgtcatatcacagagttgagttcagtatctccaggaggaaagtgacaactttccttctcctgatctagtgctttaaagatgccaaggacaatgcaggagagctcatgcaacggaaggagcctcagtgggcagctactttaatcttccagtttccctaattgacgaattgaggcccagagagtgagagtgagtttcccagggtttcagagtgaagcagtcagagcccatttccagttgaagagacctgagagggtccatggggctgaagggaggagaggaaaggggtccagagagcgctggcagatctggaaagccagagtgggtctgaatgtgtccttggagccaagaagaggggccacagcaagtaggaagggctggagccagggattgggagaggcaatgagaggtggagaaagagggtacccgggaaagttggaggagtcaaggctcaaaaccagctcttgttagtgtcgagacagttgtcaagtgtccttgagggtggtgcctttgagggcaggcttcaagacgtgttagatgtgaggcacatggaggccagatggcctgacagcccagcactgcatcccatgatcatatcatccctgacctaaccttgcaggaatgctgggcttggtcactgtcgactccacgttgtcattttacattgaggaagcaaggggctgacacagcccacagcttgcctgatgccatacattacatcagctttttcagggtgcattctctgctcttttaggtttgaacaacataacttataaacacattattgtgtcttcccgagaccagaggatatgtttatgcttaaagataagtgctgtgatatataacagcacattattaccttcatttcaaattttaataagagattacttaagtgacacattttatatttcctacaataaagatacctgtctttgaaattagtaaaataagattaatgagaaaagaaaaacaaataaggcatcaaggtgggttgcttctggaaagcatgactttggatatattgtgtctactctgcattttatgtggttgaaaactgttttagtaattaataaattttatattttagagtagttttagattcgcagcaaccttgaatggaaggtgcagggatttcccatatactcccttccccaccatagcctccctcattatcagagtggcacatttgttacaattgatgaacccacactgacacagcatcattccgagtccacagttcacattgggcttcactcttggtgttgtcattctatgggttaggacaagcatataatgacatacatccagtgttacagtatcacacacagggttttactgcctgaaaaatcctctgtgctctgcccattcatctctcccacccctctagcccctagcaaccacggatctttttactgtctccatagtttttgtcttttccagcacgtcattgagttgaaatcatacaatatgtagccttttcagatgggcttctttcacttagtaatatgctggaactgttttttcccttccttccttccttccttccttccttccttttttcagacagagtctcgctctgtcgcccaggctggagtgcagtggtgcgacctcagctcattgcaacctctacctcctgggttcaagcaattctcatgcctcagcctcctgagtagctgggattacaggtgcccgccaccatgcccggttaatttttgtatttttagtagagacggggttttaccacattggccaggatggtctcgatctcctgacctcgtgatctgcccaacacggcctcccaaagtgctgggattacaggcgtgagccaccgtgcctggctcagaactttttataaaggacttttgagaaacaatttattattcataatttaagagtcaggataacatttttttttctaattaaaaaaagattttatttcttataaaaatgtattttattttctgtcatgaccaagcatctaggaggtacaaagccctgtgctaggtgccacaatgacaggaaggcagtgataagaaaatttgcccgtggcaggtcttgtgcagatggatttatcgtgcggtgggaggtgagcacacaggcatctgcgcagcagggaggggaggggctttgctcagcctgggaaaggtgggtgtctggaggcagaactctaaaagatacgtaggttcaggaagggagagtgatgccttgtatctgatggccttgaggagacaggagggacatagggcatgactgcagagaggtggaggcacctgaggctgcggaaagacattggatgcaacatggagcctttgcacagattcctgtaatgggggatctcctttggggaagagccttgtggatcagagcgtaaggcagattggaagggtgaggtgggagtgggactgttaagagcacagcagtttcctgggcgtgatctatgggtgctggacagacgcacagatggagagacattgggaggtcatgctgagcagatggggaggttggttggctgtgaggaccagggggaggagagtcatgactggcttccaggaagtgacttgtgaggcatggggcatggagaagaccacacatagacagtgtgtaattcatccttcaaactggggcacttttgagaatgacagagggcactgttcataaccatgcaagaataggtgaaaagcaagtctgtcctgggcaaactggggtgaatgggtaccccacttgtaggggatacagggaaaggagccagtttgaggaggtagagataattaatatttacaaaatcaattaggcccagaaaagcaaaatctttattttattacatttggaactcaaaaggcacagctttaccctcatcatctgaatgttcatcttgatgatttaagaaatgtttaggaatttgtatcactttgaatctttaaaaagtgattttgtgagagtggctagttcaggagaggactgtctattaattatttctctgtgtgtttcctctggcagaaaacccttcctggaccaaggacattttgtgtgctactctgagttgcaagcaaaatgggataaggcatctcattttatctgctatacaaggggtcactttggcgcaggaccacttccaggtttgtcgtctttaatatttcagagaatttcatgttcatgactattggcccttgcaaggcagtccagttattcaaacttgctgcttcgttcttataactacagcaatggtgtcatacacagtcttgttgcaagctgggcttgcagaatgactgctcacccttcctccctcttggcctctcccagtggtgtgctgggttgagtggcactgagttgagagatcggattgttaaattttcaggaattttgcaagctggttgttaaacatagatgtcatcattataaataaattatataaacttatgatgaaataaatcatgttagaaacacaagtaataattactcaagattcatcacttcctaattattttagtatgttttactgttatctctcttcctgagatgatttgcttttgttgtatccacatgatggaaatactatgtagtcttgtgctaagtgcagttcttcccttctctacgtttaatgacgttatggtggcagcatgaactgggccatgcaggagcttttgcaccatggaaattggcaagtgctccaaatcagaattttttttttctggagagttagtttttaaatatttaccagcccaacactggctctaactcattgaatacactggctagtaccaaaaattgatggctgaatgggaaccagcatagcaatttcctttttattaaattggacacatgcccaataggctcccatgcagggtctccaactatagctgaatcagacaatgtgtctcttatttgggccccactcctttgtcctagaattaaagacccctgggcccctaggtaggcctgatccccctgacaagcttggacaatggtgatgtccttccaacaatgcagtgaagacctgtctctcttctagttctggttctgaatgttgtttcttgcttttgtgatccatattatctgtgagtatgagattatcacagaaagcagagaaatagatgatgccgagagagatgagagatagccatgccagactcccacagcatggcaagggtgtcgaatgccatgccttggtgaagtgtcaggagggagtgagagctgctgatctctaatcaatgtcttgtggcctttggaggagtggtgcctgtcagcaggaagccctgagcagtccctagcaatgattgactttacaaccccaaatttacattgatttttttagaacatcaaattcttatttccaggttgtgcagatctttgtcaggtattaaatgtggatacaggaaaaaaaaaagccccacagacaatttttttttttttttttgaaacggagtcttgcactgttgcctgggctggagtgcaatggtgcaatctcggctcactgcaacctctgcctcccgggttcaagtgattcttctgcctcagcctcttgagtagctgggattacaggtgccagccagcacgcctggctaattttttgtatttcttggtagaggtggggtttcactatgttggccaggctggtcttgaactcctgatctcgtgatctgcccacctcgacctcccaaagtgctgggattacaggcatgagccacctcgcccggcccctcacagacaattttttagtgatgagtgaaggttataataataaaatagtcaagagactccagctttcagagcaactgactcaaagactgtatttatagttcaaattgttatatgattgtcaacaagtctggctggtaacagttgggttagttttgataaagagcagaagttcctgtctttaatgacaaaaatagtatgttgcttatctcaggatgcaaagcttttaagatgggtctgtggttcaagggcttcaagtatgtgagacttttagaaatacaaatctttttcaggctgtgggatatgaagtcgccaacagagatgggcaaaaagcacaatgccatttgctagttttcagtatctaaataaatattttaaatatagttttctcagtagcaacatggaattcccatttagagagaaagtttcagctgattgaatcgatatgacaaaagtttggggctgtcaactccttaccctcttccaccctttgttccaaatagtagaaagtagcaataaggaaatgaatggggcagaaattaaacttcaaaaatgacagcaagtgcccactgtatttcctgggctaagctgagttggagaatgcagctggaacttcaggttgggtgggggcttcctactgcctctctagatctagacctttgggtccacctgtatacacttatccagcatttcttgattctaggcctgatgtagccggagaaggagagtctgataggtgctgccttttccacgtggtggttttacctgatcccaaaagtatagcctgatgaatttcaatctcaactttggcctagatgcctctgcttacctggagcctggtacacctgtgctgaagaaacttggaatttttcttccggtagtccttgctactggggtagaatgtgcacttttctactttataatcccctctatgtcaaaattattattttattaaatttaagaataacatccatagcaggaatattataaatgcattgaatgaaaattaatttgcatgcagttacaaattacaaactagaggttctttgctataagggaatactccatggcagagccctcatgcagtaggtttaattcaatctatgttctcaggagtgagttggcccctaaggggatactcacctgtatctattgttctgacctagttgtatttctgcattgatatgctacaaaaagggatctctttggagcaaggagaataccgagcctgaaatgcctgggtgagagaattggagaaggtttagagagcttcacactcagggaaaaaaaaaaaaaaaaaaaaaaaaaaaagagaaaagaagaaaaaagcagagtgtgaaagtccaagggcttctgtgcatgttattagaaatgtgcatgtagcttggagtcttgaggctggacctagacatctctctgccttgcagatgctcttcctgagtttgctaccatcctttttctttctgctttgctgtggtgacattcagacatcagacaataaatggggtctgtgcacattaggggcagtgggtgggtgaaggctggaggaggctgtgtctcttctggtagagcagtcagcggaaacctaagtgaagaaaggaaagaagtctgtacccttgagccctgtcacacgttagaaaatggagacgggcttgagctgagcactccttgtcagaccccttcaggtgttactcacacaatgcaggggttcagttgcttggtgggtatcaacccaatgaccacaaccaaggaggatttaacaatgagatttaagtaaggagaacaccagggatggttcccaaagtagtgcctctgagctggggacgggttaggttttataaacgtcatgtaatgtggatctgattgactgggtcctgccatgggtgatgccagagctcaatccagttggatcctggatcctgccatgcaatgtccgcttcttaattcaatccctgctcctcagtccgagcactccagctccccctgtggttgcacactagttcatccaggcatgcccgggttatgtgacctgagggtccatggcaactgaaaaactactcacaactttgttacgtaaaagtcgaaccagattggcctggtgcggctaacatagacagcagacaccactccacctgctcagtccgtcaaccttcacatgcggaatctcactcctcacctccggcttctgagcccggcattgacacagactcagccacgcccatccccacgtcactcagctcccggcactttccctgggctcctcttgcatccttgaccgactgtctccaattccacacctggctcctctatgtggcagaaggacccaggctgtctccagaccctttctgttctcagtctgtgctcacatgctagggaatcttatgcagattcatttgcaacctaaaaatcccaattacttcctgacaacttccaaatttccttctccagccaacacctcccctgaccttcatgctcatgtgttcagctgcattcccactcagatgtcaagcaggcccctcaactttactcatctgaaaaaaaacctcttcatctttccatgtaatttttcccacccctggtgttctttccctcagatgccagggacaacaaccttggcatgcttgtttagtctttgttcttcttatttttttcagttagaaaactctcccttctaccttccaaatgtttccctgatctggccatgttctaccacctccaccagcacctttcagatatgagccagctctcccttccttctccccttgcctcgatccctaatgcggtagccagagtgacccttccaaaacatcatcagatggtgttactcctttgctgagagtgtccagcgtcttccagtcttatttggaataggtgtccgatttctaagggaggccactgctaggtcctgctgtctgggtggcatatctctccttctgccctccccggcactctcttctccacctcgctggctcctttgcacccacctcagggcctttgcacttgctgctcccgcacctgcagtgtgcttccctaatgatgataaggagggttgtacaccttcctcttgcacctccagcactgcccccacccctgccttattttcctccaggtcacctgtgacatgctgaccagtttgcccctacagctgtctgctggtagtgttcctgcactgggttgtgaacctcatggaggtaggagttttgtctcctgtgttcatagctctcagtccggcacctagcctgggcctggcacttggcaggtgctccataagtattttttgaatgaatgaatgaacagtcctataggatttctgttcaagttccactcccaaatcacttgggaagaaaagaaacttataaaatgaatgacaataatagatgaattagagtcaagaagttgcatgctttgtaataatctattggctggtttagttccccccacagtgagattttgtggtttggttgaggcggtggtgacagtggcatgagtgctctgatcatggattaacgttcatcatttcctgagaagtcttcagccccccccccgccacacacacactaaatctacctcagctctgctggggggctccatcttggggcggcctccagagcttagctcccaaccttgacttttcagcagtcttcacatttccttggaacatatatttgtgagcttcctctggccacttgaatgattcatgattttcctttgcaagagaaattgacagtggttttgaaaaaaatattcaaagttttacttcgacagaaatattatctaagtgttgacctacatatgataccttcccataattggtgcaacctggaactatgcttccaatatcagtaagaatatgttgatataaataaaatgtgatgaagcaaataaattctgatgatgtaaaataaagtatttatggtagaatagctgtgactagggaaagtgtatagattcatgtgtatgtttatagacatagatgttatatgtttgtggtgttttctgggttattttaaatattatgttacctatatttgtcatttaattccacatatggtgttttgcattttgtcaattaataggtattattctaaaaggtttttttttggcaaaatgattggttgtttaaaaaactgattgtttctaggaagatacggataagatgtccatgaaatcttagaggtgggggttagagatgtggagagtggggacctacttctggagtctttccagatgttccccagagtcttaggagcctctccacctgcagtggacagaacaggagcctctcaggctgtactgctgaccttcagagcacggcaaatcccggttttatccacctcacataggaatagccacatatgatttctttctaatcattgtgtttgtggctgtgaattttgaaaagcctcaagtttctttaatttttttttcattttcatatttattttttaataatatatatttgaagtgtacaacatgatgttttgataaacatacaaagtgaaatgattactacaaacaaatgagcatatctgtcatctcagagttatctttgtgtgtcgtgcgtgtgtgttaacagtacctaaaatctactttcttagcagatttccagtatgtaatacaatattggcaactataattctcatgctgtatattaattctctagatgtgttcattctacataactgcaactttataccccttgaccaacatcttcattcctcccaagttcatccctggtaaccaccaccctatgctttgtttctatgggttttttttttttttttgttttgttttttttttgagacggagtctcgctctgtcgcccaggccagactgcggactgcagtggcgcaatctcggctcactgcaagctccgcttcccgggttcacgccattctcctgcctcagcctcccgagtagctgggactacaggcgcccgccaccgcgcccggctaattttttgtatttttagtagagacggggtttcaccttgttagccaggatggtctcgatctcctgacctcatgatccacccgcctcggcctcccaaagtgctgggattacaggcgtgagccaccgcgcccggcccgtttctatgggtttgacttttaaaaagtttgactctacatgtaaatgagatcctgtaatagttttctttttgtggctgacttacatcacttagcatatcttctgggttcatccatgttgctgccagtggcataatttccttctttttacagctgaataatattttattgtatataatgtcacattttctctattcattcatctctttagaaacattttggctgattctatatcttggcttttgtgaataatgtaaatatctctttgggacataatttcatttcctttggctttatacccagaagtgggatttctggatcatatggtagttccatttttaatattttgaggaatcttcatactgttttccataatggctgtaccaatttgcatttccaccaacagggcacaaggtttccctatcctgcacacccttaccaacactcgttatttcttgtctttttgataacagccatcctaacaggtatgaggtaatagctcattgtggttgatttgcattttcctgatgattagtgaaattgagcaccttttcttttacctgtttgccattttgatgtcttctttggataagtgtctgttcaggttctttgaccattttttaaattgagttatttgtttttctgctattgaattgtgtgtgttcctaggaacagagcttcaggaagttaagagccaggcgatttggtggagaattgcgtgttctctgctgtgtgttcaagaacaagctgtcttgcttggctggctaacagcggagccaggagtaaaatctgggcttctgtatttccacagccaagggctctttctactactctgcaatgcacagaagcaactgacatgattgttctctgtgtttcctgagactaatgagaataaatcaaaatcttacagataagtatgtgtgcttctaacctatatcattgctatgttttctaggaaattgaaaagatatggtcctcgccgaatcagctaaattgtgaaagtcttagcaagaatctttctagcaccttggagagcttcaagagcagcttggaaaatgccactggccaggactgcacaagccagccgaggctggagacggtgcagcagcacttgtacatgtatgctctgatattctttcatgccctccccagtacttccattcatagagaggatgtctaggactctttaaaatgtgaatttcagacagtggtctgtataatatactcttaatgtgcatattaatatatattttccaaacatcaaagttttccatgacaatttttgagtggtaaaatgtaacagcagcattaatcagaaggctaactttattggcgataaagatattagatataagaatgtaatccacaacgcttggtggcaaatgcctgtaatcccctctaatgggaggctgatgtgggagaatcgcttgaggctaggaatttgagaccaacctgggcaacatagcaagaccctgtctctaaaaaataaaagcaacaacaaaaaaattagcaggatttggtgctgtgcatttatggtcccaaccacataggaggctgaggcaggagggttgcttgaccccaggagttcaaggctgcagtgagcagtgattgtgctactgcactccagcctggctgacagataaagggcctgtctcataaattaaataaataaatgaataaatttctgtttgaacagcaaatatttttcttttcttttctctttttttttttttgagatggagtctcgctctgttgcccaggctggagtgcagtggcgcgatctcggctcactgcaagctccacctcccgggttcacgccattctccctcctcagcctcctgagtagctgggactacaggcacccgccaccatgcccggctaattttgtttttttattttaatagagatggggtttcaccgtgttagccaggatggtctccatctcctgacctcatgatccgcccccttcggcctcccaaagtgctgggattacaggctgagccaccgcacccggtcgcaaatatttttcaaattaccttcatgtttgatcaattttgcttagtgttctgaaagtgtaaagcaccagaaggggaaataaggaactttaaattctgcaagtgactttttcactgaaagaatgatgttcatctgaccctggctatcctaatttctcgtacgttccatgatctatcctatctattctcttcacagttgtgaaaagccatttattatgcatcctcattcccctggttcatctcggttggcaggagctctgagaaagaaatactggagtgtgggtagtattaatggatattcacatacagatggtattgggagacatgtgggtctaattgttgcaggaactttatggaaatgtgatcttgttatccagtccatctcttgggagctgaggcagtattattcattccaacactgtttctgatgttttagcttgcctaatttagctttaattttctgccattttaggttggccaaaagcctcgaggaaacttggtcatcagggaatcccatcatgacttttctcagcaatttcacagtaactgagggtaagtatgtggttttccaagtttgcttgattaaaaattaaatttagtttctcatgcaaatatattattaaaataaaacatacaacagaaaatttatgctatatgtgatacataatcatttacaacttggctggtatgatgtatttggcatttataaagaaagtcctgaaatcctagggtaccatgttgaagcagaggaacaaagagaagcttctgtggtctggattttgctctggccttgcctcctcggacaagcaattgatgtctgtgtgtctctgtttccttggctgttcactctgtcaactcatgaagcttcttgtagcattaacatgccatgtctgaagaattctggcaaatacttaaatgatccctctcttcttaaaaaagtgagatgagtagatgcatgtatacaagtgagtttcttatagcacttggtcactgctccctaagaagaagctctttctttctttctttctttttttttttttgtgtctcactctgtcacccagctggagtacagtggcgtgatctcggctcactgcaacctccgcctcctgggttcaagcgattctcctgcctcagcctcctgagtagctgggattacagggatgtgccaccatgcccggctatttttttttttttttttgtatttttagtagagacagggtttcaccatgttggtcaggctggtctcgaactcctgacctttgatctgcccacctcggcctcccaaagtgctgggattacaggtgtgagccaccacacccagccagaagaaactctttctaaagtaaatgttcttaaaacatacaggccttagagagagtagaccagtaaccagaaaataccacagaacctggcattttggtttattgtcatataaattatttaagttattcccaggggagtaaggtatgactttatttagtgatttatgggttgaatggtgtgaaagaaactatcctagccaggttgtaatatcaaattttgttttcgcagtcagtaatgatctaaacctttattacacaaatttcttattttccttactttgcagatgtaaaaataaaagatttgatgaagaatatcaccaagttgactgaggagcttcgctcttccatccaaatctcgaatgagactatccatagcattctagaagcaaatatttcccactccaaggtgtggtgctgtttcttgtctgtctgttttgctcatggaaggagccttagcctgaagtcactggcactgtgttgtcctttcttccttcttgccttcctctcctttggctagtgtagtgggttgctgcacaaatgatataattggaggcagaaaggaaacaagagaacaagcaaggaaccaaagggtgtcattgtcccatgccaaaatcttagggtttttaattccataatattttctttatttggagttagaacaaagttggtgattatttattctgttgatttccagccctgatgcatgacacctgggaagggtctcggcttgattcagcaggtgttgcaaaattcttaaaatacccaaaaccaaaaacagctaaaaatatcttaagaatcaactatgacttcctctgagtggagagtgactgggcacagtctgactatgtgctaccgtagtgaatcactgtgaacgcaaatgagtaatggcaggctgtgtcatctccaagctgaaaaatgtgataaaacaatcaaagagctactgcaacaaaccaagggatgagtaacacatacgggccacatggggtatggtttctctgtggaaaaggggaacggggacatctcatgttttccacagcagatatcacctggatccttagcaggagattttctgagacagctttcagcacttctagttggggttttatcttcctgtacagagaaccttccagaagtagtaaccgtggagctgactcgtaagtgaacgttgcaattgaccatcaactgggccccaacacacgtttaatatcatgtcaattctggttaattggggcttattgcaagcttgacgggtggactaatgaagaattaatctaaattaaaaagagattagaagctgggaaaccaaaattcaaatgacagtgtcaccaagttacttataataaggcacttagtatttatcttcaaggaaaaatgtcaaattcagcttattaaacatgcaagagccaaggaaagcagggggcagtgctgaaattgtctcttccctacctcgcatgatgccttatagagaaacaatgaagatttttggtttaaaatctttagttattgaaacgagtaataggggaaagaagcagtggaaggagtaatcggagcagctacctgggaatgttttaagaccagggtcagattagctaacttctggggtccctttcaaattcagttttatgatactttttgggtttgggctcaactgtttttgatgaccactgcctgatgaaacaagtggccactgggtgtcactgctgttctattatgggagggctgtgcacagagaaggctcctgtggtaatgtggtattgtcttgtgtagatggttctgtagtgctttttttgcactctgtgtatctttctctacctctttgtcagtatgaatcattatgatcgcctaaacagctggacagttaagtaattgggaggagtatttaaaaagttgcattcttgcgtttcaaataagtaatgagattatttgctttgatggttaagtatatccataaatgcacatgtatctacagatcctaggcaaggaattaacattaggttaggaggtgacactttggatacttgttttttctagattgtcaggtttttagcagcaccatattatttctagtatccttttcttatctttcttcctgggtttctctaccatagctttagtcagtttgcaaataatcacatcagattcttagtccaggctgttggtggcatgcagggaatactcttcagtggtgctaaagccctggcaaaattgcagaaatcttcattcattcatttcttcctttattcacttaggaggtttctgcatgacaggcatggtcccaaaaacttgggctcaaagcccgtgctccaagggagccaatgttctgtgggggatgacacagtaaatatgcaaacaaaagaaggtcagtgttaagagaccagaaagttctatcatgcaaatagaacacaacaatgaggacaggtggtccctggaagcctccctgaatcggtgaagatggatgtcagactggaatgatgatctgcatatgaagagctatatgagagtcacagagctggggcatttctgtcaaaagaccagagacaggagtgagcagaaggaggcaaatgcagcagatgcatggataccatctcatttttctttcctgccctcttccctggctgcagagaacctgccatgggcacccacccatgggaatttcctttttcttgcagagctctattctctaatatcagcatcacccaattaaaaccacaaatcacaggggcttcctggacactggagcccatctagcccagccttctgtcctgggtttgcatcctgtccacctgccctgtgaagcacccatccacttcatgctgtgttcctatgttttaggcacatgttcaaatcaacaatgacttccttctttgtgttgggccaaatttttattcttttaaaattagcaatgaggccaaagtgtcaggacccaaatagattgagagagcaatcaaaagtcggccctctgtccctttattttctgtggtaaacaattaggcagagttcagaggacttttgcttggaagatgaatattttttcacagtcctcagtggattcattctccccgcgccacaaatcttaaggaggaagggagagggcattccctgaaagttccaatctcttctgggaggctccttcaaatggaaaggtattctgaattttttttctttctgtttcttttgagcagaaatgattgagtttggtgaatctggtcaaatttccttatctcacttggggccggtcctgggggctggttctgtcggttgcgacattaacagagctgctgggcataatttatggagagggagagattccttttaggagtttggaaacattacacattccacttgttttaatacatgaagtttgtttcctggaaagctccaacagatagttcttggtgaaactcatttcagagcagacactggtcaaaatttgctcattcttttttttttttctttctctgaagacaaaaagtaattaatgtgtgactagagttatgggtttctgggatcatgagaagtttggcctgaagtttcctggaagacaccatctgtcatgtgcagagtctcattctagagaaagtccttcctaggccttagactgcttgtctggctctgtcaccacatcaggagattggggtttgtggtccttgtaatccaggattcacagaatgaagtgcacacacccatccaccaccatctcattctctggtgttcttagagtagggcttttctctttgatttgtttgatttgttgtcctaccagagtattctcagtaaatgtggtaggttctcattaaacattcactaaaataaagtgaaattccagctactctccttccattaagtcagctagcgtttcttaggtttatgaaagccacgttaccttatttgctcattaggaattctgagaaatgagtattgtgctaagggcatttgtgtctcatttaactccctctgagcagggcatttctcttctttcacagatgaatgtgatgctgtggaagtcacagctgggagagggcctgaaatcaaacccacgtctttgaacttgaactgtgttattcttccatcacatgatgttattgcttcaatttgttacaaattaatagttctaagaaaattactgcttgccgatgggtttcctcttctcctacttgcacttatgtaaatatttttaaaccttaattccccaattggcattgatctctgcaaaaatgcttcttgctaattttggcaaaatattttttcctttttatttttaaaaattaaacttttattttaggcttaggggtgcatatgctggtttgttatataggtaaactcgtgtcagggggtttgtagtacagattatttcatcacccaggtattaagcctagtatccaatagttattttttctgattctctccctccttccaacctccaccctcaaataggccccagtgtgctttgttcccctctttgtagccatgtgttctcattatttagctccaacttatatgtgagaatttgcagtatttcattttctgttcctgtgttcatttgctgacgataatggcctccagctccatccatgtccctccaaaggacatgaccttgttctttttatggctgcatagtattccatggtgtatatgtaccatattttctttgtccagtttgcccttgatgggcatttaggttggtttcatgtccttgctattgtgaatagtgctgcaatgaacatacatgtgtaggtatcctcatggtagaatgatttatattcctttgggtatacagccagtaatgggtcaaatggtagttctctttctagttctgtgaggaatcgccacactggtttccacaatggttgaactaatttacattctcaccaggagtgtataaatgttcccttttctctgcaacctcatcagaatcggttacttttttgactttttagtaataatcattctaattggtgtgagatggcatctcattgtggttttgatttgcatgtctctaatgatcagtaatattgagatttttttcatatgcttgttggctgcatgtatgttttcttctgaaaagtgtctgttcatgtcctttgcccactttttaatgaggttgtttgtttttttcttgtaaattttttttaagttctttatagatactggatattagacctttgtcagatgcatattttgcaaaacctcccgttctgtagattgtctgtatactctgttgatagtttcttttgctgtgcgtaagctttttagtttaattaggtcccatttttcaatttttgcttttcttgagtttgcttctggcatcttcatcatgaagtctttgcccattcctatgtccagaatagtattacctaggttgtcttccagggtttttatagttttgggttttacatttaaatctttaacccatcttgagttgatttttgtatagcataaggaagaagcccagtttcaatcttctgcacatggctagccagttatctcagcaccatttattgaatagggaatctttccctattgcttgtttttgtcaggtttgtcgaagatcagatagttataggtttacggccttatttctggactctattttctattagttccataggtctatgtgtctgtttttgtgccagtaccatgctgttttggttaattggatattctttcaaggtgttttttgatatcaaattctgatactttaatttgcaaagtatcatttttttctctcaacttcatcagtcaccaaaagatgagagtatcttttatattttcatccaagtcgttagtgcagaaagattaccatggcataggaaggtataacctaacacctatttatttgtttgggctcttaaatcagttgcaacatgtctgtctggggtgtcttggtaatttattagcctaataatttcatcattaaaagaaaatgactttatattgacatggctcattgatcatgactgtatcgacatggtttccagcaattttctttttcttcaagggcttacacataatcttttggataatccatgattagaattcttcaagaattgacattattatctattagtaatttctaaagtctactttacaaaataaaacctggatagtttttatttccatcacgacttcttaaaaactgtagatagtagaactgtcactctttctgaaggcatgaagagggaacagggagagagggaactggaaatggagacagagaagttggtggagaaggtggccagacagcagccatggcctcactgaagaactacagccaggctgaatggtagttctctttaggttctttgagaaatccccacactgctttctgcagtggctgaactaatttacattcccaccaacagtgtataaatgttccctttttctacaatctcacaaacatcttttattttttgactttttaataatagcctttctgactggtgtgagatagaatctccttgtggttttgacttgcatttctctaatgatcagcgatggaacaatagacatgggggactactagagggggactaccagatggggaggatgagagggggaaaaagagttgaaaaaccacctattgggcactatgctcactacctgggtgatgtgatggttcatacaccaaacctcagcaacacacaatttacccaggcaacaaacctgcatgtactccgtaaacctaaaataaaatttgagaaaaaaaggaactgcagccaaatgatgcctgccttactgggcaaggacaccattggcactgccctagaggccagctgccaagatgcttatccacagatctcctaggcatcctgttttacccttccagtgtgaagatgtttctctttaggaatatgaaaaccaagaaggaattaattagttctcttaagtgtaatcatcatccttaatcaataaacccacctaattcttattcatcttttcccttaaatatcctgtaagtcaaaactgtgcttttgctggcagtgactgataggcttcttagtagtaacgtcatttttgagcacttatatacactacccctgagctgaatgctttacatctcatttaattctcccaacaaccctttggagccctttgtcttttattgtcatccctggttgtatagacaaagaaactgaagtgtgtagatgttaagcagctttcaggaagtcagacggtaagagctggagtcaggatccaccaccttgccacagtgtggcttcagtccttctggccaggttctcgcagccttctcctgccctccgatgctcatctcttgtacttgcctctttatcctgtgagcagctctgagctcaaatgggtccccaatggcagagagccacactgctcctctctgaagggcgtagggcctatttttaaatacctgcgctcctttcattgtcttgtcttacaaattctaacttggcagactctctctccccatcatctccagttcccttgaatcactgtccgtgtttcccttccggtcacaactgagctgagggcagcctttcctcccatgctttcccaacctctgagtctacaatgagcagctgggcaacatggaggccatctctggtgctctcctctgaatgcgattcgggtttcagcagatgtccaataaacaaagctcttgctaaaaatgcaaatgcctctcctaaggatcattgtcatttttaaaccacataaatactcagataattatctaagtggccaagtgtgtatgagccaggctcgcagggcagagaggcatcgccctggatcctaagcccccttacagctttccaaaccaaacactgacacacaggaaaatcagcaggaacttggcattctgtttctgataatttgcagcattagcctatgcaaagcccgagataaaaggtgcctgttttactttgaatagaaatcacacaagatatttccaatcaagcacaactcagtgttgtctttgcttttctaatcttcctcccctcctacctactctcaaacaggaacaacgaacgaacgcaatacaatctttaaaagataaatagtaatatttggaaaaccacaggaaaggagagggagcaaatgtgctgctggggctgtggcttctgtgcattgtgactgcggagcttccacatgacagggtgtgggatcctctctatttggtaaaaagagatgtaaaaaatttcaggacaaatattttttgtcctgggactagactctaaaaaacgtattaaatatgatcttgcatggggaccactgtgtgacatgctagaaagtaattaatacaaatgttctatgacaaatgcagaaaggactctcattgggccagcttgggttgatgctcatgaaaagccagggtgattcccctgaattgggggtttggatgaggtccattttgagggatagtttcatgcaaaagcctattttgtgggactgatcaaagagaggctcctcttgtgaaagcaaagggtagatgcctatattctgctcccaacctcctcctgagagcttcccctctgcccagagacagcatgattgaaaacagtggcattaaggaaaacttcaccaatgtgtgtctgcacaatgccagccctatatgaaaaaaggtctttttggtaagttagtgatgaaaatacttaatatcctttcttaaagactcaaaatgcacactagcatactagagtatcatagccattggtgatgattaattttgtgtgtcaacttggttaggctgcagtactcagatatttgttcaaacattattctaaatgtccctatgcgggtattttttagatgacattaacagttaaatcagtagactttgagtaaagaagattactcgtcataatgtgagtcagccttatccaatcagttgaaggcaaaaaaagtaagaaagtcccccaaggaagagtaagttccatctccaggtagtccgcagatgtgagctgcaatgtcagctccttcctaggtcccaaatccgctggcccaccctgcagattttgggcttgccagcccccacatttgcatgagccaattccttaaaataaatctctctcaatgtatgtatgctatgtgtcacttaatgactaggattcattctgagaaatgcatcattaggtgatatcatcattatgtgaacattatagtgtatacttacacaaacctagctggtacagcctgttacacacctaggctatatggtatggcctgttgctcctaggctacaaacctgtacagcaggttactctactgaatactgtgggcaattgtaacatcgtggtaagtatttctatatcaaaacatagaaaacacaagaacgtattttactatacctgttctaaacatagaaaaggtactgaaaaatatggtataaaagataaataaaatggtatgcctgtatggggcacttggcatgaataaagctacaggactgaagttgctctgggtgagtcagtgagtgagtggcaagcggatgtgcaggcctaggacatgcctgtacaccactgtagactcaataaacattgtgtgtttctacatttataaaaaaaaatttctttcttcaatcatagattaaccttagcttactgtaactttttttactttataaactttatttatttatttatttttttaagacagagtcttgctctgttgcccaggctggagtgcagtggcacaatctcggctcactgtgagctccacctccttggttcaagcaattcccctgcctcagtctcccaagcagctgggattacaggtgtacgccaccatacccaactaattttttttgtattttaagtagagacagggtttcaccatgttgaccagactggtctcaaactcctgacctcaggcaatccgcctgccttagcctcccaaagtactgggattataggtgtgagcaactgcaccctgccgaacctttaaaattttaaaaaacttttggactcttcagtgataacatttatattaaaacacaaatacattgcacagctgtacaattgttttcctttgtgtccttattctataagcttttttctattttaagtttttttacttttaacttttaaaatcgtatttttaaaaattaagacacaaacacacagtctagtctaggcctacatgaggtcaggatcatgaataccactgtcttccacttccacagcttgtcccactgggcggtcttcaggggcaataacatgcgtagagctgtcgtctcctgtgataacaatgccttcttctggatacctcctgagggacttgcctgtggctgttttacagttaaattttttttaataactagaaagagtatactctaaaataatgataatatagtatagttagtacataaaccagtaatatagtcatttattatccttgtcactattatgtactgtacataattgtgtgtgtgatacttttgctatgaatgggagtgcagcagttttgtttacaccggcactgccacaaacacttgaataatacgccaggctacaacactacaatggctgatgtcactagaagataggaattttttcatctccattataatcatatttttcatctccattataatcttatgggactaccaccgtatatgtggtttgtcatcatgtaccagatagcgatattttggtcaacaatggaccccatataggatggtggtcccatgagattatactactgtatttttactgtacctttttactgtaccttttctatgtttagatatgttcagccacacaaatacttaccactgtgtgacaactgcctacaggattcagtacagtgacacgctgtacaggtttgtagtctaggagcaatagaccataccctatagccaaggtatgtaggaggctgtatcatctaggatgctgtaagtgcacactatgatgttcacacaattaaacaattacccaatggtgcatttcccaaatgtatccttgtcattatgagacacatgactgcacacacacacacacacacacacacacacacattctcttggttctgtttctctggaggaccctgactactacaccattatttatatcttactgtattttgggaacattttatggcatctgttgagttctccgtgctcttcttcagagagcatggttcctattcacataggttcatgcacttcggcctcagttggcctgaatgtttcacagcaatcatacccatcaggagcaaaaacatggagcaggaagtatggtttttgttttattttgctttgtaatttggcatatcacaaatgtccttaactgaaaagcatacccaaatgaagaggtgtgtcaaagcctttaattgcgatgcatgatagtaataaactagagactaatataagttgtcctcagtgcctccttctgagtgtacttgctttaaaaaaatatataacaagcttggtaatcctgttttcaatctaaaaatgaaggagcaaaaaatatcagcttcacactgatgacggtgaaaagtggaagctgataaactgaaagccaagggtaagacttaatatcagacaaacgagacacagatgctaactacgggggtggcatcggagggtgggggcttggtgggcattcagagtgagcctcgtggagagcagagggacagagtttcagaagggtgatccaaagacctcaagcgagggcaaattttataagaagtcagagaatgatgtgcgcacttcagaaacatttccatcaaaatgttgagaatcgaaccccagtttgggctccccgcatctgcaggtcagtcccgggagttgggaaatccactcttgggcgactccctgccgatgaagctccggtctgaggtggtgaagcacatgacgtcataggtatactcacctctaatctctgtgctttgaaacaggttctcttcagtgccctcaccgtagctctgtctggaaagtgtgatcaggaaatccttcatctcctgctgacatttcccaaaggggaaaaatcttggatcgcagcggaggaactctgtagcctgccagggtcaaaagtgtattctctgattgtgttgctgagtcgaaacttggatgtgcgagctttcatttacaaggtatggagagcatgctggctgggggcagtcctctgcaggactctgctgtggtggctgcagataagtacagtagtcctaggggtgcggcagtgggagatcagcacctggccactctgcagtggtctccaccagcctctggtgtcacctgtttgctgaatccaaggtggggctcaagaagactttgttgtaataaagggatgttcaggagacccttcagggggtccttggaaataagtgtcagggcattgggacagagttggtggtgatctccatgctcattgtggaaggacccactgcaaaaacacagcaccgcttcctaatgccaggtgttctctcctctgtaagggccacctccctggagcatgtttgaggaggctgggattgtgcatggtccactcctgagcggcccgagttaggtgctgctccctgcacggtggccctatctgtcagcgggaagcatccagctctgccagggcctgccctggagagaatgtggaggggtgggcagcacaggaagcccaatcccctgtgtgtgccggctctgacaagcatgatcctctgacaagcagcagtgtgagggcagggagggactggaggaagctaaagatgatgaagtctgcaggagagagtggagagtgggaagtgaggaggagctggggcaagcccaggcccagcactttccggacgggcccagaacccatgtaggggcaacctagctccaaaccacagctcactgctctcaagctgccccttccagaagcttctcctccttctggcctctactgtttgaatctttacttaagtttccagaagcttcccctccttctggcctctactgtttgaatctttacttaagtttccagaagcttcccctcttacccttaggcactgatcttgctccaagtaccattgttttccctttagggaagtatttcacaacctctgggttcattagagaggctgcagggtttgtactatggtaaggtggctgtaggcaccctgagtttgggtgaacagttttatagtcagcaaagggtagatttgccatttcagccacgcatgatttccttagtttctattacttcaagagtccagggagtaaatgttggaatgaacacacacacacccacacacacacactccaagaacaaatatttgttttcagaatgattacattttaaacccataaggaggagaataaacatttcttgcatccccataatttgcaaacccacctctatcttggtggaattcgtatttttcgctaacatgcttatggtttagctctgcatttgctcaccacagcctctcttccaactttacagtttgccttttgggaaacagagctcccattggcacgatgctactttagtggccactttgttatgtgcacaaaggtccccgatttgaagtaagtgcttgtagaggcccacataattactgtgacaagggccatcatctgtaccaagatttctttgaaggataagatagtgggttggattcagtctcccagacacaatgaaaatgacatcatcattaataacaacagctcttatttatcaggtaccttctatatgaagggctctatgaaagttgattaaatacaagatatggctcaggatgttagggcagcccgacctccatgtgagggccacgtgcaggtgcagctcattcccaagtccatgtactttctgattcactcagctgacaatgaatttctgaagccttcagcaaagcacagtttgctatattaattcggcacatcaatctggtctcttggagctgcgctggatccctgtcactccccaccataagtcaggggccagtcactgtgtgccacttttttttaaagggcagctgcaattagaaagatgagtagaagaagtgacaaaagctacacaccatttctcctgctagagttgtctctatagtatgaatggacagaattctgtcattataagcagagtgcctctgtgaaggatggagctgtgatcccggagccctgaaagtcatctgcagagctaacagctaaaacactaatgagcaaaaataagaagcagtgacaactgggttcctctgccccagcctggaaaacagaaaattcaatatccaaatgacagacagtggaaattagctgtgattttccctgctctgtgcgaagagctggcatttcctcatttatccattcatccaacaaatatttattgagcaactaatatttcctgttgctattttatgcccagtagctacatgaaagatcaagacagaagaaaagccttgcctccagtgtagaactgagaatatgaaaaaaaaaaatcatgtaaaatacagagcatttcagttggtgatagcataagtaagcttcagagggcactgacatttttaaagaatccaggttaaattcacatccctgaacctttctaactgttagacttcaggaagacttttaatctcctcaagccccagttttctcatccacaaaacgaacagtataatgcacatccccaaggtattaggaggattgagatgatgtgtgaatgctatgaatactgtaaagcagtagataaatgtaaattgcttcacatataaggactgctcatattttgagcctcttctcaaatttccaccttggtcacctcaaagatacaaagaaatatttggcaaatgatttgaattttaatgatagatcacatttgtttctggtttacattttaacaatgctagtgcaattcagtgtgctccaaaacacatgagctatatatactctaatgaagataactttcatatagtaccgcaaaggcgtctctgaagttcaagagagaataaaatcagataaacaagttttcacagctcaaaagatgcttctgagtgtaaaaatacagtgttggttatttcatgttgttttgtttttgttttgtcctttagactctgatgccttctgaagcaaatggcttgctcaactccttgctggatatagtttccagcctcagcgccttgcttgccaaagcccagcacgtctttgagtatcttcctgagtttcttcacacatttaaaatcactgccttgctagaaaccctggactttcaacaggtgtgtgtttcatctttgtccctagggaaatattcaaatttgccccttctttgtatttgcccctttttgcctttatcttcccacatctaaaatttgcattagacagcaaaatacaggaatgaaagtaccttttcatatctctggaagcaacagcataacatagaataaggcctggcatctctctaaaaactgcatgaaactgatattgttgatctacattccaccagtgtggagattgggatagtacatgcattatctataaagtaagaaattactaactcagttattgcacagatgagatttcaagggcctgtttaacttaattcagagagcaaattgctttcaaaaaccttaaaacatatatttacttataaataattggcttacaagttacagatcatttactgcaaatgcaaacacaaacttgatttagtttagtgacttgatgttaggttttgtttgaactctttttgcctgggatggaactgactgggcacgaatgaggaggagtgtggaaattttagggttggacgtgtaggatgaggagcaagataacaatgttctcagaactgccttggagacagaatgtaagtccatcatgtgatagataatttgtatagctataaaatatctggatatcttggtagcatagacatacattaagactagtaattagtctgaattagtgatattttatggattaataatttattactggacaaatagtgtaaggacttatgtgtgtgtgtgtatgtgtgtgtgtgtgtgtgtgtgtaggtatgacatttccctcttctaccaggtatgttggccagaaaagttaccgtagtgtttcaaatggtatcccaaggacagaaaactctaaagcagacattccattcttttgacttgttgaatatcttgtacattcagtggaggaaggaactagactttcagaagtgtgtgaaggaattgttttaagtcactatgtaattgcaatttagttttcttattttctcaggtttcacaaaatgtccaggccagaagttcagcttttggttctttccagtttgtgatgaagatggtttgcaaggaccaagcatcattccttagcgattctaatatgtttattaatttgcccagagttaaggaactcttggaagatgacaaagaaaaattcaacattcctgaagattcaagtaagacagtagtaatatatatatatgtgtttagattcgtttgtatcttgataattggccttaaattatagtaagtattctgtctgtgtataaggttgctatatactggcatagaatcttctgcttccacctccccaaatgctggcatggcagctgactttgaacggttctagtgcctttgagcacagacaaatcctctcacctgagtcactaaggaactgtgtcaccaaggaaatgtctaaaacacctgaaaccccagccccattggtttcccaggctaaccagtattggtgagggtccaggcataaagaccatgagcactgctttggtccatgcaaatggctatattataataacgaagagaacttgtctgtggccacctccaaatttgctctctatgaagctcaggtacaagtgaatatgcatgataggtacaaacgaatatgtcacgatgggtacaaatgaatatgccacgataggtacaaatgaatatgtcacgataggtacaaatgaatatgtcatgataggtacaaatgaatgcaaattaatacataattttttggccccaatttaagtgaagatgtttttattagaaaggcagaataaacatgctggtgaggttttggagtttagacggttcagctccatcagttgtgcatttttggacacattgttttatgtgtctgcatcatgttggtttcatttataacgtagaaacagtagcacctggctcataagcttattgtgagatgcaatggatatgaggagtgttggtgccttagcataagggtataaatgtatcctagtgtattcgttttctatgctgcatgacaatcattgcacacttaatggcataagaaaacacacatttgtcatctcataatttctgtaggtcacatgtcgggatttctgagttaacatttttagttttgtacatatcgtgactatacttttttctgcaataaaattgctcctgttcatattaagcttgcaatgtaaagagtaggtcattaaatttcagtaagaacaacttctataattaatggcttaaaaatgtattatgtagtcatattcttttttttttttttgagacggagtcttgccctatcgcccaggctggagtgcagtggcttgatctcggctcaccacaagctccgcctcccaggttcacgccattctcctgcctcagcctcccgagtagctgggactacaggtgcctgccaccacgccggctatttttttgtatttttagtagagacggggtttcaccgtgttatccaggatggtctcgatctcctgacctcgtgatctgcctgcctcggcctcccaaagtgctgggattacaggcgtgagccactgtgcctggcctatgtagtcatattcttcatttatactttggggaaagtatttctatcaactttattgtcaaataatttttttcctttcaaatgggaagtttgggaagatgaaagtaacatttaaaacaaccacaacaatcataccttgagtatttataaatcatagtatcaaatctaagataatattttcattttattcttataaagctaaaataatattttcattttaaatgttctcttgatgagtaaagaaatagttatactgaagtattcctcactagcttaaaaccttataagatttagttcctactcattatggtgatgaaatctctaccctcatcaggtgaccattgatttagacaatttagttaagtaaatctttaattgaaatcaactagcatcacaagactcatgagagccaccaagagggattaagtacttgcgtgaaaataaggcaatttaatatgtcaaaattcgtaagtttgatggttctgcacgggctcattaaagacagttcagtagtaacttgtaaagctaacttcataaaaaaagctcagttccggtctcaatattgtgactgttgaaatgagaattttcttgatgaaaaaccagatttattttttgaattgtcattttcattttcaagtgtccatgtcattatttaatactctttttgattacttagtttgaaaatgtaagtcattctttcctgcctttgaagtcacttaagtgaacatagcatgaagtttcttatgagttgagagctgctgaaaactataacagggaaaaaaaatcttattttacttcctgtcttggtttatttggtgttgctataaaggaatatcagacactgggtaatttgtaaagaaagaggtttgtttggctcacagttctgcagactatacaagaagcatggcaccagcatctgcttctggtgaggcctcaggctgtttccactcatggcagaaattgaaggggagatgccatgtgcagagatcacaggacaagagaggaagcaagaggggggaggagggagatgccaggctgttttatttacttatttttaaacaagcagctctcttgggaactaatagagtgagaactacactcattactgtgacaatggcaccgaaacattcatgagggatctgcccccaagatctaaagacttcttgttaggctccacctccaacactggggatcaaatttcaacttgaggtttgggaggacagatattcaaactatagcactcccaaagttcagagtggtgtcagaaaaaaatatggctgtcattgaaaatgaggcatcctggatatgtgaatgaatttccctattaacctaggcatcgtgtatcattagcaactttttttttctttctaattgcaacagcaccgttttgcttgaagctttatcaggaaattctacaattgccaaatggtgctttggtgtggaccttcctaaaacccatattgcatggaaaaatactatacacaccaaacactccagaaattaacaaggtcattcaaaaggtaagttaaaataaatgagaatcatatagaccatacatacactaaatcaggaaggaatctttaaaaatgtctgacataattattatgcgccttggattatgtagaaggctcttgttttgaatctacttcattttagcctgagtgtttttcctgtcattgttattgttaaatctggatttgctgactccttcccttagaggacactttgggggttggggttgttatttagaataattaatgcagtgaacttacagaactctaatatgaaaagtcaaggacagtgagacagagaggaggactgtttggagtaattccaggaaaacttcgagaacaaatgctaatctgttttgcttggtgcatccaacaattacgaaagaatcagacatgatacatacaaactgatgtattagcagttagttagtattttggttagtgatgtttctgaattcactgtaaggctttgcttcaccctgtggagaataaggtgagatgaagacaccaaagcagggtgtatccaggaggaattgagacactatgtggctctgcttattttcctttccttacattgtttaacctctctaatctatttactgcaggatttgttattattaatatttgcactttctttttaaataattgtgttgtattttcctggagtcttttcttgcctactagggggcctgtaagcctacaggcacctggaaaggggacattttaccaaggacacaggaataatttggtcttattgtcaaacacagaagagaagatacctgcactattcatgataagcttccaagcctcaaatagcattaaaaatttggaaactgtgatcatatggcatgggatcatatgagcagttaagtcatttttgatcaaacttgccttcatgagtttcatgcttctgacccatggttgctgtgtgaggtcacagcactgtttcctgtaagttccctttcccactttgccacctacctcaggggctgcatttacctctgcctactctgaatggtatttaaactttaaaacatttatataatttatttaatttttgttttgttttgttttttggagagacagactctggctctgtcacccaggctggagtgcagtggtgcaatcatagctcactgcttggctgaagcagttctcctgcctcagtctcccgaagtgctgagattacaggtgtgtgcccccacgccctgctaactttttagtttttttttttttttgtagaggcatagtcttgtctacttcctaaaaaaaaatcttgaaagtgtcctttcagaggggtatttgccaaaagtctgcactctcacatggaacgacattgatctccgtatatcctcagtgtgagctgttctgttgggcaggaactctggcctcacagctgccatcccaggactggagcctctgcgccattactcgaatttccttagtgtagtaagctttttagggttttggatatttaaggaatttcacagaaaatggctccatatcacagctctattttaaattcaaaatttaaaaataggccatgactttaaaaaaagatgatatgctatattattatgttaatattattaatatatgactatagcattgcatattatgatgtattctgcagtataacaattagtgtgatgatctctgcttttaaagagctcaccctattgtggggaagagaaggcaaatagctgaagaaataagttagatatactatgctataaagaccattcagtgcagcagaggcacaggctgtggggggcagctggtctccctggaaagaaagattgggcaaagcacttggaaggatgggttttctaagcccctgtgaggtggagacgggaggattgtgggcctggacagaggtgtggggaggtgccaagccccacatgtgtgttctgagaatgatgagaatttttgaaaaatcaccaaagatttcactggtttttgcttagcccctttttagatattgcaggcagtattgagagctgatgtcttttttacttatttaaaatggctagcaactttgcatgcaggtatcctggttttgcacttgtaaagctgattttatggcattgtacctgggatgaattatcctagcagtcagccatggctatttggttttatgaaaattgtttctagtcattagactcatggtctaaagtcccacagagctgggagacgcttgtaggtttgcctcttgggctatgcgaagcaatattatctacagtgttggagtggcccatgctataaattatttaagacgtggtctttttctctccattacttcttgttaggtggaaccatctgaagttgccatttttgcaggaaaaaaaatctataaaagttggtaatttcatttggtttaacttgtaatagcacaggtgacacccagaagcatgatgctgtggtaagaaacgtgtgtatgtgtgttggaaggctggattttggtcccccttttcctaactctctgtgaccttgggcttattgcattctctttgaaggactcttctcctctatctgtgaaatgaaagacttgagtagatccgtgattttcagtcatctgggagacggctcttcatgggggatgcatcagaattacccacggacccttagtaaggccttccgcctctgggctctgatatccccatccctgaacacttgtacccctcacacccatccatatccttccacagagctgtgtgcacctccatctatcagccttaaagacagtggaggtcaagcattttcatgaactggaaaaaaaatgatggccaaaacttctagagagtgttaaaaggtaaacttagggacattaaaatttcaacaagtttatttgagcattcggttattcatgaattaggcaatgccagacaattcaaccctccactgactatgttgggatgtgggatgtggggtaatagaagaagcttgtatgaagtgtttgctgcagcaacagggagaaaatatattcgttaaagtcaaaagtccctagttggaggttagttggaggtttctgattggttaattttaacttttgttttactgtttgcattgatttgggttttggtttgcctacataggaactcaaggtgctatagctgtcttagcctaacagcctcctgatcaactattttaacaggagttaatttaactcatactctaagggtgtcagactcagtatttgcaaagaaattgatgctatttccatgtcattagtcaagagattccaatgtattagtatgctctttttattttataggtcagagtcgtgttcagttttggccctaggctgatgaaaaattgaagaacaatgtgtagacacaatgtgagcttgaagggaggctatgaaagaaaaacagaaaaaagaattatattgttttcccaagaataagtagcatgcctgaaatgatacttcagtgagaatcaccaggcacattctaggccactggtgcacaaagtaggtttagtctgggcttctaagggacgtataagcccatgaaaacagaccgtcttattttcatctagctctctccctttggctaaaggacagagctttgaactgtcacactcagtgtcctcctttgtgaaactgggctaaatcataactctcagtgccatttggaagtggaaaaaataccagaaataatattcagaaaatagtaaaccaatgggatctcctcccctacaagtgttattcccagaaatgcattctgccattgttgcctctggggagtggggaagacagatgtcacctcagaaagaggaaagagatggtggaggccagtggttcaaaccggggtggggttggagaaattttacccaactgggcacatgtgacagtatctgaagatatttttagtgtcacaagtaggaggcgctgctggcatctggaggctggaggccagggatgctgctatacatcctacaatgcacaggaaagcccccacccccaaacaaataatgatctggcttacaatgttagtggtgctgaggttgagaaaccccagcataaaggggtatataatgccagacgggagcgggtgggagcccctgggaagagaaggatgaaagtagaggaagctggtggtcaggtgggcatcctggcttctcctctactggtgatggtcccaaacaggggctgtgggatgatggaggagctgcaagctgagggccttggccctacccatgtgtcttgggggatagtccctgtgtaggccggccctgagctagcatgtggtcctagcagtgtggctgagcagaggaaggatacctgaattagtgtctctgagcatggagtagaagggagccagatttccctgacatccatgtcctgagccagtgtgtcaagtggaggccttggggacctgctatgagccggctgccgtgagagcgaggtggcctcagcaccaagctggcctaggccaggctggcagaggagatggctgaggctcagaaagcaggagccgaggtgagaaggaagcagcaagggagaaggcagtgccagaccccaaggttccaggtaagatgtgggctgggcaggccaggccctggcagcaccacagacaggcagacgaggcacatggctgtgggagtcctgggccctccacccctgactgtcaccaggctgcccctggagaacatcagggggtttgagcattcaccccaaagagcctgaatcactcagaggaagctgtttgaacagggagccactgtcagcaggcaattttgagactttgttctctcttcaccatccccagtgggtaaaaactggatcagctacaggaaatagagaactaccttttctttgcatccccaagcagtgaggtgtcagatatttggctttgtagcatcatctgtctgtatgcataacatcaatcaggaaacagagcaggtcccataaaatggcagccctacgttgggaacctggtgatcctctgtctggaagccgcctgcagaggagggactctgatagttatgtttgtttccaagtcttcccatgctgctcaagatggcaaagtttttcagtaaccttgtgtatcactccagacatggcagcagcccacacatacctggaatttaaatgccatacttccttgggatccagtgtgccagagacgcatgtcctcacctgaccactgtgttggagaggtccttcctcctttcaggctggcctcagcaggtggcagagatcagagagaggccaccagcggtgatccagacagccacgccatgtctctccctgttcccactctccctgtcctctcaatgcccagggcagccggtgctcctacctccagttccagctgtggggggctccagctgtctttctcttgcctttgttcctggagcttatcctccaaccttcttaagaagtatcttctctcctcaggcacccccaacaggcactgtgtgtttttgctttgtttttaaattaacatagagtaagttcggcaggctttttttcggtcgacagctctcacatttgtctggatcagtacacagaacagttccattgcccgagcccacaccaaatccctcattttgtcccttggtaatcacactgtcttcccaccctaaacccatctgttctctatcactataggtaggttttctttgtgagaatgccctataatggaatcatcatctgtaacctttgaaagtggtctcttttgctcagtacgagggctgtgattcacccaggtcattgtgtgtatcagcagttgcctcctctttattgccaagtggtattctgtggtgtggattcactgcagtttgttcgtccattcacccactaaagggcgtgtgggttttttctagtctttggcgattatcagtggagctcttaccttgcttttatcactacttgaaattatctcattgacttacaggcgtacttgtttattatttgtcgcctgctgtaatataagcttcatgaggggcaggagcttgtctgtcttcttggccaccgtccccagtgcctagaagaatgctaggaataccttcagcagtggctgttgaataagttaaagaataataattatttggctcttgtacccatttgagccaaagacattctggtgttaaatatacaagggagatagagtagactgtatgccaagccctctgcccgctgccagagccaggccttagctttgcagatatgcagtagctttgtctgagtttagcagtggtgggtgccatcaagaagattatctcccaaggtcattaatttcatttactgagcttgggccaggcaccttatgtggattatctcatgtatgcctcacaaccaccactgcaggtaggtactaatatccccattctatagctaggaaaaccaaggttgaaagaggataagttagcttgaccagggtcacacacctatcaagtggtggagctggaattcaggcccagtgtattattttgaagcctgtgatatggtttggctgtgcccccacccacatctcatcttgaattgccataatccccacgtgtcaagggcagggccaggtggagataactgaatcaccggggcagttttccccatactgttctcgtgagagtgaataagtctcatgagatctgaagattttataaatgggagttcccctgcacaagctctcttctctgctgccatgtaagacatgactttgatcctcatttatcttctgccaagattatgaggcctccctagccatatggaactgtgagtcaattaaacctctttcctttataaattacttcgtctcaggtatatctttattagcagcatgaaaacagactaatacagcctgtattagttttctcaggctgccataacacagtaccacagattgagtggcttaaacaacagaaatttattttctcaacattgtggaggctgaatgaccatgatcaaggtaatggcaggactggtttttcctggggcctctggcttgcagacagccatcttctctttgtgtcctcacatagttgtccctctgtgtgtgtgtcctaatatcctctttttataaggacatcagttatatggattagagtccaccccaatgacctcattttaacttaattgatgatttaaataggatctttaaagacctatttccaaacaaggccacattctgaaatatcgagggttaagacttcagcatatgaatttgggaagcacataattcagccagcccacaacagtgcctctttggaatgatcttttaccacttgtaaatggaaataattagagctctctatgaaacttgtgaaccctgtccttatggttttgcagctggttatggaatcacattgaaaaatagtagcccagggaggctagtttgctaattactacaggaacgtaggactgcatactaaaaacaaaaaataagtaggaagcacttggaaaccagttgcaggtcatctctcagcagccacctgtcctcgggacctatatgaattccccactgaaccttggatgctcacatgcatggcgtttgttccttgggaacgttccagagcagggtccaatctcactcatctgtgttaactacctagcacggtacaatgatgcacagtgtttgcttgtaaaaagcttgttaagctgcatttatgtatgaagatttttgttgcaaagccatttggaggaggagaagatgtgcttcgaattgctttcttaattaaaaattttccctaaaaattgagctaaacgttacttcccccttccctttggtcactagagacctcctctgtcagagaaccaacaatgtcttttttactctgacaatagtttgctctcaagttactgaagcagtaacttagacatgcctatccatgggaagcctgctaatttgtgcctgagcaaatttttgcagactaaggatggcttgcagctggtggtaggaaagctgatccataatggccaacttttagttttccctgtggtccaggtatgttctgtaaataggacttggtgctaggtatatgagccaaggactgagaaccaggaacctattggtggctatgaccaccctgtggctattgtgcagaaccctaccttacatgaggcatcaaagcattggcatccctgcctcaacctccctcatgcccttagattagcttgtgtggcttcgtacctttgccagcatcacatcccaagaggcttttttttctttttcaaaaaatatcagacggtgcttaaaactgtagcttttggtactttcagtgatcttgacatattgaagaaatctgattactttttctttttgttcttttcatggcatctgcatttttttgctgtttcctgagtgcagtgtccattttgttattagccaatgtatcagtcaaggttcaagcagaaaagagaaaactggttaagtttaatatgaataattattactataaaaaggcattagagtaatggtggattggttatcaacagtgaagagatctctaaagaatgcagcaatggcggatacagggaataactcttgcccctagagctggggcagagaacccaaggaagaaacagaactacaagtgacttccccatccaggcttgaaatccagaccctactgaagttagcacaaccatggcccttagtatggcagagaaaatcactgaggtgagtggtaattgccatgaatctgcactctagggtatctggagaagttctacacttttcaaatctgcaaggctataaaagggcatacctgaggaagtcatctaggtggacatgccacacctgcagaaatccctgggacaccactctttgggatgccatggatgttgcctatgagaaggtgccatgtgctgctggttatgcgcattgcaggagctgaggtttagagaagctagatgtgggggaatccaggagcttgctccatgggagccttttggaagcagcacactggaatctggaagagaaaatccctcttccttcactgtccctccagagccctcttctggcaaagcttaacagtgtatcaactggcaagggagaatgtctaaaaggcccaactttattattgcagaacaggcaatgaagggtgaatttcaagttgtgagaaggtaaattaataactagccggctgtaaattggtttctttgttttagactattgaagtacaaagagtttccataaagcacatgagttcttaaatgtaagttttaatttatcaaacatatattgagtagagggaagaattacttgctctaatcctgacaccgctaagagctaatgttggttgcaaacctcatttatgccttatacctacaataggggttggcaattgtcatacacgttttgcaggtaaagaaagtgagtcttaggggtaagtaaccttatcaaaagctgtcaacaggaggcagagatgggatttgaaacaaagtctgtttaactctaaggccaatgttttattttttctgttatattttactgtattctccaagtagaaattcacatgtgagtatatctatttctgcctcagaggaactgcttgtggtatgaaggagatgtggagtcccagtgacaagggcatggggaagactgcttcctatggaaggagctggccttaagctgccaaattggaatatcgggttatgatgggcagagatcagctctcagtctcatctatctggtatagtggattctgattggatctggagcaacagagcaggacagatagagagttttacatttgctcatagttccagaactctaacaccaataatttcactgttttaaatgcagattgaatcactctttattgagcacttacttctgtaaggttagaggaaccatcatgttcactgtattagtccgtcctcacactgctatgaagaaatatgggaaactgggtaatttataaaggaaagaggtttaattgactcacagtttcacatggctggggaggcctcaggaaacttacaatcatattggaaggtaccttttcacagggcagcaggagagaatgagaaatgaacaaagggagaagtcccttataaaaccatcagatttcgtaagaacttactcactatcacaagaatagcatggggaaactgcccccgttatttaattacctcccaccatgttcctctcatgacacgtggggattaggggaagtacaattcaagatgagatttgggtggggattatgggaagtacaattcaagatgagatttggttggggacacagcaaaaccatatcagacgctttcccaagtcctccctcatttacttctcacaagaaccccagggagtagacattgttaaatccattttatagattaaaaaagtagtaagaattgtgaatgtttatattcccaagtttattagatgataaacagaagctcatggcttgaatccaaatttggcagactctgcagccaatttattttcattggccatatttacagtattagttataaaataataaggatcctgtatactaaagcttctttcactatcatcagtttgggatactgggtacctaatttacctcattttaaaaaataactttgtgtagcaatgcatggcatttcacccatccccagaatcctgactgccttcacctttgggaggatgagaatgaagtaatacagtttaaagatatttatttgtttgtaagcagtagagatgggaaacagcttggccatcaacacagaatttggtgaatcagatatagactgatcttcaggagaatatcaggcaaagtgaagaataagcacaggctattgctagtgttgtcattaaacggacacaaagcctgataactaacttccatagaaataaaaattcttggttccatgataattattaaaggtgaaaaatgccagtgaagtggaagctgcccaagcctggagtctacataaacttgtacgggctggaagtgcacaggctctgcacatatgtggggctatttacatgtgcagagcaatggggaagggcactggtgggacctttaggcaggtcaaggtctttcccagggagccctacagagagaacaaaatccattgcaatccactttctgactgtaggcatcaaatcagttattggaaagcaagttgtccgtggtttggtgaggctctcagatgggtgaaagtggccaatatggaacattttatcaaaactcagcaaagttgcccagagtagaagtaattacattttacaagtggccttgtttgatataacctcctataaaatagcagttctctaagacagcagtatcagtagaactgtgaatgtactttttctgtgagactagataatatccaaaccctcagatgagcatagatgttgctcttttactgaccttggatacctgcaattttccatcattcgttttcctgtctgcttggaaatggtggtctatttgatataatcttaattaatttattagtgaaatagcacattagaacatgaggaaaaattataaacatatagttcaaaaaataataaaaaaacccaagatgtattttaaacaaatgaaaagatgctcaaacttaatagtaagagaaatgcaaatccccaaaatgagatatccacaaatgagatatcatatcaaaatgctaaaggctcacaatttgatatattttgttgtttggaggtattaggagagagtcactctcatgcattgctgttgggagtgtattcgtgtgaagtctttgaggccatgttgggaatatctatcaatactacaaagacagctattcgcacatgcaaacaaggatatttattgtgccattgtttgtaagcagtagagatgggaaacagagactggacatcaatacagaattaattgaatcagatacagactgatcttcaagagaatttcaggcaaagaaagaacgtggatagtatgagtgaagaaaaacagaataccaacataatgcatctgtttttgtaaacatatagataaactcagggggtccacattgaagaaccaataacgatgcttcttctgcatttgaaactgggcttctaggggacagagtagaacccttttgaaggcttggaatttggtacagtgcgaaaagtgtatacaagataaaatcccaggaagtcttttaagctagttatttcatgttctattgaatttgtgtgctatattgaggacatagggcattataattgagtgttagcatcctagggggctggctgtgtgccctctaaatgccctgtctagccatgtcctctgtatgggaaggtcagggcacaagtcccttttgtttcaggggcaacagaccagcctttctcttttcctcccatccgtccatccatccatccatccatttatctattcatccatccacacatccatccatctgtccatccatccatccatccatgcatccatccatctactcttgcatccatctatccatttatctatccataaaatcattcatttatctgtccatccaaccatccatccatccattcatccatccatccacacatctatctgtccattcatctatgcaatcatccacccgtctatccacccatccacccattcattcatccacacatctattcattcatccatctatccatgcatccatccatccacacatttgtctcttcattcatctatccatccatccacccacctatccacccattcattcatccacacatctattcatccatccatctagccttctatccatccatctatccatctatgcatccattcatctatccatccatccatttatctattcatccattgatctatttatccatccatccatccatccatccatccatccatccatccatccattcatccatccatctatccatccattcatccattaatttatctatccatccacacatccatccatccattcatctatttgtttatctctctgtctgtccatccatccgtccattaatctatcaatccattcatccatttatctattcatccattcacatatccatccattcatccatgtattcattcatccatccatccacacatctatctgtccattcatctatccattcatccatccatctacccatacacccattcagtcatccacacatccatccatccatccacccatccatccatccattcatccatccatccaaatctatctatccatccattcatttatctattcaaccatccacacacccatctattcatctattcattcatctgtttgtccatccatccgtccatccatccatccatccatccatccatccatccatatatccatctatccatttatccatttaaatccatccacacatccatccatccatccatccattcattcatgcatctattcatccatccatccatccatccattcatctatctgtccatccatccatccatctattcattcattcaaccatcgattcatctatctatccattcatccatcaatccattcatccatttatctattcatccattgacacatccatccatccatccatccatccatccatccatccatccatctatacattaatccatttattcatctatcctcccaaccattcattcatccatttatccaagatggggagaaagcaggctcttattagtatgaagtgcattgaggggaatcgggggatgctgtatccgtgggtttttcccttcctgattttggccaagtgaaaaagaaatatttttcttttatctactctgaatatgtctacttgtttccttttcaaatcttcaaattcctctgccccattcccctttgatgcaataagaaaaaggtctgaataaggagggaagagggtgatataactaagaaaataattgatataacaaaaaataatgaatacaacagaacaaataaacccagagctaatatcttgtgctatgacctagtcacattcttttaatattttcctctatcttaaaagaaagaatagctgcaagtaagagaggaataaatcattttctaaaattaaaagttagtaggtggtgtataaatgaaaccaaagcccaagacatttctcctaattaaataaaatggaaataagactttaatcacaggatatctgaaaatcctgacacacttttagttgggattatcagctctgagcctcattagttccctataatcttctgaaggtgattaattaaacaatatgattatgaattcatagatttaaacgtgttaaatgtatttcagtccattgctgtttttatttatttttcttgatgctcaaatgatcccaactgtggtcagtgggcacctcttcatttagaattccatgttcttttaaaaattaactttttaatttggaggcagttgtagatttacatgcatttgtaagaaaaaacatggaaagatcggtgtacccttcactgggtttcctaatggtaacatctcatgacactacctataatgcagtatcacaaacagtattctgccattgatacagttcacttgtcttccaatttcccattttactgtgtgtgtgcgtgtgtgtatttagttttatgcaggcttagcacctgtgtaggtttgtgtattcatcgccagcactgaagcagaacaaccatatcacagcagggtctcttgctttacctttcataaccacagccattaattcctacaccactcccccgcaagtccctgacccctgccagccaccaatcaggtcttcatttctataattttgtcatttctagattgttgtatacatggaattatacagcatgtaaccatttgggattgactttttaaacttagcataattccctagagtagtatccatattgtgcagatatcaggagttcattcatttttattgctgaataacattccctggtatgcatggtccacagtttctttaaccatttacacattgtgggacatctgggttgtttccagcttttggctattgtgtcttctgtttctcttttcttgccttcctgtggattacttaaacattgttgagcatcctcaccctaagacatgattttaggatacccattctaaaaaataatttattgatactgtctttgagtgtatctttttgcatgatgttcttacaaagaacgtctggctctagatattacaatacagacatacacacgtggcttaccacagttcattggcattgagattttaccacttcaaaccaggtatggaaatccacttcgacttaggtccctttaccttctctgcttttaaatatcatcatcttgactatcagaaggtgttatgatttatgttttaatcatcaaatacatttcataaaactcatggaaaacagtatggtctgttgtattcacccacatttctgctctgttgtttttttcttccttccaaatgctccaagattccgtttcatattttcattttttaaagtttttcttcatctgagaatgtctttattttatcttcattcctaaaagatatttacattagattcagaattcacaatgacaattcttttcttacgtcgtgataaatgttaggctactttcttctggctcccagggtttcagatgagagatttgctaacctttgagtgggtgttccctagaggtaacatgttatggttctctggctgctttaaagcttttactgtgttcagattttagaagtttaattatggtgtggtttaatgtagatttctctcagtttatcatattgagtgtttgctaagcttcctgagtctgtaggtttttgtatttctacaattttaggaagtttttcagccattgtttcctctcatactctttcagttccactcagtttctcctctctttcagagactctaatgacaccagtatcaaaatttttattattgtcctataggtacttgaggctctgttcactttcctatcaatctcctttctccctgttgcacagattgggtaccacacattgatcagctgtcaggttcagtggttctctcctctgccatctccattcttctactgagaccatctagtgagttcttgtatttgcgttattgcattgtccatttctggagaatccatgtggttcttttttataatttctttttattcattgagattttctgctattttgtttgcttcaagacaatttgtaattgcttgttgaagcattttttaaatgatgggtgctttaaaacactagccaggttattccaatatctgatgtgtctcaatattggcatcaattgattgcttttcttaattctagttgtcttttctttggttatttttataatgggtggttttcaattgtatcatgggtattctaagcaatataataggagactttgagccctatgtaaaaatcttttatttttgtgggtagtcattctacttaggcttaacacacagatcttggcccactttgtgtgctgtggttccaataagagtttaattttggtttatctgatgcatctgggactccctgatgctgcagtatgaaaggacagatgagatttctccagtccagctgcctccatgttggggagatggagcctccagcagttggagaagaaggggacttcttaggagcccaggtctttgttgcatcaggagccatcctgctgtggggcagccagtgtttccaggccaggtcacttgatattgtggaatactccttgccctgtctcctgggtgcttgttgtggttcctctaccctcaggggaagaacaaccatttgcctggctattcattaccagtgtcatccgagctgatccccctgttggtgttgcaggggcagcttggtttgttggaaggactcctggtccctccagagaggcagcccagctaggctgccttctgttactagaatgttagaaatgtgaggtattttggctggggattttaatgtgtgtgtacgtgtgtgtgtgtattctctatttgcagtttttaaagattttacagatcttctacatgtgttgcattaataatgttattcaacctttgcatatctgtatgcatttttggttagtatagctggcgtttactgagtatttgctatgtgccaggcctggtgccaaggtattggaatactaatttgtcttaatacttacaagagtctctatccctatttttttttttttttgagatggagtcttgctctgttgcccaggttggagcacagtggtgcaatcttggctcactgcaagctccacctcccgggttcatgccattctcctgcctcagcctcccaagtagctgggattacaggtgcctgccaccgtgcccggctaattttttgtattttttagtagagatggggtttcattgtgttagccaggatggtctcaatctcctgacctcatgagccacccgccttggcctcccagagtgctgggattacaggcgtgagccagcacgcccggcctctatccctatttttattgaatactgaagctgagagttcaaggtttttctctgtttgctgtgctggctgcttttcagctcctgtgccattgtgagggtctcctagtgaccctagggagatgtggttagactctcaaaccctccttaagcattgtccctttggcatttagactattttcagtattaaatgtaataatattgcaatagacatcttcatggaaataactttatattttatttaaactatttccttaggatagagtccttttatcttgagagagtaaagcatgtgcatttgttatggatcagtgactgcatttttctgataccaaattattttataaaagtcttatgccagtgtactctgccagtagcaataaatgaaaaaatataccaattttattctatcctcaatagtgttgggtaccattaaacaagtaagtattagttgagaatgtatctttgaggaagaaatgtgggcaagcattgattaatttggtcagtatatactggggacatatgctgtacccagcagtgactctaacactggcgagacagcagtgaacaggcaggtagcccctggatggacagagtcaaggagagaggtttcagaggactcacctgtgatgtgagagcattggaacttttcatgttattgaggaaggcattagctggcctgcaggcagatctttgctctggtggccacatcatatacagtccttgttggaagatttatcttaatataacagctgaataagagacatatccaaatatgcttcattttgcaggctaattacaccttttatattgtggacaaactaaaaactttatcagaaacactgctggaaatgtccagccttttccagagaagtggaagtggccagatgttcaaccagctgcaggtgagtggttggtctttgccaccgagggatggggagctactgctagggcatgtccgagacatcagggctgccctgtagaagattctacagagtcacatcaggcatagtggttctagttgactcatataattgacataaaactagagatgtgtgaaaactttttgtgaattttcagtattttacccatgcaaaatggtatcgttgtgagaatgattaataatttaatagtaactttttctttaaattctttattaagcttaatgctttttagattgtttgcatatttttgaattgcaggtctattcaacaatcaatgatcatttctgcatattctgtattgataacttaatatttttaaaaggaacgacttacagtttagaatggcctgactccattagagtctgacaatcattaatataaaactttaattcaggtagatcacctaataattttttgggcatttgtgtagcttcaacttaccttaactctgataggatgagaaaatatgcctgcattttaattcatgtttagtttttttattaacttaccaggtaagtagttcagagtatggactcaggagctagaatcctttgagtttgattcccggctcaacccctgccaccagttgtgtgatcttgggctagtcactgaagttctctgtaccttgagtttcttccctgagaaatgaggaagcgatagtagttatgaggtataaatgggtcaggatacatggagcccttggaataggttttgacacagagaaaatgctactgtgtgagtctgagttttccaagaagcagatgccaagacaggattacatgtgcaataattttattttgggagatagctgctgaggaaaggaagaggaagctagacaggttggaagcaaggttgtcagtggtgatgcaagtctgaccctgaggaaaggagagagggagagggtcgggtggaagcatcctggtgggccctgcaatttaatggaaatcagataaggccgagagggagtcacagagctaaagtcagttatcaaggtaggggtcccatgtcagtggagtcctgtggctcctgggagtgggcctgatgtggtggtcattggtgagagacagcccatgggaggcgtggcctcagggcaaagtgccatggattcagagtgcagcagtgggccctgccatttccgtttcctgcagttggaggtctgcgatgttcattctcacagcgaccatggccatatgtattagctagtattgtaatcttctttaatttgtttgtgtatggattaatttgttaatacagacatcagcaaacctttgcagttaatgggacagatagtattttagactagataaggtctctgctgcaactatatataatctcatgcaatattataagcaccaagtcgagaatgtacaaatatctaggagaacataaaacagtgcctaactcggcctcaaaaatagggcagctccttgtgaagtctatggtgtacctgagtactacttactaagtagccatgtcagaaatcagtcacatgttcaaccagttgaagaacttatcttccaaaggataagacggcgtaagttgttcctctatttcttagctttgggatcatgctcaagggaactcgcagtaccttgggtttgtagtagtcgatgtgtatgttgcaggcctggttctgccactagatggagtggttagagtctctgaggaaagccctaactttgctctgcttccctgttccatcagtaaaagacaacagtaccctcctggggatgttgttgagattaaatgacatgatgcataataactaccctgcacattgactggcaaatagcgaatgcccagtgaaggaagataaataagattccaaaaaagaaaagcaaacaccaaactttcataataaaaccttgtcatccttagacaagattagttaaaactatcacatgtaataaggtgaatgtgagaaataaaagagctaattacaaagggcacatattacttgagaattcctatatggacctcttgtgctattaggttatgtgctggaccaaaatctggatagtgtacaaatattctccaagaaattggcaaattccaaaattaattcccagtcattgatcctgaggcagagcctggatacatcagtatctttccctctcagcttcttgttggttgttgtatgttgtaagtgtcaggcagtgcaatgcaagtacatggatatcaatggcaaaataaaggggcaagatgtcatgaagttgatgaaaaaatcttggagaactctccacagtaaacaatttgtctccaatcattgaaaaatgaggcaaagtcacaaccatcaataataacgagagaagaatggtacagatgaagcaatgaaagatgcttccgaagatgaatagccaaacattgagagagggtttgggaaattctgaaatcctccttcagagttttcataacaatgaccctctgtttacaactggcctctgggaaaggccatgcaaaggaaaggaatcttatagaaaggttcattatataggttcgtttgaaaattttgccaaaaacaaaccacttaattcattctttgtttttagtattaacacataattacaactacaacataaattttcataattgttgattttgtttttcaaggtaagcttctaataagatattatcctgttatttattgtggtgttttaaaacttcttttaagtggattcagtttatgtgccttgttcctttgtaatgaaactttgaataagtctaataagtattattcaataatacgaaataatgcaattatttttattaagctatattatttttctttaggaggccctgagaaacaaatttgtaagaaactttgtagaaaaccagttgcacattgatgtagacaaacttactgaaaaactccagacatacggtaagtgtgctgatgggcatggtagtgttcttctgcccatatggctctgccacttgggtgggtcctcccccttgggccatggcattgctaggtgacttccagcaagtcacttttcctctctcagtttctattttcttatctggatcctgaagggcttgaactaaatactccccaaagtttgtttcatacctgaagttttttcgattcactgattcaggacttaactagtaaagaacctagttaaaaaggaagttttctgattcaaacacaagaattgtgaattacaaaacaagtttataaaagaaattattattattattgagttaaaagtaacttgaaagccattgcatagatttgaaaatgggaagctcagataaaaacattacctatcagtaaacatttattgtacctctgcaattgatgtatctgtgaattcatttaggtgttttaacaaacatttgctggacacacgaggagagccagttccatgaaataatccatagaggggcataaaatattcctgttccaccatgcagtgcagagaagaagatgaccatgcttagaaactgcaacactgtggcaaaatcagcgatcagggccctgccagagaagctctcaggagcctaacccagttggtggggacctggagtcagagggaggatgggtgtcaggctgttccaggtccctggctccctcacactctgcttgtacatgggaaagggtttcggatctgccttacatatgaaagttagaggaaggcaagacattttattcggcataatatagtacttccctttaaaaaaatttctggtgaatgcaatacttaatattttacttcagaaaggttaatcatattttaaaatgtttcatattttaaatgcattacataattttttcaattaattaaaacacctttaaaagaagaagtagcactggaaagtttataataatagtgtccccatcttctgttgctggaaccaaggactgacatgggtctgagagatttcctgtgtggaacgcagatgtctcctgagtttgcgtctaccatggtgctagtgttaatgcagatgtcttagagtgtgaatcgtacctgagccacatttgttcaacatgttgctgcttagccaacagtacatttgaataggttttcccacatgtaaacttctattgtaaaattaagagaaagttccccagaaatttagaacttttcctacaagtgtgttgggacacagaatatgagattcacatggaattttgagatccatgaggtgtgatcctctcttctttctgcttccgcctgacgctagagattgaagaccatatcatccaggtgaatgttggttattttccatccgaccctgtacagccctctgggagcaggcacagagtggggtcaggcattcacgggtggggtggcggtgggggattgatcactgaccagatgcaaatctccttttgtaactatgctaacaaatgaactcaccttactgcatgcacccttttaaaatttatacctaggtcatactcacttttcttcatcctataaacagtacctggaaactgaggtgactatttgaagatatactgatgcaacttttgggaatatttgcccaatcatgctgtcatttttattcattatataactttcattttatttttattttttttagacaagagttttgctcttgtcatccaggctgtagtgcaatggtgcaatctcagctcactgcaacctgcgacttctgggttcaagcaattctcctgtcccaccctcctgagtggctggaactacaggtgcgcaccgccatgcccggctaatttttgtatttttagtagagatggggtttcaccaagttggccaggttggctcgaactcctgacctcaggtgatcctcctgcctcggcctcccaaagtgctgggattacaggcgtgagccactgcgcctggcctcattatataactttaaaaaataactttttgctttattacaaaaagtatatatgtctgttgtagaaacattagaaaatacaaataagccagaaaacaaatccacctataatcttatcaccacagatagctattttaaaagcctcggagttcttttttaggtgaatttatatgtactcatatgaagataagaatatgtattttcacaaaaatgattatactgttcacataattttgttacctgagtctcctgagtttgcatctaccatggtgctagtgttaatgcagatgtcttagagtgtgaatcgtacctgagccacgtttgttcaacacattgctgcttagccaacactacttttgaataagttttcctattcaaaaattaagattattataaaagtttttcatatctataaatattgactgttactaagaaaaagtcccttcatctagctctgccttccatttcactccatagtatgaatttaaaattacttaggaatttctttgggatcggtccttatatttctaactgatacacctacggcagtatttcttgatttatttgttacaggaattatcaattgatttcttgttctgaaagatgcagatttagttttgtactacatcatttccctgatcagttgctcccactatggtaatatgaccattttagtagttataaaacagtatgaggagataaatgttgttcagtgcagagtcaggctatgcattataatgacattcccttatttaccatgtttcccttttcctagagtttcatgctctcttgctactacatgaaacacctgttctccattgctcccagctctgtgtgccaacacatcacctttatgttgagtcattttgtctgtgcagacgccacccagaccccctaccatgctccacctgggcaggctagccgctcctgccagcacccagctgctttcctaggaattctctgctctgctctcctggggtggataccatgattcctgggctctaggtcctcatttttgttttgttgtcatgttttgtgggttcatattaatcagtgtagtcttgaaaaagagaatgagagaaaaaattcctgagtgattttactcagtaaagtaaaattacatctgaatgatatgtggaaatatcctctatttcattaccaataattttgcatctcttctttctctctcctttttgcttttaatcagtcttgtcagagggttatcaatttttattagtcttaaaaaaacccaccgtttatggccttatatttcatttgatttcattgatttctgctctctattggttttttccttttgccctgtgtgtgtgtatgtgtgtgtgtttggtaacttcttgagatgaatacttaaattattcatgtccaccttgtcttcttttcttttctgatatatatatatatctttctgatatatatatatatatctttctgatatatatatatatatctttctgatatatatatatatatctttctgatatatatatactcatatatatatactcatatatatatattcatatatatatactcatcactagacacttccctctggcattaccttaactgcatctcactaattttgatatcttgtattttcactctcattcagttaagcatattttaaacatgtggtgtaatttcctttttttttcacctttaggttatttgaaagactatagcttaatttctaaatatttggtattatttatttatctttgggttaatgacttccagctttacttcacagtggtaagataatgtacttcgctaatacgatttcatttgcttaacatttatggagactcactcaatccttgcacacagggtcagttttggttcctgcattgttgggtgccgtcttgagcatcctcactgtctccttgttccatcagctcttaagaggtgtgtgtttacatttctcgttatgactgtgggattgcctatttctccttgaggttctgtccacttaggctttatatactttaaggctgtattgtattttctgttgaggacttgtttgagacatttatattttcctttgtttgtatttaaattatcttccagcctctcccccttcttttacttctttatttctttccggaagtttttctgtgactgacttagttatggtttcttatgagaatcctcttttggctctgtagcatttcttgaatcagtggccaaatatcttatatttggggaaagtcttggctactatcttttgaagcattgcttctgatcacttctctctctgctttcctctgcaactcttctaaacaagatgaaaacttttcacagtgttcaatgcttcttatttccttttctatataatccaacctattttctctttatacttcagtttgtgatttcttttcttactagttttttaatcgacaaattctctcttcagctgggtctaatctgctattaaacataccaatgaagttcttcatttcagttgttgcattttccgcttaaaatttaaattttcttattttaaaatagtttttagctctctggtgaaagtctattttcatctaattttggacacaatactcacataagtctattttcatctaattttggacacaatactcacattttggaagtgcatgtttgtgagctttaatacttgtcttttgtgggtatttttttagtctatttttctcttgcttttttttttggttatttttcttgtcttgtctccaggaatattaaggattaaaaaaattgaaaccagacattataaatggaaaattgtagaaataaatttgagtctcctgatagtgctatattcctctagataatgttattttcctgcttgtggcagagagctagggcagggccacgttttcctaatccatttggggatggagtggattgatggaggtagacttcagccttagtagggaaatttccagtttcctgtactcctggatagattccctatttgggtggggtggggatctcacctataaagctgataccgattagggcccatgtagatccagagctcaaagtcccgtggaccactggagactcagcctctcagtttttggcaggatcaaataccaggcttcccaaggttctcttttctcttgcatctctgacctttgagcttttgctgccttggtagctctttaaagtctttatatagattttcttttttttttaatttcaatagggttttggggagcaggtggtggttggttatatggataagttctttagtggtgctttctgagattttagcgcagccatcacctgagcagtatacactgtacccaatgtgtagacttttttaaacttttaaactaaagtctttatatagattttttaaaggccattcatattttctggttgttcttggaaggaaacttcatctgccccacattgtcctccattactctaagtggggtttcctcaatatgacctttcaatctgaagacgacagctcttcaattaaggggagttttcttgtcatcatttctttgatatttttacctctctataaaaataatgctattttaactttagtttattttaaaattactattactgttttctatttgtttattttgagttctctctttcatgttgaagggttcacttaaatgtttggtgatattatgtgtgaagcattaaaaccagactgaaagtgatttggtgagtagaagttattgtgactcagttcatatcagtagttctcaactgaggatgattttgtcctctaagggatgtgtggttatgtctggagatatttttggttgtcacagctggtcacagctactgccacctaacaggtagaggctaggggtactgctaaacatcctacactgcatggaacagccctccacagcaaggaattatgtgcccaaagtgtctgtagggcctaggttgagaaactctcatttagagcaataagatggagtcacttcttgaaaacaaatttcaggaggagacacgttggaatgtcaaatcctctggtctgttttggctgatgcctgccatgtctggggtcctcaggtatatacactgaatggtgaacaatcgttaacttgtattattctctggggcttggccccacattagtgtagaattttatactatgttgttttatgtccacctatatgtgaacctcagtattgtttttgccctttcagacttaaagtagcctgtgtttctttaccacatagggtttcacatgggccctatgtgtttttcttggctcatttttcctatatattgtgagatgaagcaacccaataagagctgtgattctaggactcttaccagaggctttgcccattcgtgtcctgtcctctgtaatccatctttctctcatagcagtgccctcatcatttaggttggggagtgtactcaaggtctccaaagtgatggaacatgcagttaatactagaccacattttatttttattatatctagtccattgtgcaggaactattacccaacaaagatattgcttctttcctcccagaggagggagatctgcccagtgtcctaagacctaagagtttttgtgtggagctgcttttctaagttgtagttaatgccacataataacattttagtcaacattgatctgcatacatgatgatgttcctataaggtcataatgagctgaaaattcctactgcctagtgactttgtagctgtcagcacattgtagaacaacacattactcacttgtttgtggggatgttggtgtaaacaaacctactgcactgccagtcatataaaagtctagcacacacaattatgtacagcacgtaatacttgatcatcgtaataaactactgttattattggtgtatgtgtttaattcaattcagagtgtacttcatatatatatttatgagttaagtgtaaagcagcctcaagtaggtccctcaggaggtatccagaaaaatccattgctagcacaggagatgacagctctgcgtgtgttagtgccctgaagacctccttccagtgggacaagaggtggaggtggaaaaaagtgatattgatgataatgaccctgtgtaggcctaggctaatgtgtggttttgtgagttagtttttaacaaaaaatttaaaaagaaagaaaaaacctaaaaataaaaacaagctagctcatagaataaggatgtaaagaaaatatttttgtacagctgtacaatgtgttttgtattttaagctaagtatgattacaaaagggtcaaaaagtcaaaaaattaaaaagtttataaagtataaagttatagtaatctaaggttaatttatttttgaagaaaaatttaaaaaataaatttagtgtagcttaagtatacagtgtttataaagtgtataaagtttataaagtgtacggtaatgtcctaggccttcacattcactcactgctcactgcctcatcagagcaacttccagcctgcaagctttattggtgagtactcaatctaagtgtatcatttaataccatataaaatctttcatatcatatttttattataccttttctatgtttagatatgtttagataaacaaatccttaccatcgtgttacaattgcctacagcattcagtacaataacattctatgcaggtttgtagcctaggagcaataggctatgctatacagctaggtgtgcagtaggctgtaccatctaggattgtgtaagtccactctgtgatgttcacacacgatgaaattgcctaatgctgcctttttatgccgcatttctcagaatgcatcctcatgattaagtgatgcatggctgtaagatgtacctatgtctcccaattatatgcatgataagaaagcttaaagccttctccaaagcagttccagttctgctactggaagataatgaaagtcacactatagtgagaccaagtcactcttcactgtgtttaacatctgctgttttatgcagttaaattgtttaaccacgcttgctaggcaagcttatagtgcagcctattccaaataacaaatggtcagcaacacacagatacagtagaaaaatgtctccagtttgccctacaccgagaaatttaacaatctccacttctccattaaaaaaaaaagccccccacaatgcacaatatactttttggttttctattttctagttgttatgcttactttcatgcagaaaagttaattaaagatattcagttggagcctcgctctctccttatagctgttacatgataatagttagcacttactgtaaatcagtttatagtgtatatataaacttcaactacatttacttttcacagcaatttcatgggtaattttgcttttcttatgctacagatgaagaaagtgaaacttttatagattaaataactatctaatgtgaaacaagataaatagtgcaattgccatgggagcaaagccatgtcttgtcagctttgaagcaccagtgacctgcactcctggagcagtgacagcaggggtcaatgccacttctatgttcccaaaccaggttaccccagcccatgtatttagtgggtcttgctttttgatgcctcccatggctataattgcccataagaatatccaagtttagcctcatacccacactatttagaaatcagaagaaccctcaagggagttttcatcacagccattgcataccccataagtaccagtcattacagtagcatttcacagcactgctgtctccagaacctgatacctcaatacttctagcaggtactaggtggtgttccagggcccatggaaaatcatggaataaacatgatgaaatgtccaaaggaatcacttttgcagcaacattttggggaaaatgagacataattttatatactgaaacaaatgagtagactagtacaatataacattttcacacacaaaaatcagttatttcacggaattttcaccttctcaaggctcatccaggatcctgtcttcttctcgcacacccttgtatccaccctcctccctgggtggagtaatttgagaagtgcaatgcaacaaggcaccgtcagcacagtatgctggagtcaccagccaagggctggttcagagatttggtgccatcttaaagaaggaaatagatagagaaaacagacaagaaatgttaagaactgctggtgtcagcactggctccgcatcagccagtccaggccagctgtccagccccagccctctgtgttcccacagcagataaattgggatgctgagtgtttcattttggttaggtggaggtggggctggaaatctggaaagtcccctgccacacaggacattgctttgtgctgtgctacctgaactgttattggagtcttaaagcaagataaaggcagtggagtttgtctcctcctctactggaaacaattttatatagtgtattaataaccgttatactaggaaatagttattgagtgctctctatgtgccagacacagtgtcaagcatgttacacattattctacttcatctttggaaaaagaccattgagcagatgattatcatttcccttccataaagagggcgaggattattcagcctcagatgcccactgaggggtggtgagcaggcacccaactccatctgacccatagtccacaaggcccagtagacggtggagatcctgtgtccctatctccaggccaaatgggcaccatgccaagataaattctttaaaccaagccacatgacctcttgttgagtgaggtgggctggaccagactgctagccaccctctaatccttccacgtcagtgctgagggaaaggcctcactggtgggccttacagtggctcggaggctcagaacttttccaaggaactctgagatgctgtgtcccagttgggggactccggggactcatgacactctgaggcagaagactcgacgctgtggatccttctagctcctctttgattgtgtcatccaaacagccaaaggtccttttctgccttaaaccttagaaagtgttgactataaaactaaatgagaaatgaaaactgctgtgcaattacatgtttctgctattgacgccatttgagaactctggcttgagctattttcttctcactgatttttccaatgagcgtgttttattcttctatgaattcagtttgacggtcttaacttaaccaggcccttcaggctctaccaaattgggaattacaggaggatttctatgagatgtgtgtgtgagctctgatggcaatagttaattgatcttatttactaaatggctttatgccttttttatatcttttatttctctctggaaaacagtaccaagattttcattctttctgaaatatagatgataaatctcaggcttagagactggctctttcagagccctacaatatttggtggaatcaagaacccaattctttgaattctggatcatgtaattcttctactatgtgttaggcagggctgtctggaattcctgatgtttgaatatttttaacacacagtaagcagaagtttcatatggttccactcaatataaatgcagcctggtgtatttgtaagaaggtggacccaaaagctagatggcatgtgtttgaatcatggttttgaaacttactggttgcttatactctttgtgccttaattcctatactttaaaatgaacatgccactagcaattccctatagatataagggttcagtgagacaatacacaagtgcccagaattgtacctggcacaagactgacactcatacagtgacacttcactattattgtagatatttagcaaaagcttaattatcagaaatccagccttcccaaatccttacactcatgtcttggcctgagatcggcaaattactggaacataataacagcagttacaacataatgaataacagtcttttctttgagaaactgtgcaatgtaggttgaggggatgaagggcagaaggagcccgacacttcttgatgttgtttggcagcttacatgttctcatccatctgaagttggcagatggaaactaatctttccttaccagggaagaagttgaggccaggacatgtcaactgatttttctacagacctcaggatgatggagatgcatcttcatgtagtttcttattcagggctggcccccctttacagagccccaacacccctttcaaacatgggctgggtgccaagcaagcaaaacccagacttaatccagaaaccttggaagccaggaggatctgggagcagggaaaccagtagaggagggaagcaagcatgagaggcagaggcagctgtcagtgggtactgatgctgccatgtccggggacaaatgcccacaggatggcaggtaggctccaagcttcgatggagggtggaaatgagcacagggagcagctcacatcatttggaaagttgagtgttcaggaggtcagtgagatacaggagggccagcaggaagcagtgactgcacacagggccagggatagactgttgtctgtcaccatacatctttcctgctgctttccctctggaggtcatgttctgggcattcccacgctgccttgctctagatcatttggtttttccagctccttcctgaaaccagagtgaaaatactgagatatcctcagccttttgccctgaaaatgtttgatgtcagcattcatagccaaggtgttgcgactttactctgctgctctatttatgtttcgaatgcacagatccaggacaaagactacacaaggatttggtttcctcagtgtccatgctccttgataattgcttttgcaaaattaatttaataaaatgactttcccaaaatgactgcttcagggaaggcgtgttttttttagaattgcttgactccaggttggaactttttttttcccctgaactctctgtgagagggtctttcctatcacatgtagactttccttctgttgtttatcctgttgtctccaactgtgtttccttaggctgctgtattaccctttgtgctttaactgtttttttttcatgtacatgtatcagtgttacagagcatgtgtataaaagtgtagagtttacactcagcaagtaaatgccaaatttcacatatgaccaaaatttgactcttttgagcaattttttagtggaagaattcatattcattttcaaatccatttgcacaatctccactatatgagtggtaagcactggggggatacagaagttgatgtgtcctaatctgttcactttcctcaggagggctgctggatgagatgtttaaccatgcaggcgctggacgcttccgtttcttgggcagcatcttggtcaatctctcttcctgcgtggcactgaaccgtttccaggctctgcagtctgtcgacatcctggagactaaagcacatgaactcttgcagcagaacagcttcttggccagtaagtactcaatgaaaaaatatgttcgccaagatgccaactcctgtaagttgtcattttgggagtttctccctaaaggtgtcttatgatagctcagaaagaaaagaagtcctttccagataaaacataaaataaagcagaactgtttaccttggataaaacataaaatgaagcagaaatatttgccttggttaatgaaaagttgtaccttatgccatagtgactaataacgttttcaccatcctaggaccaatgctatttactgcatctgcttttacccttttataacatcatgttctagttaaatctcacaccataagttatattattcccgattaaagttatactctaatttcctgcatcacctttccttttatcagagtatcttgatatcctggttggggcggagagcaggcaatggccaactctgctccattatttaattgttcacccattcaagataaatatggtggtgctctcatattcttttggaatacacattgaattatttttaattgaggttttgtattagtttcttaaggttgctgtaacaaagtatcgcagactaaaacaagagaagtttattgtcttagagtgctggaagctagatattccggatggagacatccactggtttttcctgcgggctatgaggagagaatcttctctaggcccctctcattggcttgtaggtggccatcttctccctgggtttctgcacctcatcttccctctatgtatttctctgtgtttaagtttccctctttttataaagacaccttcatattgagttagggcgcaccctaatggccctcattttaacttgattactctttaaatgttatctccaaatatagtcacattctgaggtactgggggttaggacttctacatatgaatttagtaagggacacgatttagctgtgataggctttatgcatacaattcaaagaatccgtgtggcataaaatagaatccatgtatttaagttatgaatgataagtaaccccaaagagatggattctgcacattgagttaacatctgcaatcaagagaaaaaaaccctgcaaaaaacatctgacaaataatttctttgtgttgattataccacagtttgcttttatgaaaaatacaaagcagcactggacagggaattaagagatcttggtttaggcttaccaccaattgcctgtgtgactgaaagtcagctttgccactgcgggctggggctctgagtctgcaggagtggagggctgtgagtctcaggctcctgcaacttttcctgtctcacccagtgtaggcgtggtttgagccactccctacagtgtggtaatgcttcgtttttccttttctgccactaggtatcattttcagcaattccttattcgacaagaacttcagatcagagtctgtcaaactgccaccccatgtctcatacacaatccggaccaatgtgttatacagcgtgcgaacagatgtggtaaaaaacccttcttggaagttccaccctcagaatctaccagctgatgggttcaaatataactacgtctttgccccactgcaagacatgatcgaaagagccatcattttggtgcagactgggcaggaagccctggaaccagcagcacagactcaggcggccccttacccctgccataccagcgacctgtgagtagcctggggcaggagccaccgacagtgagaagggccttgcatttgtctagctgaggagagaaaactcagtttttctatggttatttcaaaaagcactgttaaaaaagttcaccccccactttttaatttcgtaaggttcattttttttatatgcttgtactcttcaggtagaagaaatataatggttgagataatacaatcaagtgaagttttaaatttgacatcaggcatcatctatagttttaaatacacttaaaataaatttgatgaataacattcacaagggctgtgcatgtccaacaaaagattccacttacctaaccttgggaaaactgagggaggttattttctctgcagtgcaaatccttagatataggctgtatactggacagggtggtgaaggattccatacaggccttgaccatggcttgggtacccatgaagtaatatgagaacatttaggagtttgattgtgtaatttggctgctgacatctataggaagaggggaagctcagtgaagggctggagcagctggacaagaggacttggaggggacatcatggaggcattaaaacagccatcagggaggccaggcaggggatgtttgcagagaggacgggagactatggtcggactggggctcagtgaacctgagggtgagcttggacaccttggcaggttcagacaatgaacagacttcaaagctcaccaaagcggggtgagccgtattgctgtgggctgtggggctcagcctggatttcttactttcctcatggtgcatactgttctcataagcattctgctcccacagctggcctggctctggataatgtaggtcattcatttgcaatccctgcatgctggctctgatgcagggcctcaggaaggtaccaccttcctaccctctctcaaaagcacactaggaagtaagtggctgaacatgaggctactgaagggaccggtttgcgtgttctcttagttatgagaacagggacaagtactcatccttcatcgaaacactgccagtaacaactcatggcacctcccacccctgactggggcagagccatggaccaccaagcagaagtcaggactgcctctccaggtgactgggcgacacacacgtgaggataggtgacttgatgtcttgacccctccttcctgtctagtgataggctgcatacataatagcacatccacacattttttatgaaaatgctggttgtacaggaaggactttcccacagtgggaggataaaaggctgaagaccacctgattgaactcatcttgggatagcctagtgtggtgcggtgaacaaaaggtcaggaagaaagagactaaggcgacattttcactcaggggctgccttgttaggcagactgttagtaagcctcttaacttctttctttgtaaaatgatagcttttctttcttttcaaagtgatgatatttttggctatgaacattttcaacctgtgattttctgctcctaaagcatgtttcttggaggtgatagcagcaggagcagaaccgaagaaaagtgctgttgttggctagttgtcatgcacagacacttcatacccagtgcaaacacctgagagctctgagaattagtgatctgtgttagatactgggagaagccgaagttttattatgctcattttctaaaggcaaacctgaaatctattgcattctgacaatctccttctagctccaaagtatgctatgatctccacccatgaaagagcggggttgtgcttacgtggatgggaacatgacaattccctctgctccggttcacaggaggagactgggggtttactttgtccactctgacataggatatttcccaagaaggcacgatgggaagaacagcatacactcctacaaatgtattgatggaaatccagaaatggcctgagtaatcagttttcaattcctactgatcatagtgtatggctaacagacattgcaagagagctagaaaggaggaattgagggacatggatggagacatattttttcaccccttgaagataaattctgatgtatgagaaacattccagcctaaaacgttggaatgagtggaatacccaggtatgattctgatctcatggaattacctctcttattctactactgggatacagcaatataactcctcagaagtattgctttatttctttgagaaagatgaagaagtattttaattctctgaaatatttaaatctttgagatttctcactgtgctatatccatcttttatctcttgtttcgaagtctccctttcttgagggcttagagtacctgcagtgattgaaacacagtctgagatctcgaaagaactcagtcacttgagtaaaaatcctaaagcacagtttgtactgtagacaatgtttgttaaaatttttttagcagtttcctcctgcttactgaatgagctacatattcattaatttatgaatttattcaatgacttttatgtactatttgtcagtctctagactgaataagtaaagaaaataagtaaatcagtaaagaaaataggtgaatcagtaaagaaaataggtaaaaatccctgctcttgtgagacttccagtccagggaagcagaggtgccacaaatacaattaagaagacaattgcattgaatgataggaagcaggaagtgccgtggagctgggaaataggatgagcagggtcagggacactaggaggggaagatggaattgttaatgtggatggggtagaccctatcaggaaggtagcattttaacaaagacttgacgggatgcagaagcacaaggggaagtgtgttctagggcagaggaaccccccatgcaaaggccctgtggtaggagtggcctagggtatgtgtgaagagtcaccagagcagagtgcacaagggcaagagggtgggagatgaagtcaaagagctgattgtagattgcatggttgcaggtgactggagtggtattaaaagactgctggagagtttcgagcaggagtgatgtcatcatctgacttatactgtaaaagtcttgctcacgctgttgggtggaaaagagcttgtaggggtatgtgtgggacagagaaatcatttagaaggctgttgtaataacccaggtgagagatgatggtggcttggtccagtgtggtagcagagaagctggtaaaaagtggtctgattcttggttgcattcaggaagtagaggcaacagaattgccaaaagatttgatgagggcgtgatagagagacatcgaggaagattcccctattttggtccaagtaactggattgctggaattatctctaactataatagaaaaactgtgggtagaggtttggaggataaggatagaaactcagctttggacatgtctagtaggcagatttgttcaggaggctgggacaatgtatggatctattaatttaggagtctccccgattttgatggcatttagaactctaagatattaccatgggaaggagtatagatagaaaaatagagagggccgagaccaaatgtggggcccctcccatgaagaggtaaatgagaagaggagattgagaaagtatcattgaggcaggaggaaaacctacagagtgtggaatcctggaggtcaagctgagcaaaagactccaggaagaggagtgatcaagtgtgtcatatgtggctcatgggtgaaataaggtaaagacagataatcgaccattggatttacaccatccaggacttcatagagagtagcttccatgatgtggtgagaatgacggccaaattagagtggacagaatggagacttggaggggtagaattggagagtgaactcagacagctctcaatgggaagaaatgggaggtgacttcttcttcttcttttggaagaagtcttttttttttttttaaatataagatgctacctggggaatagtccagtaagatgggaaaattggtagtgtataaacgggggggacagctgtgtcctgaattagtcaaggggaagagacctcaacaagtggagagacctactataggtgggaacatggcaattcacctgtggtaacaaaacctgtttaactctatttaactaaaaattttccacttttcttgcacacagatctctctctctcctccttttatttttcatgtagtatctaccagcagctcatggaactaatgtcctgaaaggcatgcattggaaaatgttgctggagactgtagagatggataggcagcagcagtttttgaaattgcatgttcctatcaaccccctgattcataggcagttatcatagaataattttatgattggaactgtagtgtgtacttcatgaatataaaggaattcaaatgttaatgtgttgcttcaaagaataagccaacttaataaacaggttttcagaaaacaaaaaccacaacaatatcctgggattgttttatatgcacaaagaatatttatttgaaaggtcacctgttatttcctctattgctttttggctgcttcaattcccaccaccctggggtgggttcaagagaaggagaaatggagcgtgctgggtcaggctgagtgatggctcccgtgaggcgttgcatctggactttgatgtgtcttgggcaaagtggagagtgaagggttgacagccactcatgcttgaaatgttgaattcctgcttaaaaaaaaatcagcttgatccacaacagaccagtgagaggacctctcattttatttattttgattgtttctcttccttgggctctacttcaggtaactttattaaacacctctctcttccatttagtcaatagtcattgttctcagcagaaattcccattcttgatgaccctcagcgctcagagctgctggaagccccctctgttgcccgcaggctctgtcctgtcccaccaacgcaggtaatttgttggtgataccaactgtagtgggaaggagaagaaaaaccctcattaaattttacaattcttcactttctcaagccccacacagctcttacaaacttatctccttgctgggcagaggaggatggtttctcattaaaacctcagcaaatcgtttctccaatttgtctatgttctttccctcaacagcagcaaagtaatctcttaaaattgtatcacatttaaaaaaatcatctcacttattctctaaaaaccttaaaagtacagtggaagaaattgagacgctgatagggtaagttatttcccccaagatctcacagcatcttaatacccctcactccccaaataaactattaattgccacttgctacttttaagcactttgtgcaggatgcttggtcacttggctgccatttcactccattgtatttgaaagtctggtatgttttcggccgggtgtggtggctcacacctgtaattccagcactttgggaggccgaggcgggcagatcacaaggtcaggaattcgagaccagcctggccaacatggtgaaacccggtttctactcaaaatacaaaaattagctgggcatggtggcacgcgtctgtaatcccagctactcgggaggctgaggcaggagaattgcttgaacccaggaggcaaaggttgtagtgagctgagattgcaccattgcactccagcctgggtgacaagagcaaactccgtctcaaagaaaagaaaagaaaaaaaagaaaggacaggacaggacaggacaggacaggacaggaaaggaaaggaaaaaggaaaggaaggggaggggaggggaggggaggggaggggaggggaggggaggggacaatgcctgcctggcatgttttcttatatcctagccagagctcagatttgagcagtagttcttaaccttggttggtgggagtttggaagtgtatggggtgttttgatggtaacagtggggaccagtgtatgtttagtgcctaagggccagtggtgacaattgttgtgtgataaatgacactgtagtgtgcaatgaagaatagtcctagccaaattccaaaacaccctcatttagatccactgtttgctctgcctctggtaaattatttcaagggccttcatcattcactcatatagttattcctctattcatctatgtagaaacattttgttttcatattcactgtatgacacacattctatgctgggatggatgcagagatcagcactatgcagttcttgaggtctagaaactcactgcttaatgcagtagttagtgtacattcataactaataaggggcgaaaagggagatacagatactgtaaaagtggcagcactgggttgctcacaattgatttcatgccttcctctacctagtaaaatataggagaatttcttggtagaatctgtatgacctgagagtctgaattaaggtctcaaagtctccttctttagacatattggatcttgacagtgcatctcaccttctaagtttatccgatctctttcgagcttcctggatccctttagagtctcagacttgacatgatgacagaactgggatgaaaaaactgcatttgggtgccagctttgacacttgctggttcgcaggaccttgggccagttttgcgccagctttgggtgtcggtctcctcagctcatacggggtattaactgctgtctgcccagtgcattggcttgtagtgcgcagtgaattatcctgcttgaggagaccttgagacttgtgaggggcaacgccaggcactgtgaatgggtgggatgctctgagtggcagcccactccattcttgggcagcttcaaatctgagaaagttcctccacctactgatgcagaaggtcaatctgcatgactctggcaatggctgagtcaggaacactagagtcttaaatgccccttacttcaccttccctgacctccactcacctccaattcacaaatcacgtcagacttcagctggctgtgttgtgcggaaggcagcggagacagagctagcaagtgacaggggcaacatgagtgtgcctctggttccatgaaaaggaaagggaggataaagggagagagagaaagtggaggccaaatgcactggtccttctcttcagcagttgcccccagctatgtcctgtctccccatggttgatgtggactggtcctgggcagtagtggtgatggaggccggtggagaggggcagaagcagggaagggcagaggccgggctgatgtgagaggtggtggctggaaatttgcctcctccctgcacttgcctcaaagtcctacatcctgagaaaacaaaacaaaaaacagacaacaacagcaacaaaaaccagctgatttctcagggtggttctttctatagtaagactttggtccaacacgcccatgacttttctgtcattgcactcactgatagtgctgacagaggcaagtaacagatcaaataccaggagcaaggcttactaaaatggaaaccaaaaagtccacctgcagaaaaagcaatggtgacaattagtgtttgtgaagatcagagtatccctttagaaaggcttaaagaagtaagagagtttaatttccttttttgtttttacttttattttattttattttttattatactttaggttccagggtacatgtgcacaacgtgcaggtttgttacatatgtatacatgtgccatgttggtgtgctgcacccattaactcgtcatttacattaggtatatctcctaatgctatccctcccccctcccccaccccatgacaggccccggtgtgtgatgtccccactctgtgtccaagtgttctcattgttcagttcccacctatgagtgaggacatggagtgtttggttttctgtccgtgtgatagtttgctcagaatgatggtttccagcttcatccatgtccctacaaaggacatgagagagtttaatttcctaatggtataatttatagatagttctttgatttgggttccagagaaggggaaacatacagagaatattctcgattcttagtttgattcatgctctcctgataagaggaaaatcctatttctgaggttactgagacatccctgacctttgtgtgtatgttttttatttttagttctataaacaagtgatattcaagagtgaagaaaatagagaaaataattcacacttaatatcctgttccaaatagacacttatttgtttatttatgttttcttttgggatgagtccctcattctttgtcgttgtgattcatgttttacaaactagaaatcgcaaagtcttgccaagagttagcctgaaagtttttgtgctacatactcatttgggaactatttacgcagtacttattatgtgtcatgcactgtaatcgcatgacatatgtagtagggaaagatgtagtcctgccttgaggaagcttggagagcagggattgttatgaccgtattaagatgagacaaccagcctggacagcatagcaagaccccatctctacagaaaataaacaaaattagctgggcgttgtggtgtgttctgtagtcccagctaattgggagggtgagaggggagaattgcttgagcccaggaggctgaggctacagtgagcccagatcatgccactgtactccagcctgggcaacagagtgagaccctgtttggaaaaaaaaaaaaaagacaagaaaactacgaatgacttaaatctgctctgctgtgaccccgctctagtggagactgcaagggacgagaatcacagcacctctttaaaacttggtactcagtgcagttgttgttggtgatacataatacataatgcttcaactttaaatatgaaccacttccaattattaagatcctagaagagagaaattaaagtcaaaaaatgaaacaattttcttctctccctttctccctactcatcctccttcattcctctctcggtgtggttactcctcttttaacatgctttttccttattttaaaaattcatgatgtgcaagttatttcattcttttcttatttgacttctgttttctcaaagaaccctatttggacttcatcaattctctcttttgtctcatctaactttttctgcttttatttttattacttccttacttttctgtatcttcaatatattcttttataatttgagactaaagtttaattcattatttttagtttttttcttaaatatttgtagttaaatatattatgtaggtaatatatttaacataaggtaatgactgttctttcaactcctaccttatatcccatagatctcatatgtagctaacaatttattgttttctagatgcatgcagtacaggtttctattttctctttgacccaagagctgtttaaataaagcttcttttaatttccaggtgaaaattctcaagaattttaaatatatgaaaaactatgtttacacagcttacttgtaataagaaacatacaaattaaatctgctttgtaatagtatgtttttacatatcagagggacaaaatacaaaaattgcattatatactaaattgccaagttctgttgctaaatcttaatttctgaattgcagtcaaaatatgattcttattatttctgttttggtatcaagtaatatataacccacttttgtgaatgatttgtagacacttgaaaagaatttctaattccctattttagggcagagaatttggtctgtgttatttttgttatgtaggatttttctatccttaatttatgtcgtcttgatctgtcttagactgggataggtaaattatactcccttattacttggttgtccttctctctttttcctgtggagtttggcttttggatatttgtgctttgttactgtgtgcattactatgaataattgtgtcttttaatgctttgtggacataactctaccttgtttgatattgaaatggtgaactctgctttttttcccttctcttcactcttcctcttcttcttttttttttttttttttttgccttttggtgtttctatttgcttgatatgactttgcccatcctttcatttaaattttttctgaagcattttgtttcaagtgtgtctcttgtatgcattatatagcttcttatatatgtggccttaattctttgatagtataaaatgcaattataaattatatatagtcttgcctctatcttgtgtttcttatgcttataatttttcttttaagctaatatttaataatgttttattattattgtagtggttaccttataattataacattatataagtaatataaacccttgtttttttatcacaagcaataaaaacttaaaatatgttctcttatttcatcatatattttctcttgtccatcatgcaattttagctggtattgttaatcttacttaatgttgccttttgtactgttaaagacacttatactaatattctacatttgccaatattttaaaaaatagtatttgagtttggcatgcaccaactttttcttcgtctctaactcattccccattatccttccatttgtttttcatatcatttctgcatttcagggaatagtagcatttccaatctgtcttgtaaccttaattcctgtttttgttttagtcttgcttttacaggaaaatgtactcattgcttaccatcagccctttcactgtaatttaccagtcatcatttggcgggatgaagtttgccatctagtaatttccttaagaagctctcataagataatataacctgaattcctacatacgtaaaactctttgtagcatttatatttgaaggacatcttggctgaatagaaaacccttggttcattccttccttaagtatcctgtaaaaattgtctttggtcttaaatgttattatggagaaatctggggccacattgttattttctcccttttatataacttggtaattttggcaagctgccagtagcttgaaaacgcaataaattttataagagtatgtttcattgttgaacattctaggacaattttctatgatgacaagacaagtcctttggatgtgtagattttaattttttttaatggagactcttgatgtattctagctttgcaaatttagaaatacttagtttttctttttcagggagtttaattgcctgcgtttcttttccctgtgtttctaatcaatagatttttacattttaaaaaactctattcctgtttcctttagttgcatttcttgcacctattttctacatcccttactgtattttgtgcagtatcaatttggcctgtgtttcttccaattttattctcctttgtctgatggctagtttttttcacatattttttctaagttcttccaattcccattttatatctttctgctactttaccatctcattaactcaattctaatgattgtgctgtgtggtgtttcttatagaggggcttgccttgtttaaattgtttaaatatatttaaattgttgacaaaaagtatgttcactattatcatctgttcaatgagaccaactttttcgcatgggtttttcacttgttaataattatgcaactctcaatctctttttatttcttgcccaaatgttgtgctaaatttttgttaccgtgattgttactcatctggaatgaattggatattcctgtccaggtatctgcaagagggtcctggtggtggtgaggaccaggtgccattaatgaccttacagctcaaaagcttacttttccattgccacaaagatagagtgcttcctgaaaacatatggatttctcacatagcctccgtcttctgtttccctggaaatagggtctaggagaaggcttctcacgctagtcaatgtaacttttttttgcttttttattgatacacagtagttgttcatattcatgagttacttgtgataattggatacatgtgtacaatgtgtgataatcaaatcagggtaattgagatagccatcacttcaacaatcatctctttgtgttaggaatattacaaagcctgtcttctagctattttgaaatatacaagttattgttaagtacagttcccttagtgtgctattgcacactagaacttatcccttccctccatttgtacacactaaacaacctctaattatcttcccctcccctttacccttcccagcatctgggtaactcactactctactttctacctcaatgagttcattttatttttagctcccacgtatgagttagaacatatatttgtctttctgtgtctggcttatttcacttaatataatgtcctccagttccatccgtgttgcttcaaataacaggattttttctttgtaattgctaaataatattccattttgtatatatgccacatttctttatcttttcatccattgatgaacacttaggttgattccatatcttagctattgtgaataagtctgcaataaacatgggagtgcacatatctcttcgatatactgattttctttattttagatatacactctgcattggaattgctgggtcatattgtagttatattttttagttatttgaggaaactccatactgttctccacagtgtctctactaatttacattcccacctaacagagtgtgggttttcccttttctccaaatccctgccagcgtctgttattttctctctttttgatagtagctatttcaattggggtaagatgatatctcactgtgggtttgatttgcatttttttgatgattcatgatgttcagcatatatttgtataactgttggccatttgtggtcgtttatttttgagaaatattgagtcagatcttttgcctatgttttaattggattatgtgggtttcttgctattgtatttgtttgagtttcttgtatattcaggctattagtcccttgtcagatggatactttgcaaatattttctcccattctgtaggttgtctttacactttgctgattgtttcctttgtttgcagaagctttttagcttgatgtaacatcatttgtctatttttgcttttgttgtctgtgcttttgaggtcttacacaaaaagtctttgtccagaatcagtgtcctgaagcagttctctgatattttcttcttgtagttttattgttttgagctttacatttaagtctttaatctatttagagttgatgtttgtatatggcaagagataaggctctagtttcattcttctgcatatggttattcagtttttccagcatcatttattgaagagatagtccttttcccaatgtatgaacttggagcctttgttgaaaatgtgttggctacaaatgtgtgggtttatatttgtgttctttattctgtttcattggtttatgtgtctgtttttaaccaaagaagtgaaagatatctacaaagaaaactatgaaatgttgatgtgatgtgagaagttaaagaggacataaaaaatgaaaagatatcctatgcttattgattaaaaaaattgttaaaatgtctacattacccaaaacaatctgcagatccaatacaatccttattaaaataccaatgacattcctcacagaaatagaaaaaaatcctaaaacttatatggaaccacaaaagacccagaataaccaaagctatcttgaggaaaaaaaatgaagctggaggcatcacactacttgtcttcaaaatataatacaaaaccatagtaatcaaagctttagtctccattttatttatttctgctctaatataaagtctttcatcaaagaaaagcccaggacctgatggcttcactgtgacccgtgttctgcttgctccaacctctggtccttgcccttttttttcctttgcctggagcagtcttcctttagatacctgtgtgactcatttccttacttcatccgctttctgcttgagtatttttttcccgctgtcagctcagctaatcaccctgtctgaaatagcattccttctcacttttggttaagctagttcttttttactcatagcatttatcactacctgatattatgcatctctgttttagtcctttctgtgctgctatcacagaatacccgagactgggtagtctgtgaagaagagaaatttatttggctcataattctggcaggaagtccaagatcaggcagcctttctggtcagcttctgctgagggtgtcatgccacttcaactcatggcggaaagtgtaaggggaagagggtgtgcgctccatacatgagaggcaaccctgcttcataacagccagctatctcaagtacctggaatctatcaatccagtatcctggaaactcaacttgtctcatgagaactgcattaatccattcatgagtgtggagaccccataacccaaacacctcttaaaggctgcatcacctctcaataccatcacatgggcaattaaatgtcaacatgagttttggcagagacagaacatagcaatctctgtgtttattggattattttatgtcccctcccaccttgccgacacactggaatgaaagatccttaatggcaggacctttttctgtttggctcattcatgtatcaccagcccagtaacacggcttgtaccttcagttggtctcaatgttgaataaataattattatgtggatttagagctcagagagtatgtggtgagaagacagagggtccagcttgaggtaggaatgcctacatttaaaggcaggtaaaggagaagttgccaagatgtgggtgcaaagctgggagttgttctggaagctaagagaaaagagaggaggagggaatgaccaatgccatccaacatgtctgagaactcaagaaggaaaatgactggataattctcattggattttgaggcatgactgtcattgatgccctagataagagtcatttcaagtgtatattagaaatggagcccagttagagtgggttgaaatatgagtgttaggaaaatagaaaggaagactttcatttgccaattttcacgtattttgtagatgataatctgtgatcaattaatatcaataattgaagatagataatggtcccaattaaatgggggaaatggcaggcatggattaatgacctgctttgctccaacctgctctgcctatggcaggtgtcagagagtattgtggttgggctatggctctctgagagatctcgaaccagttgtgtctccttcatgggttccttcatgaatttgcatacctacaaaatcagcacaccaatcatggccctcctacctaagtcacaggcatgtagaaatgaccaaaggagatatcactcctgaaagagctttctaacttggaagaaaaatgtaaaaaattagtagagtcattttgcttgtctccggatgctgactgaattatccccttacagattcctgaacaacgttggtttcttttttccactgataatgatgctgacgtggatggtgtctgtggccagcatggtcagaaagttggtgtatgagcaggagatacagatagaagaggtaaatatccttaaaccttgcctgggagacaaagatagggaggctggggactttggaaatggatcttgtcccataaccaacctgagcctctctgttttgcttccctctcctctgctggggttctggtgtacaaaatagctgagtccctgttccagaaagaagattttatgttgaagtctgaagcaatgccagatattttccactgacatgaaagaaagccaaagaatagccacatgagattgcaagaacaaagccagtgttcctcattcagcaacttttttaaaacccagaaaaacatagcagcagacttcccatcttaatttatgcttagaattttttatgtagagaccctgctattttttttgtaatactgttataaaacttgaaactatcataacttaaatttttttatttccataggttttttggggaacaggtggtgtttggttacatgaataagttcttcggtagcgatttctgagattttggtgcacccatcacccgagcagtgtaccctgtacccagtgtatagtcttttatcaatcaccatccccaaccctttactctgagtccccaaagtccaaagaatcattcttatacctttgtgtctcatagcttagctcccacacgtgagtgagaacatatgatgtttggttttgcattcctgagttacttcgcttagaataatagtctctaattccatccaggttgctctgaatgctattatttcattcctttttatggatgagtatatcccatggtgtgtgtgtgtgtatgtgtatatatatatatatatatatatatatacacatacacacacacatttatatatatacatttatatatatatatacacacatatacatatacacacacacacacacacacagacattttctttattcactcattgattgatgggcatctgggttggttccatatttttgtaattgcgaattgtgctgctataaacatatgtgtgcaactatctttttcatgtaatgacttcaggagtgggattgctggttcaaatggtagatctacttttagttctttaaggaatctccacactgttttccatagtggttgtactaatttacattcccaccaacagtgtaacagtgttcctttttcaccgcatccatgccaacatcgattattttttgatttttttgattatggccattcttgcaggagtagagtggtattacattgtggttttgatttgcacttccctgataattagtgacgatgagtatttttccatatgtttgttgaccatttgtctatcttcttttgagaattgtctgttcacgtccttcacccgctttttgatgaaattgtttttttcttgcagttctttgtagattctggatattagtcatttgctggatatatagattgtgaagattttctcctgctctgtgggttgtccatttactctgctgattatttcttttgctgtgcagaagccatttagtttaattaagtcccaatatatttatctttgttttcgttgcatttgcttttgggttcttggtcatgaagtatttgcctaagccaatgtatagaagggtttttctgatgttatttttctagactcgttatggtctcagggcttagatttaagtcttttatccaccttgagttgatttttgtataaggtgagagatgaggatccagtttcattcttcaacatgtgggttgccaattatcccaacatcatttgttgaatagggtgtcctttccccactttatgtttttgtttgctttgttgaagatcagttggctgtaaatatttggttttatttctgggttctttattctgttcgattggtctatgtgcctatttttataccagtaccatgctattttggtgactatgtccttatagtatagtttgaagtcggataatgtgatgcctccagatttgttctttttgcttagtcttgctttgactgtgtgggttattttttggttccatatgaattttaggattttttttttagttctgtgaagagtaatggtggtgttttgatgggaattgcattgaattgcagattgcttttggcagtatggtcattttcacaatattgattctacccatccgtgagcatggcatgtgtttcctttgtttgcgtcatctgtgatttcttttaacagtgttttgtagttttccttgtagaggtggttcacctccttgtttaggtatattcctaagtattttattttattttttgtagctattgtgaaaggggttgtgttcttgatttgactctcagcttggtcactgttggtgtatagcagagctactgatttgtgtacatgaattttgtatcctgaaactttgctgaatttatttatcagttctaggagctttttggatgagtctttagggttttctaggtatatgatattatcatcaacaaacagcaacagtttgatttcctctttactgatttggatgcccttcatttctttatcttgtttgattgctctgactaggacttccagtactacattgaatagtagtggtgaaagtgggcatccttatcttgttccagttctcagaggaaatgctttcaacttttccctgttcagtataatgttggctgtgggtttgccatatacggctcagaccatagtgaaataaaattggaaatcaactacaaaaagaacactcaaaaccatgcaaatacatggaaattaaataacatgctcctgaatggttgttgggtcaagaatgaaatcaaggtggaaactaactgaactgaatgataatagtgatacaacctatcaaaacctttgggatattgcaaaagcgatgctaagaagaaagttcacaacgttaaatatctacatcaaaaagtttgaaagagcacaaatagacaaccaagggtcacacgtcatggaactggagaaacaagaacaatagaaacccaaacctagcagaagaaaagaaataacaaagatgagagaataactaaatgaaattgaaacaaaaaagtacatttaagtctttactccatcttgagttaagttttatataaggtttaaggaaggagtccagtttcaattttctgcatatggctagccagttttcctggtaccatttattaaatagggaaccctttccccattgcttatttttgtcaggtttgtcgaagatcagatggttatagatgtgtggtcttatttctgagatctctattctgttccattggtttatgtgtctgtttttgctccagtaccatgctgttttggttactgtagctttgtagtatagtttgaagtcaggtagcatgatgcctccagttttgtttctttctcttaggattgtcttgactatacaggctcttttttttggttccatatgaattttaaagtagatttatctaattctgtgaagagtgccaatggtagtttaatgggaatagcattgaatctataaattacttagagcagtgtggccattttcatgatattgattcttcctatccatgaccatggaatgtttttctatttgtttgtgtcctctcttatttccttgagcagtggtttgtagttctccttgtagaggtccttcatccttcacttcccttgttagctgtattcttagacattttattctctttgtggcaattgtgaatgggagttcattcacgatttggctctctgcttgtttcctgttggtgtataggaatgcttgtgatttttgcacattgattttgtaacctgagacttggctgaagttgcttattagctttaggaacttttgggctgagacgatggggttttctagatataggatcatgtcatctgcaaaaagagacagtttgacttcctctttttctatttgaatacgctttatttctttctcttgtctatttggcctggccagaacttccaatacagtgttgaataggagtggtgagagagggcatccttgtcctgtgccagtttttaaggggaatgcttccagcttttgtccattcagtatgatattggcgacgggtttgtcatgaatggctcttttataaaaatttaatttaattttaagttccaggatacaagtgctcatgaaaatcaaataccaagcttgaggaggcaatgtccttcccagggcccttcacagggctgaatttgcaagcaagcagatttacctttccactggtccaccttctttctcctaccatctgatttgttcttcctcaagtacgcatgctgtggtaaccttgggttttttctctttttggtagtatatgcggatgatgggagtgcatccagtgatccatttcctggcctggttcctggagaacatggctgtgttgaccataagcagtgctactctggccatcgttctgaaaacaagtggcatctttgcacacagcaatacctttattgttttcctctttctcttggattttgggatgtcagtcgtcatgctgagctacctcttgagtgcatttttcagccaagctaatacagcggccctttgtaccagcctggtgtacatgatcagctttctgccctacatagttctattggttctacataaccaattaagttttgttaatcagacatttctggtaagtaagttgttttgtaaaaaaaaaaaaaaaaaacaacaaaattgcaatctatctaacaagacaaaatcccaccactctcactttttcaatttgtcatgttcatatctacatgggctttctgatatctgctttttaaaatcttacccacaaatgcaaaccgttgaaactgcagggtttttgctggacagcagcccattaagaatgtccagtttttacataacagagactttctgcagattctggaaaataagcaacattcttaaggaagcatataactttattttctctttcatgcacagaaaaaagctagatttctaaagcaattttagaagtaaaaaataagcattttttcttgaaacattatgaattacatcacattaagtggaaaaatctctctgttagcaatgtcagagtcactcatccatttaaaatgtacctcctaaaaacgtatgataacactttcaggtctgtaacatcaaatacgtagaacataaaaaagtattcattcttttatggcaattgctggcaagcgcagtgcctgacacatagtaggaactcaatcaaagcgagggtgaaccatcactattaaaatgatctgtttcagagagccagtggcatcactataaacacttgcactgtgctcaagactttattctctccagcaggtcaagtgacttcctaaaattgcagtctgttgagagataagacagagtcattaacagagactttggggaggtgtcaaggagacctagattacggggctgctcaggggtatttaaaggcccttaaaagtcctttagtccagcacaggattcatgacggccccagtgcttcactcacttattgggagcaaaacaccttctctgctcatttagggcctagagtaaaatatttctatgaaagccaagtgatttgtcttcaacttcagtaaacgattcaaagctgtctggtttctactagccatatgctcacaacaaagatatacatacagaatgaaaaagtggttatattccatcagtgttttatctattggtatgtgttcattggtcttgattagcttatgttacatttgtaaaaacccataaccaataacttcctgttagtgttaattagctgttttcagaataattaacacaagtgggaccattggtggtccttccccatatactccttgtacatagaaaaagagtcatccatgatctgacctgattttcagatggtgttatttttaattttacttcagtcattatattcgtgggttctgtgcacataaaatttgattttctgtttacatattcaaatgctttctagcaagtaaaaaatatctaactctggtacactgtattttttaatgtaagatatttttttcaatggggtttcgttctaacataagacttctccactgagatacaataacatttttcttcaatacaccttctttctagtgtagaatagtgtatgcattccatcagtcagcctgcagtgtgctccagggcattcacttaataataaaaaatagtaaattactctattccagttttcactgttttgtgttacacatttctgtgtatgatacattggatttatgacacttcaagcatctcggtaaagagaaataattccttttaacgttaaaaactagcttgttatcatgcttttcagagtgggctgacattccgctaagattttcagatcaaaatatttaaatgactgcctgaagcgatggttgggcgtcatcagaatgaaaagttgtcatggcttcgctccttgaattaagtgttgtggattttctgtggtcccaatcaaaacactaacgtgcagtttttctccatcaatctgtgggcagtgccttctttcgacaaccgcctttggacaaggggtattttttattacattcctggaaggacaagagacaggtaagagcatgcatgtgtaaaaagtgactctcagtgaatcacgtttttggaaattaatagttatattgcaagtgatccagtaggaagtcttcattatcaagtagagcattcagaatgaggtttggatatttgctttcactgttgtatacacctcccactatctggtagcaccagttttgagaacaatcaagaataatcatggcatcccttgcttcagacactatccaggtcaaccacccagccaatgcttgggtcttccttataccacccttgacgtctggtctggtgagtgaccttctgaaccttccaagatagggtgtgcaaatgtgtccatctgttagatcaggggtccccaacccctgggccatggagcagtccgtggcctgttgggaactgagccttacagcaggaggtgagcagcaggcaagggagagaagctttgtctgtatttacagccactctccattgctcacgttatcgcctgagctccacctcctgtcaggtcagtggggccattagattctcataggagcctgaacgttatgtgaactgtgcatgcaaaagatctaggctgcatgttccttatgagaatttaatgcctgatgatctgtcactgtctcgcatcacccccaggtgggactgtctagttgtaggaaaacaagctcagggctccccgtgattctacattatggtgagttgtataattattttattatatattacaatgtaataataataggaaaaaatgcacaataaatgtaatgcacttgaatcatcctggaaccatcctctatcccccggtctgtggaaaaattgtcttccacgaaactggtccctggtaccaaaaaggttagtgaccactgtgttagatgattgttgacctgggatctgtcttcctggatcctctacccatgttttctagttcttcctttctaattatccctttcacatgaccaccatctacatatttgttggctctcatctttactcctagatttactagattgttcctgaagatcaagatccagaaataggtctaataagcataaaatagagtgcaattatctcataccaatgcaggctaaaatgattttctaaaaatctattggcagcattttttgcttatattgagaatttgacaactaaaattctaaaccagaacagacatatatttcatagatatttgtatggttttttttgggggggggtgtttttgtaaacagaggtaaaaccatgctataagtaaaatttgactctagctattgttgtattagccagttaatttgtactggtctttgagttcttagagtttttcaataagatgtattaaaatgttcttttacagatgagtaatcttgaatgatttcttctaactgatctttagaataaattgaatcaaaatgatagaaacaaaaaatggaaactgttagaccatttgaatattttggtctaaattccaagtacacaatgattaaaatgtatattttattgaactgtagcctggtaccatagggaaatttagaaaggggaatatttttcttaagttgtatgttaatccagaaataaatcacaaacctattgtaaaaaaataataataatttcccaccctagttcttatatatcctattatatattttccaagagcacagagagttacacagtttagaatttgggttctcaaggagactttaaaaaatttttttgaatgcttattttccttaaatataaagtcctttctactcaggtaaataaaaccagatatgagtaaggtgacctttaaaactttttaaagtattagatattaaaaagtagttaacaatccccccacctgatatcattgaaataggtgtaagattgcacaagttaacatttcatgaaaagttatggccagtgatattgaccttctttttgttttagttctgttcaacttcacttgagcttccagaagtaatgaactcatcatgacaaaatctaccataaaagagcttgtgcagttctaactctgacctttttcttcctgctagggattcaatggaataatatgtaccaggctctggaacaagggggcatgacatttggctgggtttgctggatgattctttttgattcaagcctttattttttgtgtggatggtacttgagcaacttgattcctggtaagaattttgccttttgtaagataacacaataaattttaaaaacagtttgaattaatatgcataaatattagaataatcacttattctttaaggaagatccagaaagggaagtcttaggatatatatttaaaaggagctgtacatttttgagaaaaaatgtgatgcctttgtttcccaagtgaaaggtaaaaggccatgtgagggaatagccaggatgaaattagcatgaaaactcaccaggcccaccaagcagctccccaaaagtgggcttcagtctacacagaaaatatcctggtttctcagagagtgtttggggagggcaggcatgagggggtgagggtgggggtgctcagagtgccttggccagaaagtcactcctagtggggatctagggaccaagcgctcagccagtggcaggtcggtgcatggcaggacctggggagaagcaggcagagcctaaaggcagctggacagggtgggctgggagtgaggggccatgtccaaccacagggctttcactgttgtcacggatatggggtttcccaaatgtggtggtgcccttcttccctggtgtggcaggcatgccccagagtctggaggacaagtatatcaatggccaaaaaaaaaaaaaaaggccagtaatggtaatgggttttcctagctgttttgggaggaaaagaggcacgcatacctttacctttttggttcaggcccgaaagagcagaaatagcactttaaaattacttattttattttttagagataacactttgatggtggtgtattttcttgctgaaattacttggcaactctggttctatgcttttcaaagcaaatagtgtctaactaaattaaaactaaaaattaaaaaaaatgattctaatcttatacaaatgaaaatggagggatagaaagaaaacaaatgcagttcattctgtttgtgaaaacacattccagacttggagagctcatgaatcatttagggatgggtaaacataaaaataatatgggccactgaaaagatcattttacacaaaagtaggaatatatggccctcaagaggtagagagagaacataaattggaaatgtgatttatttaggaaaaacttagactgcattgtcttggtactttgaataaaatttaagaaaataaaacttaagaaataagattctaggaaataaaggataaaacaaatgagttgagaaggccaagggttcaaggaaattggatgagaagcaattgactattgagaagaagcaaaaataacataagaaagtaatgttacaaaatacatttgtgatgtccatctaaaatacaaagaccagcaacaaagtctactctctgcaatgttgagatgaagataaaatgtgtcccgggacccagaatgatctgatttctccctcaaccatcagcatctaaggctagaggctcttggggcaatatttttctacattatggtaaagcaaaggaacattgtattcagctgagactttccctctgaatcccactgtggaattctaaattgaaaagttttaaaagagactgagccttgaggtggatgtctggtgtgcagagggctcactgtctaggtcatatttgaagggaagaaaagggaattgggagtagactcatggaggaaggtaattgaactcagaaaagctgagtgatggtgagaatgtcctcaccagtgggacagtattgagtcgttccttatcctgtgggtcaggggatgtttggctaagctggtggcttttaagaagaaattctttctaaagttcaatgaggtcaacttgaggctcagaggaaattaaaaaaaattgttttcctcaggggaccaggagattcaaatgctagagttggtaatcttttggaagtaccttggccatctgaaccatgccacatttggaactcacgtatattcgactgaggaaaccgtgatctcctgttccttctttcatctcctcctgtccttccattccttcagactcctaattccctgccctcccattaggtgaaggttaaacaaacaatccaccatcttcatacactcacactgcaatcctgcagtctcacaatatggctcatgattaacatctacccaatatgttaaacttgagctatttcagaatcagctcttaccctgccacatccaactggagaaaaagatctgctgattttacttcacaagtctcccttaagttcacacggatgtaccttttctagggaatgtctccatgttttcatcaagccatacaaagtattctgtgacctctaatgagttatgattcccagatacactggatcctacaccctgcaaagggaagcaaatgcagtaggacctcaatccacctttgaatggcagacactcatttcaacattttgtttagtgaatttagagtgggaggttttatattttctctttgtgattgtgacactaattttagctaccagctagttaggaaaaaagatcagagtctattacagaatttaaaaaaaatcaaagctcgcacatatttataacacatatttaaaaatacaaaggcatagagctgaataaatatgtcaataaatatttttgactttatcacaaaattcagattcttttatttcaaaagctaaaaataagagttggcaatttgcatattcttaaattgcacaaagtatttcttttccactttgacaaagtctgccaataataacaaagaatataattgccagacactactgatgggctttcagatccataaagagggttataatttctaggaggtctcagacccaataccttctttttaagagaaatattttatattacctcctttactctcttgaaatgaaacttatggataatgaaaactacctgcatatgagtcttaaaattaatgtaatttaaaaattttaatataaaagagaaatagaaactaatttatagtaagttctcggtgctcaggcatgaatgcatcggaacacagaatgagatattcagttgcttatgcttatgtggaataagttcggatttaaaagaaggagaaaggtcagaagccatttggcactaaaaggaaagaaaatgcataagtaaagagaaatgtagatactagaagtaaagctaatattaagtagtactagatcagacttattggtatgtgattataaagatgaaaataacttcagttgaagtaggaaaaacgtgggaagaaatattatacatgaatgaagtgaataaaagaatgatatttttgtaaatgacctgggtctttatttaaaagtaatcaggaaattccctttgttaacacatggggcaggtaatgacaaaacataacagaagatccattttctgtcttacaattctatctcatttcagtttctccattcagcctccagtctttaaagacgttggagatctattctttagtagtgacaggaaatagaggactgattggacaaaggaataatattaataatataagagggttttatagagaagccaaggggtgaatatctgggaacagcatcaaaataagattgaaaactaatagggagcctcatgttaatcatctcaatgtgtaattttcaccaaatggtcttattgtgctatacagttttaaaatatatatatcaaatgacaatgtaacatagttactaacccttattaatacaatttagtgcattttctaaatttctactattcaagaatatctggttttaagtttgttaaaagcaatcttcacatcttttgtcatgtgtttgtatataatggggcagaatgaagattgatacagacatactgcattgcaaactcaaacgcagtgagtgacatcactattgatggcgttgttttccaaaacaatggacaatttctgctttaaaaaataatcttccactagtttacacagtggttgaatttctgaaaaatttagtgtatactgaaactgcacggaaactttgagtttatatgtcctaggctcaataaccatgaaacactttgcatttgcacggctgtgtgtgatcaggctcacagaaggcaagtcaaggacatttctttgttgcactttgtagggtatcaactaacccaggcatctgcacactaaaggcaattgtaccatccccattgtattaatcatacttttttattttctgtatttttgaggctttgactggggttgaaggagtgcagttactgaccctagagggactgttccttccagggatagccagttcctagccatagtaaaggactcacctgtggatgtgcctttcacaagcaaaaaaccaatccagagcccacgcccctaccacctgctgtacggggcgatcacactcggggtcactgtccacctggcctgatcagcccagggcaaggtaccagccaactagggacagactctctcccgaagagcctgatgaaattattcacagtagttaattagaaatgtacttgcccttcctcacatgttccttcccttgaaaaccacagtaaaggctcttgttcacattcccacagcacccctccctacttcccctgtctcctgactgacactggtgcttccctgtgtgaccctgtgtggtgtgtcatgcctccttctcttggggtctgtgagtaacaaagtgtagtttcaatgacagttatctcctgatttgttggcatcatcatacttgagtaataataaaatctatattttaaaacactgttccagagtctcctgtgggtaggagggtgtctccagatgggaggtaggaggcaggaggcaggtgagaaatttctctcttttgctctctgtcacacacatacacatacacacacacacacacacacgcacgcacacaccccatacctcagacaaatacttttctctcgattttctttctttgttataaagtgaccctgtgagtatgaccccagcatttctcagccccggtgtctgactgggagactctgtagatccagcatcagatcatttcctggcctgcggggctcagcgtcaactgcaggtctccacgctcgagtcaagagctcacaagcaaacatctggtcctctcgaagagttttcattgcataaactctttttatatgcttccaattaaatttgattctgctcgatctgtctaatttcattgacctcttcttttatcactgtcagttttggggggcaatgctgattagtttcctggcctgcataagccagcaggcagttccccttgaggagaaaagctctgtgtaaatggagggcctttgcacatattaatgtgcccaattacatctggtaatgtgagcaggttgtatgtgcttctagagtgtgcacgtaaaacaaatttgaatttataagcaaaagccgattgcagaggcaagccaaagagctgagcggcttccacgccagcttgcatttggcagctctctgctttagttagattagtagattaattagggggttttaaaagtccagacagattatggctgagatggtttaattagcaaagcaacccttaatattcaatttattttttcataactctggaatgtctttcacgtttgtttctacttcccatccctgaagccattaccttagttcaggcctcactgtgcctgatctggacttacagcgagttacagtgcctttgtaactccttcctactcctctaggtatccccgaccccagcacctcacctctgcatcctacctgcatgttgacacaaagttatctttcttaaaaatagaccaaatagaccatgtccctcccctgcatgacagtcttccccaactccaaaatgtctagagaataaataatatcctcagtggctctcaggccacccgaacctgctctgctgcagattcacgcccctctctctattcccgttgtgctgatggggagttggggggcagtcttcaatgtgcccagcacacccacacagggtaggcagataaaatacagggcacccaggtgaattcaaatttcagataaactacaaataatttgggggacatattcatactaaaacattaattgttgtttgtctgaatttcaaaattaattgaacatcctgtgtttgtattttctgaatctagcatccctcccagcatctctgtcttttcattctcattcctttttcttgggttgaagggcctgcttttgttttgcataggtggaaacctatgatgacaatatcatcttgtattcttctctcaatgattttttttttttttggtcatctgtactagaatgaaggtcataagaaggcgcagtctctgcctgattcattggcgtgtccctcgtaccactagagggtgtgactagttgatttctgtttgatgactgacatcttcctggaacaggaaggtataatccggagaacagaagggcaagggatatgatgttccagatctaggtgacttctgccctgctcctttgtcactgtgctgaggcctcacctgtcctactcattcttgggctgacagctggaactgtgagccctgggagatgagccagcatctctcctcatacctctgtacaaaatgcttagttattcatttctcaacaaagcatctcccacagtaaatcagggctgcaggaaggtgtcatttcccaaagactcaagtgagaaaacaaggatacaactaataaagagtaatgtcttagctccattgcaagaaactggtgactcctgacattgttgcagttgtctatgtgtgcacacttgtgtctgtgtacatgtacatgtgtgcatgtgctgcatgaatatgtgcatgtgtacatgtgtactcgtgtgtgaatgcctgtgtgtgtgcatatgtatgtgggtatacgtatgtgtgtgcacacacacacgtatggtgatcttcactttgagtcatggccctaagtttgaaatcatatttatctttgtacgacttccacttatatcgaagtgaagcagagctgaggcttgcttcaggatttccttgcgtacactcaaaatgtgaaggtgttcaatgacttcatttggaacaggcaaattgtgccttatttcacctttagaatgtgcatgtatgaaatattcttttctcccctatggttctgaaaaattgagctataatacatcagatggatatgtgtttattgtaaaatgtttgaaaagtttatagagaagcaggaaaaatttttgaggaagcaggaaaaaattcagttatctccaatatcaccaaccagaactaacatttcccaggctttttccagacagttttctgcacctagttgggttcacactgtatatgtaaatttccctctgttttaaaaaaatatttttatcataagcatttatccacatctttgaaagtactgttaatggctgctcaacatttcattaaatgaaagtaataacttcctggacctttctcctactttgcaagtttaaataatttctgctttttccccactataagtaatgctacagtgaatatatttatgttcagatgtgtgtccccactttgtcattgtgtcatctagaatcctagaattttaattgctaattcaaatctataaacacttgaaggcatctggatcccattgcctactatccttgctaagggtggtgcccacttaagctgcgactgagtgtggttgcctgagaggcctctgagccgaagacctgcagctttgtgagaataatcttcctgatgtgtttgcttgctttctgtctcctttgatttccacacactcattgttcacgtatgtgtcaacaggggcttttcgtgtaattggtactggaagaaactgtgcttctttcttgttgtaaaaggcaacccaaagcatcctcatgactgcacttgcgtgttcagacaggcaggagctgctagaggagaggctaaccagtgtgtagcttctggagccatcagctgcgcgtcactgggcaacccttgctgttcctccttttcttattgggaaggtagaggtgataattttacctgacatgttggtggtcacaggactgtgtgaattaatacaaccagataccctggacagtgcctggaacacagtgagtggaatgctggctgtgatatgacctgattatccagctgctactcatcctcttcctacagagggatggtttttgctttgcaaggttcttggaggacacctgcctgcattaattttctcagcctgccataacaaagtaccacaaactgggtggctcaaacaacaggaatgtgttgtctcacaatcctggaggctaaaagtctgagatcaaggtgtaggcctgtgtatgtgggtatatatatggactggtttctcccaaggccactctccttggcttgcagatggcattgtctccttgtgtcattcctgtgtatctgtgtccaaattttcttttatgaggacaccactcacattggattagtcctcgctcttgtgacttcattttgccttcattacctctttgaagaccgtgtctccaaatacagtcacattttgaagtacagggggttagaacttcaacatatgaaacctgcggagatacaactcagcccacaaagaaaagtcagtgctattcctcacagcagctgaacagcttcccttcactttatgtatttatttttttgtaacttttaagtgcaggggtacatgtgcaggtttgttacataggtaaatgtgtgtcatggaggtttattgtacagattattttgtcacccacgtattgagcctagtacccatcagttattttttctgatcctctcccttctctcacccttcaccctccaaaaggccccagtgcatgttgttccccgcagtgcatgttgttcatgtgttctcatcattcagctcccacttataagtgagaacatgcagtatttggttttctgttcctttgctaacgatgttagtttgctaaggataatggcctccagcttcatccatgtccctgcaaaggacatgatctcattcctttttatggctgcatagtagtagtccatggtgtatatgtaccacattttctttatccagtctattgttgatggccatttaggttgattccatgtctttgctattatgaatagtgccacaaagaacatacatgggcatgtgtctttataataagatgatatatattcctttgggtatatactcagtaatgggattactgggtcaaatggtatttctatctttaggtctttgaggaaccaccacctgtcttccacaatagttgaactaatttacactcccaccaacagtgtataagcattcctttttattcacaacctcaccagcatctgttattttttgaccttttaataatagacattctgactggtgtgagatggtatctcattgtggtttcgatttgcatttctctaattatcattgatgttgaggtttttccatatgattatcagccccatgtatgtcttcttttgagaagtgtctctttatatcccttgcccactttctaatggagtgtttgttttttgcttaatttatttaagttccttatagatgctggatactagacctttgtcagatgcatagttaagcattcctatacagcaacaacagtcaagcccagagttaaatcagtaacaaacttccattcacaactgccatacacacacaaaatatctaggaatacacctaacaaggtgaaagatctctacaaggagaactacaaaccactgctcacagaaatcagagatgacaagaacaaatggaaaacgtttcatgctcatggacaggaagaatcaatatcattaaaatagccatactgcccaaagcagtttgtagattcattgctattctcattaaactaccattgatattcttcacagaactagaaaaaaatgtttcaaaattcacatggaactaaaaaggagcccgaatagccaagacaatcctgagcgaaaagaacaaagctggagacatcacattacctgacttcaaactatgctacagggctacagtaaccataacagcatggttctggtacaagaacagacacatagactaacagaacagaatagagaacccagaaataagaatgcacacctacaactatgtgatcttcaacaaacctaaaaaacaagcaatggggaaaggattttatatttaataaatggtatggggataactggctagatatatgcagaaaattgaaactgaaccccttccttattgccatatacaaaaattaattcaagatggattaaagacttaaatgtaaaacccaaaactataaaaaccctggaagacaacctagttaatacaatttaggacatagtcacggacaaagatttcatgacaaagatgccaaaagcaattgcaacaaaagcaaaaattgactaatgggatctaactaaagagcttctgcacagcaaaagaaactattgacagagtaaacagacatgtctcccattctgtagaattggaggaaaattttgcagaccttccctttactttcaaaaggtaatggatacatgtgctctcctttgagtgcatgaacatctctttctattttttgattagaatgtgcgagggcttgcatatctctcttctgcttgatgatcaaagtgctataatagtctttatatcagcctttttaattctaatcagttgtagaatttaggcctttaggtaagttacgttcatcaaacttaaactagaatggatgtgttaaaagaaaattgggaaatgttaataatgaaatcccttttcatttcaacatgtaatgagggcaaagtgactgttaaatgggctgaaatgaatttggagaatacttttgaagaatggtaacgtgtttcatatggaaatgttagcattatgaattattcttctttatggaaatttcaattgattaatcccctcctacacttacctcatgctcttcctcttgtctaggaatccatgcaaacatcaaagataggcaaaagaagaacaatcacaaaatagaagggcagtgtggggcagggtgggactttactctgggaatattcagcaattatccaaaaagcatgtattgaacccctactctaaagataaagtcttgggggaagtggctgagagggggttttagcacatggctgtggatcaggccgagaagggagagttagggctccactgcaaaactaatagctgtgccctgggatatcacattttgtatatgggacatatattaaaaatattaacatgggatgacattttatattaattacttaagatattctaatacagtaccttcatctaaataaaaaattaaactaattttaattgtttcattttttaggaacatttggtttacggaaaccatggtatttcccctttactgcctcatattggaagagtgtgggtttcttggtggagaaaaggcaatactttctaagttctagtctgttcttcttcaatgagaactttgacaataaaggtttgtaaggagtagaattattagatgcatgtatttttcctttgatccattttgatttttttttgtttgtttttatggtccagccttttcaagtgtgtgctgattcctagagagacttacatttaggctgtcttgggctgggaaacagctgcaagcccaagatgtgggaaagtatgccatgacagtgtttgttctgtgaaacccaggaaacccagggagttcccattaattattatttagcgtcctcccctctgtgcattatgtgcatttgtgtgtatattacaatttagaaaaattgaagcgttagtcccaaaatgaatatgtgtaagaaataaaagcaaatatgggcagctaccctgtgtaaagcatttaaaaatttttaagtgttctcacccatgctggtttattcagtgttcctgtgtgagggagaatatcactgtcccttacaaatagggattgtggttctcaggagataggggcaggactgtccctgtgcctctgcactccagagtcatggcctgttcctgcaggtgcaggcacagggcacctctgccaaaggatgaatccataggccatctccatggaaatagagatgcatcactcagagataaacaagctcccatcgtggtgggtttagattacaagtcaacattctaatctaaacaatctaaatatttttctgaattatgaatcttttagaaaatgtggaacacatcaacaagcacctatccactctcacgtcctcaggagactatttctcatgaacattttatgtgtaactaatctgcctgttgtttttttctctacttaaacaaaaatacatgtgtgtgtttttattttttttattttttacaaaatggttatcataagggttcaaaactttgtaatcagtgatatcacttaatgtttgccattatatagtctgcttcttgttcttgctaaagaaagatttttgagttgatttgtgtgcttcacagagctggaattcaatttcaaagcagaatgctgaattaataaatatgagcattatttttagggcttttgaagtcttttcacaatgaattttcatctctctcacagggtcatcactgcaaaacagggaaggagagcttgaaggaagtgccccgggagtcaccctggtgtctgtgaccaaggaatatgagggccacaaggctgtggtccaagacctcagcctgaccttctacagagaccaaatcaccgccctgctggggacaaacggtgccgggaaaaccactatcatgtgggtcccattttacccttatcaaacactgggcatttgattcttaaaacttcagtttacctgtgagacagaaggtttgatttcttttcctttttttaaaattttgagtctcaatacagagtttagagacacgggtgaaaggcagagcccctcatgagtgcccgtgtgagagaggccctatgtcttcaaccgcacaggtgcactgtaggcctggggctcagtcaaaggggtagtggtggatagctttttaaaaggcttaattcttgtattttctacaaataatttaccatgttgtactttagtctttgaaagtcctttggcactttcagcgtttgtcctactaagtatcatcttgcttgcatatctgtaggaagaggaatatcacagtggtacttgcaaattttttaaacacctgattatttttcttttccatgttctggtttttgtgtggttcttttctcattaagggtagatgtttggtttaggattcaatggctctagatttgattaaagaatcaaatcatgtgctcccagagaaacaatgaattcaaacattcacagccttgggctggctgtagaagtggaggtttaaggttaaactactaaaattatgaaatatctcttttgaacaaatcactttctcttttgttctttttctcactaaatatgtagtattaaagtgtgattagttaaaacaatgaagagggctttgcctcagacttaataagaaaggtagaaaaataacacatgaaacttcagaaatctcatactgaaaaaatagaaagaaagaatatggacagtttttatttgttccttggatacagaaatggacctggaaaagcgtgtgagtgttttttttagtgtttgaaaattgggaaaccacaagttgcacaaataatgactcagccagccagttcctctcaccctgcttttactaagacacatttcttacaaggaaaacctgggctgcttgtttagcagaatgatgagaattgcatttggagtttctagatgatttaaagttcaatgactgtgttgcttttagtgtacatttgtagtacattttgagtcatcctaagtggctgcctccacctggcaattcttagatgaaaggctgagaggtcagtcaaagacgggggggtcttcactatttaaaacaacagtctttgagacttctagggaatgtgtataaactattttatagtatcccccagataggtttgaaaataatatagcaaagagttttaagttcatcgaggtttaatttttgtgcagtaaacagtatctgttgatgtgtacagtttgatgagttttgacacatttggttagtgccggaacaagcaccacaaatacagaacctttctatgctgctccaaggtttcctgtgctctcctttgaccctggccttcatgtgaccactgatctgctctttgtcactaaaaactaggttacttattctagaatttcttgtaaatgggatcatgtctggcttcttgtactcagcagactgttttggggacccaggcatggtggtggtggcccagcagcctgctccttgggacagctgagtggtatccaccatatggaggcaacccagcttctttatgttttcatccatgggttgcaactgaggttgtttctctttgtcagtgattgtgaacacagctgctgtgaacatttgtgcatacagctttgtgtcggcacacatttaatttctcatgtgtaaatactaaggagtggatttgctaggtcctgtgtggtaggggcatgtttaacttttcagaaataagaaaccaatttaaaacttaaataataaacttcctgaaacaaggaagcagaactaggcaattctgaggcttctgttggtaaagtcggtcatgtgagcttgtggtggcaggctgcttgatttcttgtggttttaacacacacagactatcccgggagcagcggaaagaagactggctccagggttggggcctagctttgtatctctgttttgcttatatttaatgatgaggatttaggtatatatgtcatttctttagcatgtttcctcatctgtaaaaagttgaatgttatcatcttaaagtcccatacaactataatgctctatgattgcagttcagacttacaatggttcaacttaatgatattttgactttatgatggtgtgaaagtgatacatattaggtagaaaccatagtctgaggactcatacagccattctgctttttactttcagtacaatattcaataaattgcaagagatattcaacaccttattataaaatacgctttgtgatagatgattttgcccagctgtaggctaatgtaaatgttttgggtacacttaaggtaggctagactaagctgtgatgttaggtaggttagatgtaaatagatttttgacttacaatattttcaactttttatgggtttattgggacataacccaatcagaagtcaaggagcatttttatttcatgtggtagcataacatgttaaactcacattttcaacatcaaccagccaatgtaccctcaaactactcacaccttttaactgattgtgtaaaaaccaggtcagcagaaggtgagtgctcttggcaggatgcatgcgccatcctggagctgactggattgctgacgttcacagtatcagcaacgcgtattctccatgctgtcttattttctctggcagatccatgttgacggggctccaccctcccacttctggaaccatcatcatcaatggcaagaacctacagacagacctgtcgagggtcagaatggagcttggtgtgtgtccgcagcaggacatcctgttggacaacctcaccgtccgggaacatttgctgctctttgcttccataaaggcgcctcagtggaccaagaaggagctgcatcagcaagtcaatcagttagtaaacagttgtctctctgctcctcctgcctctgcccattgtgtaaggaagtgaagacaatagaaagagacacttaaaaaatcatctgtgtctacatttataagatgaaataattagcaaatggttgttaactatggaattatgacacagccaccaacactgagaatgtcagaaaaggcttctgtgggaaggcattgaatttgatttgatttgtctttgaaatgtggaagagatgagcacatgtaagcacagaggctgttgatggaaactttgtgtatctggagtaaaaggtccctaggggtgtcctgaaatgaaaagaattcaaaggcagcgggaaaactggttgtcaagaagctgattagtctgccttttctctccttgatccctagctcttcctcaactccttccttccttcctgtcacacacacacacaaagattaagaaaaaaagagccttattagtcatgctaaggagtttgaacttcactgagcaagtaggtgttcatgagtgggggactgtgattagcctgagatctggaagatctctcctgctagatcatagcaggtgccatgggagagactagatacagagtggccagtgtaggcaagaggtggtgacagcctgatttatggtcatgccactggggtgcatgggccaggaaggcctgtatttgaagactattcaaatttagaagaatcaggtcatgttgactaactggttgcacaaggcagggagcagagaactcccggtagggtcacaaacaattggtaggacattggttggtccacatggggggctgaaccctatatgaaagtggaatagcacaaggaagatctagagttgagaatatgtggggagaagtggaaaggaagtagggtatccaggatgggaagcaaggcaaaatccaggcagtgtgccctggctcattggacattgatagaagtttagaccagaggtaaaagggagagacagtaggttcctgattagagaacaaagtggtgtttgagggtgatgaccatggaagcatggattggaggggaagtggagcaatgaaagtcatggagagtagctggagatagaaacattaatccagtgctggggtcatcgattcagcaaacagtggtagttaagtgtgcaggccgtctgtcctgtgctgggctctgccccctcaggaagatgcatggctctggcctcctggggctagtgctgcatgcttggcaattccaatggatggactttgcaaagcagaacgtcaaccatggcgtgagtgtgtggggaaggggcccttggaggcaagcatgtaagtataactggtaatggactgcacattcctaagaagaaaatgtgaatgtcatgaattcttacagaatattgttattttacaatatttttgcaagctttacatttataaataagtatttacaatctgcatttaattaaggtgaaagctcacagggtttgggtgttgttttgtatggtgtaaccttatttctttaccactttttccgctatgtgcttcatgatggtggagctctaccttggtgtttctagccctggaacactgagaaaaagaagaatgagtcttaaagttgtcacacattccatgtgccgttggcgatatgaccagagaccaagtaaaacgtttgcaatgagaatgctccattccacccttccttttacttggcctctccaggtgccattgcttgcttctccatccctgccattgcaggtcacccctgcatcatgcctctgtagagatgccagggctgcagctggccttcctgcctgctgtcggcttcttctaccctttcctccagcccctttggctcacttctgcaaagcttatcttgtccccaaacccaacccccagctgttctccccagatcatggtctagcttcctgatgtcacgtgctttcagtactccacatggagtgctccttagaaatgtacccaggtcctggcccttctctgccaactgcccttcaaggactcacatcacttgaggtataatctaaaggtatggaggcctacaattgtgtaatttacattcttgtgcctattgtctcagatttattatgagtgcccccttccacctcaaaaccctcctcctttggaatataaatttataaagccctgccagcctctcttgctttacctgatccttcattgtgtggtgcctgctgcgctggtcttatggtggatccctgagcacactgaacaggcccttcgctgcgttcgtgttgtgatgggctccgtgtgtagcctgcctcactgccgtcctggctcttctcagacaccatcttaccagagcagacttcctgagcattctgtccagaacaacttcccactcactctcctgagtcccctctatttctctggctcttatttacgacatttatcatttcatgacagcctctgtgtattagtcttctgtttctttccaccagatagcaaaccccttgactacagggacgtagtctgtttggttcactatagtataataagcattctttgagttgaataactggatttttttttcaatttttatttttatattttttccataagttattggggtacaggtggtatttggttacatgagtaagttctttagtggtgatttgtgagattttggtgcacccatcgcttgagcagtatatactgcaccatatttgttttattttatccctcaacccccttgagttcagaaagaaacctcaggtgcaaacaatgaagctgaataagctctactggggggtgtgtgaagtgggtgcagggggtcagctgcccttggttgtatggtgaagggtcatagcagaggtaatgattgagcagcaggctacaggatgagtaaggatgaactggggttgactgcagtgggtgggctgcaatatgttacagcatgtgcagcttagagcgtccacaggcctctctcttgcaggcctgtgcacaggcacattacagaagcttcctaagccttgcaagattttaggttttgttccttaggctgtccatgggcatgaggcctctggagagtgctgagcacctgatacgatggccgtctaatgatggttcacacactctctccagttgcaggtggaggatggggtgggctggggtgagcccaagtcgcagggagagctgggggctcctgcactaagaacagattaggccaggagaggtccagtagggtgaggaggaaagggagatgcagacccaatggggaataagagaggagggggcgtccatggtattccccagatgtctggctcaggcaagcacagtgtttttcaacatacagttgactcttgaacaacacaggtttgaaccctgcaggtcttacttatattcaaatgttttcaatacaagtaacacccagtgtgcctacctcttctgctacctttccttctcctctgcctgacctgcctcaaccacctttgagatagcaagaccagctctccccttcctcctcctcctcctcagcctactcaacgtgaagatgacaaggataaagacctttatgatgatccacttctagttagacaatagtaaatatagtttctcttctttaagcttttttaaataacatttttttcctctagcttgcctcattgtaagcatacagcatgtaatgcatataacatacaaaagaggtgtcaactgactgtttacattattggcaaggcctccagtcaacagtagaatattagtaggtaagcttttggggagttgaaagttatacacagatttttgactgtgtacagtgtggtgctttaagtccctgcattgttcaagggtcagctgtgtgtatagagagagcctatttgagaagttggggagaggaaagtgatgagtttgtcttagagatgtgagttgaaggagtctggaggtttctgatgctgaggccagctgtggtgctaggctcccaccagggcactgccggcctgtgctcctgcccatgctggttttccttatttattaccctcccctccactgctacctcagtttccttggtgtgcccaaatcctgagatccttcaaggaccagatcccctcccaccatggccttgggatgttgtgcaggccatgtgggccagggcaggaaagaagccccttgtgggctctctcagatggccagaggggccttctgcttccagcctcacctctgcaatggctacctacattgtataaaggaggactttcatttgtttaacatcttttttttgtgccagccgctatggtggatatgtgccaggaacttacatgagtgatctcattcaagtgtcttttccctgggatatgggcagaggctccaggagatggtgccatgcagctcggagagggaagccaggatctgacctaggactctcagatgcaaagtgccttctgctgcctttctttcaagctggccactacgttgtagcatgtgggcatggtctctgcaaagacaaaacccactaggcggagagagggcagattctctagcacatttctagtgttgatgccctaatgggagtacggaccctcattggggattccatgagtctgagaagtgaaggtgatttgttaacagttgctctccctggggttagtgaatgcagtagctttaaaatgcactctcggaacttggcaggcagggcaggtgtgtcactagcaacccacagtggggaacgtgtggatgaaggatcgctggtgcattgtggaacctgcctctggggcatttctcttgaaggaatctcaccccagtaaggtcagattgcaaacacgggatcctagaggggctaaatgaggcagtattatgaacattcttttggagatacgaaacaaaacaagatcacaaacacagaatacggtagaggcttttctcttttcatagtgtctgtttttgtgtccttttatatttgaattattttaaatttgcttacctctatcagattgatggattagcttcagttcttgtgggttgagccctgctgggagtttgctgattcttgagtgtgatgagtgcactgtggccttgtattgatcaattctttgtagttttgaatcgcaaaattaggagacctggaggacatgagaatacagcatattgctagttccagagaaaatggggaaggggaacagatactccaagagatattgcctgagaattttgtagagttgaaatgcatcaatcctcagttttagggagcacagcaagttctgaacaagataagccaaatgaatggtttttttcttactgaattcttatactgcaaattgtaatttgcaatatatactcatttctttcaaagtgtcaaaaaactccttataataaaaaaaattaaaattgtaaaaaaaaaaaagaatatggtagaggcacatattacccaggggtcagggtctgaaaggagggcactggggaaaaccatgctcacattacccctgaaaatcttttagtggagagcagcattggaaaatgacaaagtggctctctagaaatgcaccactgcattgcacagttttatttttccatacttggatgggatcagtatttgtttagatgatctcaaattgaaattcgtgcctgtgtttagagaccagctatactataaatgcatgtgtggaaaaagccaaatctccttctggatggatgctgacactgtgagggccatgtgcaaattaagcctgaattgatggaaaaagtccttgagggaccgaagtccattgttaaagtgatggatgatactatacattttatttaaatcatcctttcttcttttgtcccccgctcagcattcacattattgtcataatctctactggagggcattctctactggaaggtggctggttcacatcttgtgctgtcttcagagaatggctggaaatagtaataatgttaatgacagtggacacttggatatacatggaaaatatttagtttgtactattgaaagctgtcttaaatttgagtgggtacttaacgagaaatagctaggtatcttatggactatatattatgagatagcaaattggctatgtccaacctgatttctttaaaacaagtcataggttacctattgtaattttttaaaatgcatctaccctagaccacagtaaactctattgtgattgagattgggagcttaaatcaaacacctaacaatgctacatttgcttcatctttttttgggtgccaggcaaccttaatgattatcagcgcacagagtgttacctagcaacaaagccaatttgcacaaaagcaaccagaataagatcatgttttaggatggtagtcttcaattagagaaagggaaaactgcaaacatctgatttagatccaacatgctccctattactctcctgtatcaccgcttggtttccttaatgtgtagcttcattaaaatgtgacttcaagggaggttgcatccctgctagaatctttagagtaaacatgtgtcaagattcagatcattactgttttgcccttaatttggcctaaagaagataagcatagtcaagagaggaactttgttagacctttaagtcagtgtgatgttgttatgtagttaacgttactacttagagttctggagttcaccatgcaactcaggttggaggtacatttgtttgatagtaatgagatcattgagggcataagtgaaggaagattagaagaggggacaaagcattgatccctggacactccaacatggagtgtatggagagatggggagaaaacagccaagcaggcaagaaagagaaatcagtagcaaaggtggaagacaaggaagtgaaccaagtccactaatggtgagggtgtgatcagaccgtaaatgctgttgagggtcaagtaaaatgaagacttaaaaaatggcctttggatttagtatgtggagggctctagtgacctctggaagagcaattttagtagtgtgaagggaatgaaggtcttattagagtcagttaaagaaagagcggaagaagagaaattggcagcagcacatcttaggagttttgctgcaaaaaaagcaaagaaatatgatagtgtcaaaaaggaaaagtgaggtcaagagaaaaaatgctcctcttccattcaaataattcaaagacaggaatcacagcagcatatctgtacacagatgagaatgccccagtagagaatgaataattggattgagctacagagcaggtggcttgctgggacactattctgtatgggacaggggaagggatttagacaagagacaaggggttgtctctcctgagagcacagcaggctcacttacaatagaaggaccaagagctgagtctgtgagtacttccattagcttcattgtttttcaaggtagagtgcatgcacagaagggattataaagttaactagtcagaagaggatgcatggaattgagagcctggagaagatgtgtttgttagaaattacaaggtctaggatgtaacttggttgtgagtaaatgggattggtggagtgaagggaggatatgctacaacaaatactaataaaatctctaagaataatgataagagtagagctgaagaaagagacagtgcacaagagcagattcagggatgggtagatgacaacagcaatgacaacaacacccaacagtggatgatatgctcagatgacctgagattcaaggctgggggcttcagcagaggtggggaaggtcacagtgagacaaaaggagacacctgccccacatggagacccagtgaaggaaagaaacagcagttatagaacaggatttatgatgggtatgtgttctggctcaagcctttctctcctgtcttatctgaggtcattgtatggttttccatgtatttcaaggacagaatctctttgttccttgcatatgctattctttctcccccaggtcctggcaagtgctttcctcttttttttttttttctggaacacactgttcaagcatccccacttcacttactctcactacccatctgactgatttcatatgccactgtctctggagtcagagggaatccctatagctcctgggactttatcattaccctacttacctatactcttattataatttcttgcctgtcttttccactagaccttgaatttcttgaatcaaggataagatttgatttatttctctagccctagcaggtggcaggtgccaggcattgtaggggttcagtaaacattccttgaataaatgaatggatgattaaagagcagcatctgaaacacattctctggtgcataattgggtcataataggagaaaatatcttttcctcctttccctgctgcctagcaatgttctcaattagaggattatcctgtccttttgagaaggaatttggaaatgtaactttgaaaaaattatttgcttctttttgatatgtataagatcaataactagaaaaacactagcctctaaataactttaaaattaaaaaaaattcaacagattaaaaacttctggccagtgtttacaaattgctgtcttctttaatttttaagtccactctaagcatatgaacaatgcccagaaaccagcagagtggaaatgactgggctttgcaatggggttctcttcctgctgcaatgataggtgttcagacattgttttgctgaccctggccaatgcctcagtggcttagagtcctaggaatgtgtcattctgtacaaaataagtcaaggacttttacttccattgaccttagtggatattatattcactgattaaaatgccatgagtgctaattatcttcagcctccatgcctggttctgggaaaacagacataataagtaaaggggcttgttcttggggaagccccagtccatgtggggggtgagacacttaacaggtacatatgatacgtgtcacagggacccagtggatgccagtgtgtattctggcttcagagtgctagtggttaaatgcagttcttccacttagaaagcttttaacaatatatgctatctctctcttgggttttccaaatacaatgtggttctaataatgagaagaccctcatttggaggttatgtggattataataatttatacacacaaagcacttagactagtagtacccagtgtatgatacatgtctaataaatgttaaatatgattatctaggcttggagctaacatttaaaaaataaaataaagtgactgggatttcctctgtaggaaagcgtttatgaaatgaatgaatgatattcttcagaattatagattctacagtattgtgatgtgatagaaagttctactttaagttggacctctccaagaccaataactcaccatctcctgtgagcttcccatagcatgttgattatacttcatctgtaacatttatctcattgtgtcctaattggatatatacacatgatttatctagataactctgatttcctgcagaaggacctgtgcttcgttgctctttgatgcccctacctttatacccaatatgcaaccagcacctatgatgctatagaccatttgtgcaatcttgcaagaatttataaaatacacatgaatgaaataccctcatcctcacttcctccaccctatcattattacctactgctcttggcttcaagaattttaaaacacacacacacacacacacacacacacacactatggggagcaaaattgtccataaaatgtgtttgtatattgaaattcaaagtgcatcaggaaaacaggcctccactaaaaacagaagtaaaaatacagagtgaaccagatcggtcagtttaatgctaaccagttgcataagatataatagagagcaggccccagcttctttgcataaatttgattgtagaagcatggttggtcccttttgcttacatcttgtttgacacctgtgtagtgaaggttctgtgaaggactgcacaggtggggacaaagtgcagggggccagaagcgttcctgaagttcaatgccaggtgtatgaagaggaggtaggcttccagcttgcttagggtgcacaatgaggcagcagcgtggggccaccccagagggtaccatagacatcccaagtagtaccaatggaagaaatgaagaaggaggggtttggggttgaacacagaaaggtaaccagaacatgcacgtttgagaacatctgacatcttactgacttgttttcttgtctatttgtcttctctgctgactgatctctggttaatgtgctaagtttaatagatcgacctcctctgctagattggaatctcgcagctgggaatgtgttgggagattgcagggctaggcagttacctggtgaaatggaaacatttgtcttcctccttccaatagggtgttgtccacactgggaacacatgaaaaacaggagcataaattattactataaatttaggttgagatttaaccagcagaaaatgcactataagacttggatgaaacattaagtgcacagagtgaacactaaaccctaagaagtgggcttgaactctttctagttcaggatgggaagtatttacattaaatatttacttagtcatcaggcagaaaatgggattcacccaattctttgcttggaattctggaatgttccaggccccaactattcttgaagctcaactgtctggaacatgtcaaatcctcttctgcctgtctagccttctctctggctgcaaaatggcaccatgacttcagctgctggctatcaggaaggtagaaacatgcctgcagctccgaggagacactccactttggtttgagtggtcaagggaaggtttcaggaaggcattgtttaaactgggtttgtaacaatgagtaagatggtaaataggtgatgagggcagtaagtattcctgtagagttaacagggccacagtggtgagggaagttatttgtgagaaaagagagtggatccctggaagaggggtaaagtttcacatggggaaggctttgcactgggtatctgagatctggaactcctaagactgaaagatccctgcaacggaacaggacacttgttcttacattaatagcaaatgataatttatactttgcacgtggcatttcactggaacatctgcattaatcaggaaggtcgggtgatccagatttagtggacagtggccagggagtgaagggcttctctgctgagcagtagagctgggcctgccttgcttcttctgaccacactggtacatcagccattccaccatactccataccctgtagagggatgcagggccctccctggcagaaggtatgagtgaaatgagagacatgcttctccagagaggagacaatgcaagcatttccaagcacaattctgggcagatattgctggtctgcatcacggttggtgtcccttggcgtggttccatctgaacctgaagaaagtcaatgctgctctggtgagactcacgtgtgtgtagcatccacacctctgtgatatatttgtggtttataacgatttcagccactgttagtcattatttctggagtgaaattagaagcaaagttttaaggtgttcagggagaagagtgatgttttcttctaatttcagaactcttcaggatgtggacttaactcagcatcagcacaaacagacccgagctctgtctggaggcctgaagaggaagctctcccttggcattgctttcatgggcatgtcgaggaccgtggttctggatgagcccaccagtggggtggacccttgctcccggcatagcctgtgggacattctgctcaagtaccgagaaggtaggcactgggcctcattctgccttctcttcccacaatattgtgttgcaggaaatgcattgctactgtacagtagaatcaagttgtatcccagtgaggctacattatccttttcagaaaaatataaatttttaaaagcacttatagggatatattcgttagataacatctctatagtgcttagaattgcttactttgtgtttgaccttttaactcaataacagcaatgacatctatgtacattatacattatcatacatgatttcaaggaaaattgtcttcttctggaagcatagtttcttagaagaggcatcccagatcataggacaagcctcccttgtctcagatgaagaaatgaaggctcagagagacgggcatgtgatttacttgtagctacagagaaagtttcctgaactgagggtggatgttgaacctcttgtccatgtttctcacatctattattgtttctttccaatttaggacatttgatgggcagttactaatttccaacttctgattctttctgcaatcctgacagctaggaagcattgttctatgtattttctgtgagaatactcccttttggaaagaaacattgcaacagtaaaacacatcttggtgctggtaaataagtgtagaggcatcagtggcaggattaatacagattctcataaaatgttattttgctttttcttttgccttttgagtataaattttcttctgacttaacctaaagtctccatttccctggaggtgaactaggatttgcaaaggaagaaataaaggaaaaataacaagaaagagtccttctttttcttagcatatagagggctgaggccagaagtcttggaccatcaaattctatctttggagtagaaaaggtactccagtctgtcacttaaagcttaaccataggctggagtcagaaaggagaaaaataacaaaagggagcatagaagatcaatctgtttctttctgtcccacaattttgttggaattatggaaggagaagatagatagaagtgggaaaattgagcaagcagatgtgactttttgttccactctgggctttggcctggcctgggcaattgcactagaaaagtgcaggccacatctgcggtgctggctcctcaatcatggtgcagccacatcggagttcacgaggctcagcagaaatccaggtcccagtgaggcactgagggctggtattccctaccttttcatgcccatgaactttgacattgaaagacagggcttgctaggcatgctgccatggaagtaggggaccccttggagctagctggctggaagccagggcagagattcagccgtctgcagtcagcaggacctactgtgaggcctagacagcctgggagcactctgctctggcctgacccctttggagtccaagctacaaatgccaaggtggggaggcaggcagtgccatgtggttttggttgacacccagacaccagatgaccctgaccacattgcacccaaagattcgaacccttccccgttgccacaagatcaagaagactcctgactccatttacctaagtgtctcttggggaaagacatagaaagggcagacatgggatactgaccaccacttcaaaagattgattaaattttgagatgcaacgatttaaactggacgaaacaatttgcgcactaccctggctggggactgatgcggaagatcaatgggagatagacaaatagataacattgtctctgcacctgtgaattgtggtgcaaattaaataccacaagcccactactcttgtttagtttaaaaattagagctggagtctcaaaggtttagctgacagaacatttttgtaatgagcacaaaggttattttagacagaaaaatagatacaatgaaagtctcagaaacagacagttttcttcagtttctgttgttacaaaccaaatattttctcactgtccttcgttgtttagcaattttttttgtctttggaggacttttttgaaatcatccctgcactgactgaagtgcaaaatcaatagtatgtaagcgattagataggcggtattggaagaaaaatgtgttttcaagaatcaaaatgtatagccatttctgaagcagcccaaacctctaggtaatcatagagctctgtgagacagatctaaggactgtgcagaaacaaacacttccttctgagaagaaagagctcttctgtcggaataccagtgcagtgggggctcagtctacctggaattttgtgtgtgtttcttgcttagttatgtacagtgagggctcttgatcagccctggtaccagtatttctgtgtctcccatggaaaaataaataaggaagcaaaaaataccggtgaaaactggcacatctcaactaaatttctgttctggggtatgcacttgctctacaaatcccatgtgaccctgcagaaatgatcaaatgcttctgagcttcagtgttctcatttgcaaatagagacaattgtaccatctcataggatgtgagagggcacagttgtatgtgaaagtgcacagttctgtatataccatgtgtgcgctcaatcaatgacaggttatcattattattattaaaatagacaaggggcgaatgtgggaagcgcagcttttggaggaacatatcatctgaatcagagagagaaacagtcaaacagtgtcttggggaaaacagtagcattgctctttgaggccgggcatggtggctcatgcctataattccagcactttgggaggccaagatgggtggatcacttgaactcaggagttcgagaccatcctggccaatatgatgaaaccctgtctctactaaaaatacaaaaattagctgggcatggtggcgcatgcctgtagtcctagctacttgggaggctgaggcaggagaatcacttgaacccgggaggcagaggttgcagtgagttgagatcgtgccactgcactccagcctgggtgacagagcaaggctccatctcaaaaaataaataaataaataaataaaaataaaatatatgtatatatatatattgctctctgaggctttggatgtgtcttgaatttccttaacagccactaaaaagtcatcaagggtcaaatgcctgcaaacttaattgaaattctttggaagtttattcatttatttattttcccagcttcattaaagtataattgacaaatgaaaattgtgtatttgtggtgtatagagtgatgttttgatacactgttgactccttatatccatgggttctgcatctatgggttcaaacaacctcggatcaaaaatattcagggaaaggcctggcacagtggcttatgcctgtaataccagcactttgggcggccgagagaagtggatcacctgaggtcaggagttcgagaccagcctgaccaacatggcaaaaccctgtctctactaaaaatacaaaaaaattaaccaggtgtggtggtgcatgcctgtagtcccagctgcttgggaggctgagacatgagaatcacttgaacccaggaggtggaggttgcagtgagctgagactgtgccactgcactccagcctgggtgacaaagtgagactgtgtcaaaaaaaaaaaattttcagggaaagaaagccaataagaaataataatacagcaataaaaataatacaaataaaaataatagagtataacaactttttttttgagatggagtcttgctctgtctcttaggctggagcccaatggtgcaatctcagctcactgcaacctctgcctcctgggctcaagcaattctcctgcctcagcctcccaagtagctgggattacaggtgtgcaccaccaagcccagctaatttttatattttttagtagagatggggtttctgcatgttggccaggctactctctaactcttgacctcgggtgatccaccacctcggcctcccaatataacaactatttaaatggtatgtacattatattattaataggtattatatgtaatccagagatgatttaaagtatatgggaggatgtacttaggttatgtgcaaatactaccccattttacatagggattttggtatcttcaggggtcttagaaccaatgctccacagataccaagggacaaatgtatgtatacattgtggaatgattaaatcaagctaatttacatgtgcatcacctcacatatttacccttttgttgttgagggcacttaagatctaatctcagcaattttctggtatataatgcattattactaactgtagtcaccatgctgtacaatagatctctagaatttgttcatcttgtgtcactgaaactttgtatcccttaactaacatctccctccttctcctccctccctgctccctgccccgccagctcctggcaacaaccattctactctttgcttctcttttgggaatttagattctagttgacttttatttttagacttcattgtatgggaatgtatcatctgaactacatgatagctctagtcagatgatctaaactgcctttaatcctagatcagggattaagcaaattttcttagcctcaaaggtctaacatgcaaggagcttggccttgggtgtggggacagggacatacatgtgcaagaactggtcattgtggaccttcaagctctattgcttttgtgtctacgttccatagtttatttgtaaatgcatcttttttttaatgtattgaaagtcttagtcttttaaggtgtctcctctattattgttattttttctacttgcattttgtttttaattgacacatgataattgcatatgtttattgttttgatttttttacttacattttaaattcaggggtacatgtgcaggtttgttatgtaggtaaacttgtttcttaggggtttgttgtacagattattgcattgctccggtattaagcctagtacccattcattatttttcctgatcctctccctcccggctccctccaccatctggtagacctcagtgtgtgttgttccctctatgtctccatgtgttctcatcacttaactcccacttgtaagtgagaacatgcggtgtttggttttctgttcctgcattagtttgctaagcatgatggccttgagctccatctacattccaattatgggttacagtgtgatgttttgacacatgaacacgttgtgtaatgatcaaatcagggtaattagcatattcacaacctcaaacatttacttgagtagagttaaagacatgtttagccttctctctttgaaaatttacctttggaacaagaatcagtcaatgagtttctttctatttaataaaacggaacaggttgaatggggctcagtgaaagccaatagggagtgtcgaagctaaaagcagcaacatctttttacataactgaatcaacttcaccaaaatatcttctagtttctttggcctctgctctgctaaagctaaatctgaggcttcttctttacaagcaaaagtcgtaaaacttgacaagatgctagaatgcttagagaaaacatttgaatttaatattggtttctgccaaaggaagccatgcccactgggctcactgatgactttcctgccaggaacacccaagtccccctccaccctggctccctgtgtccatcacccacaacatactctcctctctgtggttcatggctactgtgagcttttccaggaaggcattgcatgttctgatgctgctacttggaataatgaatacatgtggttacatcatccctgattccaaagggtatcaatgtataccatggccatttcagacctcttttttatcactgatttctgccttaactcagtgctatgattttcttattcaattgcgcttccataaaatatagccttctccctacatacatctcccttgtcatccaaagaagaatgaggagggccaggcatggagggttcacacttgtaatgccaacactttgggtggccgaggtgggtggaccatcggaggtcagaagttcaagaccagcctggccaacatgatgaaatcccatgtctactaaaaataccaaaaaaaaaaaaaaaaaattagccagacatggtggcatgcgcctgtagtcctagctactctggaggctgaggtgggagaatcgcttgaacccgggaggtggagtttgcagtgagccaagttggtgccactgcactccagcctgggagacagagcaagactccatctcaaaaaaaaaaaaaaaaaaggatgaggaagaggactttagtatctgaggagagagataaccacccagcttttttttttttaatttattctctccgttcattcagtgatctgcttcaaagacagagagaacagggggctgtgcacaagcactctgttttgccccccagtttcactctccgtgcctggcagagcacccacttttgttcatgggggtggggatgggagatccgtggaaactactgtagaggaaagagtttcagggcctcgaattggcaaagtggccaggacgcatttcaatttttttcagtttgaaaattggtgaggatctttaaattgtgccctggatctaccatcctgaggaaaggagggaaggtcctcctggggcctttgtcctcctggtgctgatgcaccctgtgcttggacccaggtcgtacgatcatcttcacaacccaccacctggatgaagctgaagcgctgagtgaccgcgtggccgtcctccagcatgggaggctcaggtgctgcggtcctcccttctgcctgaaggaggcatatggccaggggctccgcctgacactcacgaggcaggtaaggagtgcaaccattctatctcactgaagtcccatttctgtctgtggcataagaaacaagtggtgacagttacatagtaataacgtctcagtggaggccttctgtgcacaatggcccacatgccaaaataagtggccccaggcctgtgcagggagcaagcctctgggaacccaagcatgcattttgaccgccaggagaaaatacatgaggagtcagaattacctgatagataacaggagctgctgtgagtgtcagggccaggaagtatatgacctatgtattctagaaattcttttctctttctttctttctttctttctttctttctttctttctttctttctttctttctttctttctttctttctttttctttctttctttctttctttttctttctttctctcctttcctttcctttccttttctttttctttctctcctttcctttcctttcctttccttttctttctccccttcccttctctttctttctttctttctctttctttccttttcttttctttctccccttcccttctctttctctttctttctttctctttctgtttctctttccttcctttcctccctccctcctccttccttccttcttttcttttcttttcttttcttttcttttctttcaatggagtcttgctctgttgcccaggctggagtgcagtggtacaacctctgttcactgcaacctcccgttccaggttcaagcaattctcctgcctcagcctcccgagtagctgggactacagacacatgccaccaggcccagctaatttttgtgtttttagtaaagatggggttttaccatgttggccaggctggtcttgaactcctgacctcaggtgatccaccaacctcggcctcccaaagtgttgggattacaggcgtaagccaccatgcccagcctagaaatatttttttgacaacgatattaccctcctagaggctaaaactttgccagaatacaagagagtagtgagggtatagagcaagtggagtctggcccgagaggctgaacttgggtcacatctgtagtcatcattgcctgtgtcaaccgggggcaggaagtggtgactctggggctgggattcagggtgtgtgggaaatcacctctccactcttgatgactgtatttgacccttggtggcccacgaaaagtcttccctcacctctgagccaaggttcctgtttgcttcctctctcattcagcgtgaatgtcattatccccaggtggctcctttcttctttggctgagaattcttgtctcccttttaagactccttcaacccagttttctgctgttcaatgctaggcccaggatctctctgtgactctcccagtggacggggggcacttcatgaatacaaacctctggaggctggccatggcaggcccagtagctaagacgggcatgttggggggcatgtgggtgtggcctcacaaggtttatcactgcagatttatattttttaaaaagaaagaaaaaaatacgagatgtcattgagatgcctattgcttaagtgtgatatttcatttaagctttgaaatggagttttgaaataatttgcttatggatatacatgaaatcaattgatgtatatatggattaacattccttactggcttcttttttccttttttttatggatagccttctgttctggaggcccatgatctgaaagacatggcttgtgttacatccctgataaagatctatattccacaagcatttctcaaagacagcagtggaagtgagctgacctacaccattccaaaggacacagacaaggcctgcttgaaagggctcttccaggccctggatgagaacctgcatcagctgcacctgacgggctatgggatctcagacaccaccttagaagaggtactgagaaaactgaagcgtgctttaattatttatgcctttttgaccagtccacattaaatgaagagatgtgggtaaagggggggagatgtgggtaagggggaggagtgtgcacttttatttacatttgatttctgattggtagcatactagatgccaataactgaacttaacaggcctgacaggtggcaattgccctttaagtgaaatggcattcttttagcattctttttttttgttttgttttgtttttgtttttgagacgtagtgcaggctggagtgcagtggcgctatctcggctcactgcaagctctgcctcccgggttcacgccagtctcctgcctcagcctcctgagtagctgggaatacaggcgcccgccaccacgcctggctaattttttgtatttttagtagagatggggtttcaccatgttagccaggatggtctcgatcccctgacctcatgatccgcccgcctcagcctcccaaagtgctgggattacaggtgtgagcccatgcacccggcctcttttagcattcttgtatttgagaagcttggtgtctttaattcagaatcatgaggtgtttaaacagttgtcagtagtggttgattgctggttgtaattcttcatgtagagatgccctcctctttctgcttctgtctgggagtctctggccccatgctgggtatccgtgatgtgagagggtttagcacgggaacactgcagacgcctggtgagctcccatcccccaggtcccacttttctctacctggatctgaggtggatgagaccactccatgtgggttcttcatagagtacacttaacaacaggcagaaataggcgtttcctccaggaggacattgctacgttgtgtgacccaacctgaggcatgccttgtttggggttcttgaggttggctctctgtgtgggcagtatttgagccctaattttacattgctattatttatataaaatgtcacgggttttcaaaaaatcaagtgctgcaagttaaaatttttaaaaatctgcaaaagtcaaagtctgaacattcagttgtgttttggaattgattccttgggttagtgatgcaggaggaaaggcaatcttttgtgtgataaatcagtgtggtcccaagtagatagcctccatcacaagttttgtctggaataaatagtcataaaagattgtgaaacataaaaaatattacaaaatgcttttatacatagaatgtatttggttcccctgaaactccgtaacttattattcctattttaaggttgagtaagctgaggctcacataggccaatttctttaccccaaatcacgaaggtcgtaaatggtgagctctacttagacctagggtttctgatagttagtcaagttctctaaattagcccatacctttgtggttgatgctctgtattccatgcatcatcaggactggagtccatccattcccactgcgttttaatagagcaagttacagtgcaagagacaaacaaaaagcagcctaataaacacacatgatgaataggagctgttttctaaagccaaaggatgcggtcactacatcttttcttgtctggctgtctcctattttcattcttcaagtcttgacatgaacggcgcctctgcagcggattcccagattcctcagcatcaattctgttccgtgttctccccacccgccctcactgcactctgaagcttttcttcgtgacacttctcccaacttgttatgcatgcttctctgtctctcccatggacgctgagatctgtgagtgcttgtatcttttctgcccacctctatagcagcagtgcccaggacagttactggcactcatggttgcttaataaatattttctaagtgaacaatgtgctgaacctttccaaagattcatccagctatatttttaatataaaatgaatattttattatttaataaaataatacatatatattacacataatatacatatgtatacatatgtaacatataatatacatacatatacatatattacatgtaataatacatagatatttaataaaacatatatatatgttcagggtttcgttgtgttgctcaggctggtctggaactcctgggctcaagtgatcctcccaccttagcctcccaagtagctgagactataggtgtgtgccactgcatctggcaccaagattttgatctttaaaatggaaaaatcagaacagtttgcctggtttcccaaggagtaacaatcatgattaaatgcctggaacaagtctgtcaaaaatggtaatggcttttctcacttacagtgggattgcatgagacgttgctgccgtagctttggagtgaccacggagctaaataacatctatacccccaaaagtcacctttcctccaggaatttttgggagacagcagtcttccctgggccaatgtagaacaagaaggaatttcctaagccccttttccccagattgcatgagtcagaatgcaggtttacagacgtgctgctaactaaagcaccatacttgaatgcagctatgtcagacaccacagttgtcactatcttcttaaatgtgaataacaagtccaaatattatattggaagctaatcatttggacagttgagagctgtcagctggcatgagtcagtttccctacagacagaaggaggcgctgcttccaggggtagttttgccatcctgggtcacttggaaaagaaaaataaaataatttttttggggggttatcgagagaaattgtcaaaaaagcccagacttcttatgttcatgtctgtctctctaatcattcaccgggttaatccggttgtttactagttgtatggtgtcttgtacagataaattgaacatattcataagctcactggactctcagggcagggaggaagatgctgtaggaatatggaccaagcacacttatcagtgaaataatgagtgttcacccccaatgtatttactgatttgcaattaaacacatgcgacaggaagagtgggtgttccctttacgtaagtggcattttgcttgttgttaacaaaagagaaatccttggtaatacttttaatttttattattaagaagagtgaaattttgtggaacattttgcttcaatattttatgaatttaaatatcacagaaaaaaaaactggtgaggaaagcctttatatcacgggtggatgcttagctcttaattgttttgttaattattgtggcatatatgaccaatcaataatatctccaggtaaaacatacatttagggagaggcttattcataaccatagcacatgtgaataagatacttcagtattctttttagtaattcccttccttcctgccttccttccctacctctctctttttgcctcccttcctccttcctgcctacatccttctttcctccctaattttcaggtctgtctgaatttttagtcacatctgagactaaaatgaagatcccacaggagtaagaaagtgtcagctgtgctgtttcatgtttgctgtgcttgtgttgctcgtattatcttcagaatcttttaaagccactatctcctttataagtgttattttagtaaaaactagataaatcaatgtaaaaatctacttagacaggcctctacaaagctgcaacctgttgaaacttgaagaactgtcactgtggccacagaggccaccagtgctcctatcagtcttaaataggaggaattctttatgtctgataggttccgcctaggaatagaaactgagatttccatgtttccttctgcaccccctggggtgctgagagagctgggcctcgacagagcctgcagggccacggggagtggtttgcattcttgaccatgcatggtgctccctcactgcactcactgcagaatgactcccctaccttggcacccttacctgtaggttgggaatcatggaaggaaccacaacatagggttgaagggaagaaacttctagtgcagcgcgtgacacacagacagacgacatttgttctgcttgatagggacttgcatgagatgccctgggaggatccccagtcggagagtgccccgggaccaagggaagcctcctgcaggcgctcccagaggacaaggctggagctgcaacctgggtgtgtcttggggtttagaggctgcaccttttgcttcctcaccctccaggtccagcctcccacctgccccagacccatgtccatgcttctccttctgatgtctgccccttccccactctcttccctacagagctcgggcctgttaagagcttgctgtacttcagtccttccatgctcagaattctaaaccagtcttggaatctcactgcatcactgcatatacctttttttttttttaaacaggagttacccatttcacaatatttatcttgaacagtttttatttttcccatagtcatgatgttcatggtgacataatttcttttacaaaaatgtgtccttatgtagttcctcccctccctgctttaaggcactttggttgtttctaaagttttgattttaccattgagactgtacaagtccgaagaacaggatcccccagcttttccatagactgattcctagaaatgcaattactgggtccaggggataaccctcaagatctgtgacggggtcaaatgacagaatccccaaatgatgacatgcatttgtgtcctagatgcttttttttcatatgcctcaatcttttcaacatttcaaaagaaacccagtgccttctagtcacatttaggatttcctaactggcctgctgccccatatcttcttcaacccatggttgccatgggaagggcctgggaatcaggacaagaacattgacacttgcatttatgtttcatcacttcctgtcggggacaatctggacaaatcacttagactggaaccacatttattcatttattttaattttaaaaaccttttaaagagcagttttagattctcagcaaaattgagcagaatgcacaaattgtgcattctgtgtccctctgcctcccttgcccccagcctcctccactatcaacatccctgcagaatggctcatttgttacaattgatgaaccgacatggacacatcaccatccagcccattaggcttcactcttgctgttgtacattccatgggtttggatgagtatataattccatgtatctgccattatagtatgatatggaacagtttcactgccctgaaaatctcttgtgctctgcctagccattcctccctgcccgaagccccagccctcagcaaccactgatctttttactgtcatcgtagttttaccttttcctgaatgttgcagagttgggaatcatacaacccttgtagcctttccattttggcttctttatcttagtaacatggatttaaattttctctgtgtcttttcatggcttgatagcttatttcattgtaccgctgaataatatttcagtggctgaatgtaccatagtctatttatctattcatctactgaaagacatcttggttgcttccaagttttagcaattatgaacaaagctgctataaatatctgtgtgcagatttttgtgtggacataagttttcaacttacttgggtaaatacctaagactgcaactgctgtatcttacagtaagagtgtctttagttttgtaagaaactgccaaactgtcatccaaagtacctgcaccattttgtgtttccaccagcaatgaatgggagtttctgttgttccatattcttgccaacatttggtgctgttagagctctggattttagccattctaataggtgtgtagaggtatctcactgctgccttaatttgcattttcctgatgacatatgatgtggagcaacttttcatattcttatttgccatttgaatatattctttaatgaggtgtctgtttaggtctctggcccactttttaaaaattgggctgtttgctttcttattgttgagttttaagagctctttgttaacttcatttttctcatccctacggtaggtttatcttccctatcttccacacacagtttttgtttaggtcaaatcatataattaaactgagtgcaggttacatattgctggattgtggcataaatatgaggaattatcaatattttttctactatttatatccaaaacacatatgcagtggtgtattttcagattagacactgttatattttaatctgtctatattttaatgttacagaataccttgcattatagaataacttctaaaaattctttttatgttatgtattagtccattctcacattgctgtaaagaaatacctgagactgggtaatttataaagaaaagaggtttaattggctcaaggttctgcaggctgtacaggaaacatagcagcatctgcttctggggatggaaggtggaaggcaaagagggagcaggcatcttatgtggcaggagcaggaccaagagagagtggggaggtgtcacacacttttaaacaaccagatctcacaagaactcactcactcgctatacactaccaaagggggatggggctaaaccattcatgaaaactccacccccatgatccagtcacctcccaccaggccctaccttggacattagggattgcaatttgacatgagatttgggtgacgacacagatccaaaccatattatgctatattccttaaatatctctgtttctgtttagtagtcacctttcttttacaaaatatttgtatttgtactttacccattcatattccttttggaaatttctcagtcttcctcctctttgccctcttttcttaaaaaatttatatttatgtacttcatatgtaaaattcctacagtaaaattcactatgagtttgacaaatgtatagagttgtagaaccaccactccaatcaaagtacagaggagtttcatccccaccaccttctgaaaagagtaattcttccacgtaacatgcctctgcaattttttaaatccaggattcatgttcttgctgttagtcaccccagaacagcaagaactcctcattagtcagtgaggagcaacagaacaagttgttcaattactttggagatgtagtacatgtttcttcaatttcttacagtaatttctactttctacatttagtatgtgctttgcacataataggtcttaaataaatattgatttactagattttacgtatctctctttttccacatctctcacacacacggacgctaagaaagaaattatctctctaagggcaaccatgggcaaagaatctggaatatatatacaatgtatatgagatctaacaaaatataaatggtatatttagagccgtttgagaaaggtatcttaaattggaaaaagattggggcttttggagaaccttcttttgtttggtagaggctataaaatgtctgtctcaaccaattttgtctcttgacacttggcgagcattgactttcctttcttatgtctgatacacagttagcatggctgttgtagcgctgagggtgcttttctcttccttcatctgcattttgcctgatgactttacaggagtgaggaggacctgccaattaactctccagttgagctcttcagctaaaaagcatattttatttctaaactggaatacacttactataaattatgatctccaactttacctacaagctagtgaaattaagatttaaaatgaaatcatgatagtcaccagtttcattaaggcatctgtactttctactccaatgcttggacctaaggacaatcctggcaagttacaatgtttactttgtgtgggatgggaccatagagagttagaagacttggctttgcatatggaatatattttcggcaatctctgaagccaagacaaaactttctggcataatgcaaacagagtaaatttttgcagtgtattttttaatagttttgaagtttttagtaatgttttagaaatgctggtgagcctgcctgagatgtgaagtttctttccttccagcttgctaaatactgattagtgggttccctttgtacctttgccaaggaggttctggatgctagttccttgggtgcatgaactcagctgccccatcctacacagcattaagaggtaaagcctgggcctcagatgtagggcttgatctttttttttttttttgacttttttttagaacaatttttaagaaaaaagaattgctgtaaaatctttgcccatttaagtttcaattgtgcccctcatgtccctaagagcaaaaggatccagtccaggatcacgagctgcactcagttgcaggcctctttagtcactgtcaatctgcaagaattcctcagtttccttgactttcatgacctcaatatttttgaagagtccagaccacgtattttgcacaatgagcctcaatatgggtttgccctattttgctgtgattggtcaggttatgcatttttagttggcatattccaggggtgatgctgtgtcccactgctcctggctgcctgctacacaaggctgatctgtcccatggctagtgaggtgatcttttttcccaggtaaagtggaaagtggtgtctgccaggctttcccactcttaagttaatttccttttctctctctttttttttttgaggatatattttgagaatctgtaaattccacttttcttacccacctgtttttgcatcttctgatgttccttgccagaattaaaaattattactatggcacttgccaagtggcgatttttctaattccatcattccttccatgtgttttagttggcattgtccagtaagaaagaactctctctttaccccattgacctatttatataaggaaccactcatagcattctattctactcaatgagttacaattcagtagggtcattatttactttgaggctcatgtcataccaagttgagccagtgggaggtccttcaagctggtttttgtgccttttaactcatgcctcccattctttgagcattttcctgcttcctgacaaaacaagatgttctaggattgccattctttcccagccctggctctagaatcagccatttctccaagaaatcctggctgctcaatacgctcatggtgattggggtgttgctgctctgaggttccctcatggataaagtaaaagatccacctctatttttgcttctctttctgcctataaatacaaaactaggagttcaactccacatctctaattccaatccaattacacagcattcatttagtgtttcctcttgccttatttgtaccgcccttcactgataatgagaaactcgacttactcattcttatgctaccttttcccttagtcctcctgtgtgcagctcatcttccaaggcctccacactgctttgctgctctgctcacatgctgtcttgtgtgaacctgccccacttcagctgccactttctgttggccccaaaccctaatctggtgtctttcttacaaaaaaaaaaaaaaaaaaaaaaaaaaaaagaaaaaaggaaagaaggaagaaagagggaggaaggaagagaaggaagcaggtacttttttgagagaccctgttccctttttctttcatgtgacatcctgtttgttgttgtttttttcttttttttcttttttcctaaagaacaatacattcagtattttgaggattcttcatttgggggctaaggtcttcttaacttagaacagtctcatggtctaagcatttatgcagacagcctgctgtcttgttaacactgactgtgctatcagccctttgactggagtgctgtgacccattctttgcattctgtttataacaaggtgttataggatgtcacagagcctgagtgtgaactagaattgactttttataacttatgtcttttaatcttccccttgtacgaataagcaaactgagagaccaagagaccaaaaaggtaatgagctgaccaaaatcagacattgaattttttttcattttgtgttggactccaaaattttctactctacttaccaacgtctcctgttctgtagtctccagggacacctcaaatcaacagcccttgtttcaaaggtgtgttgatggtgtgatagttctaggacaggctggataatggtcccccagcgacgtccacgtccttatcactgaagcctgtaagtgttacccatatgggactgtggcaggagatatcccaaattatctgggtggacttgatgtaatcaaaaggatacatcaaagggggatcgaggaaggtcagagaggaagaaggtgatgttatgatgaggcagcagttggagagatgagctttaaagatggaggctggggccattggccaaacaatattggcagccactagaagttgggaaagtccagggagtatattatcccttgattttagcccaggaaggcccatattaggcttctgacccccagaactgtaagatactaaatacattgtcttaagccaccacatttgtggtaatttgttacagcagtgataggaaattcatacaagctcctgtaaaataacaaatcttgctgcatgcattgtgttagcatgtcaggggacagccctgcccaagatcccatatttagagagcagttgctagtacctctagtgtttcgtatcatctaagttgtccatgtgttttcatcttctgcttccttaaaaaacaatcactttggggaaacagaaagagtacatcttatgtgacatgtaggtcaagtttggaaattcttcctctgctcaagtcatcactcagctgggttccattgtccttgtcttacaaaaatttggtcagcttcaaaaatttctctagcatctaagcaaaaaagtaccttgcactgaccatctccaggacacaatccatcaaactgacactttaagtgtagatcatatctggggtctcatgctgcttgacaacaccctttaaacagagaacccaaaaggatggggcataggactcatggctgagggactgatagcacaatcagtgtagagatgacactgggctgtcataaatgcctagacctcaaagctcttttaaattaaggagatgtagatccccaaatgaagaatcccaaaacttttgaatttactgtcccttgaaaagaaagagtggatacaccataggcattgcttttaaagcatatttttgttacattttaaattactttcatgctagttagtgtcctttagacataatttcatcatgtcttattttattcttatttactttgtgtgatgaatttacctaaaaattaatgactagtttgaccaacttgattgtcctttgacttgagaagcttgtaatttcagtgaaattcaaaacattagataagattgaaaagaatattctacttcttttgtatgaaagtgggaaggtgtaggtcttatttggtccatttgaattggcttatggcctatattcagttacaatgatagaaaataccaccaaaagaggaggaagacatatgtataaataatgtcattccatactaaatgcacaaacgcagcattcttcttaaattggaaagtgtagccaggacattagatgtttagcctgcattcacttcctgtgcagttgcctaacctttatttctatctcttttggaagattgtttatatgttttgatcaggacttttatactcttaataagaatatttttgcagtattttgcatctcctcataattgttgaaatgaaagagagtttacgtttctttatttgaattactttaaaaaacttgaagaacacctttcggtataaatagtgatttaaatattgctggaaagtatgtatcagataagaaggaatacagtgagaactcagttaacattgttgatgggttcttggaaactaagactttaagcaaaacaactttttttccctcatcaacattataacaaaatggcgttgaatgagatgacattatttgaggacctgctgtatgtccttttgctgaaagttgcagttgtgaacaacaacttactgatgacgctaagtgaggacttactgtaaaatgatgtaatgtggaaattctatgtccagaattcagtgaaatgttaggagccttcttgtaagttttctttcattaaatccctgggtaatgttctattctggatgttagggttacctgaaatacttgccaaggggagttttacagttgctgtctgtgtgattcagtgtgagaattataatgcaaaataacaaaggcaaagtctgccatcaagactccaaatctttgattacagtgatcagtgtcatattgcttttgaaaagagtaacctttatttgccctctctgttaattgggctactttgacattttgtcaaaatctcagagcctcccggacagcctgcctgcagttaaggtgagttgccacttgatggcacgcataacattctgatggtcttaggcttgcctttcactgttcataggcaaagttccagaattttcagacacattgtacccagatacttagtgccgtaccataattgattgtatctcctgctgatctgtgagattattgagggcaaaaactctgtccttattctgtttcctcctctaacacacacatgcccacaaatgtgtgcattcaaacatgtgcatatacattcacacatgttcatacacactcacacacacacaccctcctccccgccacatacaactatggccttttatgagaggggctagaaaaggaaaatttaaaaaggacagatgaatattgttatcaataatgccttagttatcaaggtatgcttcatataatcatagttaaatatgaccattaaatgaaaattccatttagaataagatataaaggaaaatctttagtcaatgaataattcttgattttcactatttctattgtttcctatttaattccctataaatgcactaggtgaagacttactgcactaagcctcagtgccctcatcttaagcaaggataatagtactcatctcatcagattgatctgagaattacatgatgaaacatagcacatacaccctactacacttactcatccttatctagctactgttgagaccagacattgccagcatgctacatgccaggcatcgtttttataactttatatataaatgcatttattgcttgcaacaatcctataatatgtcttatttatttatttatttatttattttttcgagatggagtctcgctgtcgcccaggttggagtgcagtggcgcaatctcggctcactgcaggctccgccccctggggttcacgccattctcctgcctcagcctccggagtagctgggactacaggcgcccgccacctcgcccggctaattttttgtatttttagtagagacgaggtttcactgtgttagccaggatggtctcgatctcctgacctcgtgatccgcccgcctcggcctcccaaagtgctgggattacaggcgtgagccaccgcgcccggcctcttatttattaccatttatcatgtgaggaaactaagttaaagagtggtaaaataatgtgttcaaggtcacatggctggcgcacactcagaaatgttattaatcattcttcttcttattattatttgcaatagtagtgaggtttacagcttttccttggagtcttactgagaatcagcaaagtgttatctttcacatgaaggtagctgcatctgacctttcactagtgctactcatgcagattttgctcagtaggattccatgcaaactaattaaccacgtgcggagatattgcatgcctctcctgaaggcttgcttgctcatggcttcttctttctggtgccttcccccatctttccctgtggttaggggctcctcaggaacatctagagacagtcaatccctttttgcttgtttagaggaatcagaatggtgaggttgtgtagagaaatcagaagtgaggcagggtgctcagtgtgggctgagatctgtatatgcaggtataggacttcactacccagggcattgggtgggaggtaccagctggatggacagtgacgctggcccagcaggagtcacttggagaggggccagggccagggaccaatatctctatggatacgtgcagaggaaggggtgatggaagcacctgcacagatgatgctaagggagagagtggcaatgcacagtgcctagctttgtgcatggcccacagagaacgttcaggaaaccttggctaaccacatgaataatagaagacttactgcatgcttccagagtctgtgcctggcactttacagccatcatctactgaactttaaatactgtgatcatcatctctgttttattaatacaacgaggcagccaacactctgcgtggtgcagtcctatgcctgcagacagagccggcccacatcttgccaagagtggaactccagcagttaggactgtgctgctgcagggcgatgtctccttgacttgtatgcttctcgtgaattgcccaatgtttattttagagattctctttccatcactccataaatccctgccagcgatccaggtgcagctcaaggccctcgatgtctccaccccacctcatttccctttgtgtctgcttgcacttctgctttctcaccttatttttgctactttagtcatagtatttggctttgaataaactgaggttggacttctgcctccactactaaccaagaaatgacttcaagcaagttatttgattaactaccttagtgacatcatatatcatagcccatggaaagcatacatttaatggggatttttatgtatgagatcccatctactgtaagtaaactgagcattgcaattttattgtctgattcacctctgaattcctaagatgctggtacagtgagtcacaaacttaagttgaattggatacactgtgttgctatctgtcccctccctgcctaccactgcctatgcatttgaccagcctccactagcccgtgagggtctgggagttcacagtcaagtttcattcatctttgcatcctatgggtagcctgttttgctgagacctaggtagtcttagagttatgccaattaaatggatggctaaatgaaatatatggggtgtgtttggcatatgttgtcacaaccggattaggcaattgaggcagaagaaaagaaatgcgatgtgtatagaaacataaaataatacatggcgtttttttttctccgaaaggtgtttttgatgcttttgcaagattccaacaagaaatctcacattgccctggggactgagtcagagctgcagaaccacaggcctacaggacatctgtctggctactgtaagtacagaatggcttcctgcatttctgctggaggaacaatgacaccagccttattcaacatcccttgttttaaaagttgtatagcaaggttctgaagttagtgaggagatgtgagtgtatagtgagggggcaagtaaatacaggtcagaggcaaaaaaaacgttgagttttatcctggcttgaaaaaaaaaaactgtgtgtttatgggacacatttatcttttcttcaggacttgacttagtatataaaaaatttctcaatgtatacagttagaataatgaccatcattcatcttattttaccttcatcacaaacaaactgatctggcctacctgcgtggtgtgcctcttatgtgcaggcaccctcctggtaatggatttgcatggtttaacaaagccccggatgtgggctttgccttcatgcgacctctgtccctttgggaccaaatcatggcttcagcttttgtatgcagcctcctttataggctttaatgattgaacagaatccagatttggtatctaggtgtgtgactgaagctccagttcagtccaattcctggcatatttattagcagcaactcagcaaggatccctgagctgagctctagggatgtggagggtaataaatctaagagctttccttcagagatttcagtctactaggcacatgaacccatgaataagtaactagaattaaatatgttataaccttttatgatgtttcccaaattgcatccttaccagcaactgtaggaattgctattgctgtacttcctcttcagctcttagtagtatcagatttgaaaaacatataatttagctattaaaatagatgtgtagtagtttctcattgtggttttaatttgcattctcctaatgattatgttaggcatatatttttatttcccacagctttattgagatataattcacataacacacaattcactcatataaatgggaccattcagtggcttttagcttcttcagagttctgcattcatcaccacaatcaaccttataccattttcattactctgaaaactggtgtcacttagcaatcactcctcaaaatccccatctcttcagccataggcaacccctaatgtactttcaatctctaatagatgtgcctattttggacattttatatacatggaatcatagtatgtgtggccctctgtgactagcttctttcactcagcacaatgtttttgaggttcatccatgttacagcgtgccagtactcaacttattttgattaccaaatatttcattgtataaatataccacatttttgtttgtccattcaccagttgatgggcatttggggttgtttccagttttttactattgcaaatatactattatgaacatttatatacacaatttttgtggatatgttttctcttacatgtatacctaggagtgaaattgctgaatcatatgtttcaatcatttgagaaactgctagactgtcatctaaagtgatcacaccttacattcccaccagtagtatatgaagtttctaatttctccacattctcccaacccttgttattatctgctgttttgattacagacactttagtggatgtgacacacaccttagtgtgtatctcattgtgggttttatttacatttcactggtggctaatgatgttgaatatcttttcataggcttcatggccacttgtatattttctttggagaagtcatattcagattttttgtccattattaaaattgggcagattttatttctagagctggaagaatttctaattatggaattgtgtgagttaagtggaatggtaactaggttttcataaatgccgtttatgaagttgaagaagtttctatctgttcttaattgtggagtgtttttaatcatgaaaggtgttggatgttgccaaatgctttctctgcatctattgagatgatcatttgttttttgtttatttatttatttatatggtatatttttggtttttggtagttaaaacaacattgcattcctgggacaaattctacccggtcatgtcatatattgctggattttattgtgctagtattttgtggagcatttttgtatctttatagcaggtattggtctgcaattttcttttcttgcagtgtctttggcgctgttatcatggttatcttcacctcatagaatgagttgagaggtgatcccttctcttctattttgtggacatgtttgtgaataattggtattagctcttctttcaatgttttgtggaattcaccagtgaaggcttctgggtctgggcttttctttgtgggtaggttttttaattatgattaattcaaatatttaattgatgtagggctattagattatctatatttttctcaaatcagtttcagtgttttatgtctttctaggaatctgtccatttcatttcagtcgttatgctattttatgttattggcatacaattgttcatagtaatcagttataattccttttgttttttaaaagtctgtagtgatgtttgtcaggcgtggtggctcacgcctgtaatcccagcactttgggaagctgagctgggtggatcatgaggtcaggagatcaagaccagcctggccaacatggtgaaaccccgtctccactaaaaatacaaaaaattagctgagcatggtggcaggtgcctgtaatcccaattacttgggaggcggaggcagagaattgcttggacccgggaggcggaggttgcagtgagctgagattgtgccactgtactctaccctgggcgacagagcaagactccgtctaaaaaaaaaaaaaaaaaagcctgtagtgatgtttcacctttcatttccacttctaataatttgagtcttctccgttttcttggttaatctagctgaagtgttgtcaattttggtaatgttttcacagaatcagcttttggttttattgatttttctcttttcaatttcatgaaattcagctctaatttttattattttgtttcttttacttaccttagatttagtttgctctgtttttccagtgtcttcaggtggaagtttgcatgaatttgagatctgttttttataattataaacatttactgctataaatttttctctaagcattgcttcagctgtaccctgtaaattttgatatgttgtatcttcatttttcattcatctcaaagtattttttaacttctcttttgatttctttcatttcttatttaggttgtgttgatttccacatatttgtgagtttctaaattcccttttgttattaaagtcccatttcattttattgtaatctgaaagaaaccagaatgggttcatatttttaatagagatgggatttcaccatgttggccaggctggtctcaaacttctgaacgtgggaggtggaggttgccttgagcctagatcatgccactgcactccagcctgggcaacagagggagattctgtctcaaacaacaacaacaacaacaacaacaacaacaacaacaacaacaacaaatctcttttcaacttattaaggcttgttttatggtctatgctggagaaagttccatgcctcttgaaaagaatgttcatctgttgtgataggtggtgtgttctatagacatctgtaatatttagtttgtgtgtagtggttgttcaagtcttttgttttcttgttgatattcttgtaaattattttatctgttaataaaatttgggtattgatatttctgattattattgtagaattgcctatttctccctttaaatctgttgacttctgtttttatgtctttgcgggctctgttaggtacataaatcatcacaattttatatcttccagatgtaagccttatttcatatcttttatagtcttctttccttcttgtattcttcctggtctttttagacagtgctggcactatacctgatgaagcagttttcgcaaacactttgtgaaaccttcttaggtttcaataatattcatccattagacaaaagccaggtgtttttgaaataacctcttctgtattttttggcttctacatagatggcagaggggaccacaccacaaagcttcctagaggtcctctggtttggttgagtagacctgtgagacacacttgatcttttttaaaattttttaattttacatacgtaacaaacctgcacgttgtgcacatgtaccctagaacttaaagtataataataataaaatatgtgtatacattatatataacccagttaaagaaaacaagtaatgcagttaaaaaatgatcaaatgacctgaatagatagacatttctcaaaggaagacatgcaaatggccaacaggtatatgaaaaaatactaaattaatagtcagcagagaaatgcaaatgaaaaccacaatgagatataaccttatatctgttagaataattaatattaaaaagacaaaagataacacatgctggtgaggttgtcaagaaaaaggaactcttccatactgttggtgggaatgtgaataagtatagccattatagaaaatagtatgaaagttctttaaaaaattaaaaataaaaccaccatatgatcaaggaatcccattacttggtatatatccaaggaaatgaaatcagtatattaaagaaatatctacactctaatgtttattgcagcaccattcataatagccaagacatggaatcaacctaagtgttcatcaacagatgaatggataaagaaaatatggcatatgtacatagtagaatactattcagtcttaaaaaagaagcaaattctgtcatttgtgacaacatggatgaacctggagaacattattttaagtgaaataagctaggaacagaaaggcaaatgctacataatgtcacatatatgcagaatttttaaaagttgaaatcatagaaatggagagtagaattgtggttactaggggctgggaggggatgtggtgaggagatgttggtaaatggatacaatatttcagttatataggagaaataagttcaagagatctattgtacaacatggtgactgtagttaataacgttttgtattgttgaaaatctctaaaagaatagatgagttttctcatcacaaaaaactatgtgaggtattgcatatgttgattagctcggtttagccgcttcacaaggtatacatatttcaggacatcatgttgtatatgataaatataatttttatttgtcaactataataataaacaaataatagtttatgacaggttaaaaaaaaaagaaataaaatctaccaagtgtgcattcaaacacatacatgtaaaatatctttggaagggtaaaaagatgctggtaatggagtttgcctctaggggaggaaactgagtagctgaaggattctatagcccccttgagatctttggtagatttgcactatgtgaattttagcaactgaaaataattaaaaaacaaagaaaaataaaaataagtacagtactcaaaaaatatttttttcatctaggacgttttttggtaatagaaaatatcaaatggaaaattaactagcaaatgtgtttttatatatgataaatatataatataagtacatatatttatatacatatatatttatgtattatatatgatatatatttttactgtggtaaaatatacataatataaattttaccattttaaccatatttaagtatacagctcagtggcattacgcacattcacattattgtgcaaccatcatcatcatccatttccagaacttttttatcttctcaaattgaaactctgtaccaattagacaacaactcctcatttctccctcccccagctcctggaaaccaccattctagcctgtgtggctgtgaatttaactacctcatataaatggtatcatacagtatttgcccttttgtgactggcttatttcacttagagtaagagtttcagggtttatccatgttgaagcaagtgacagaaattcattcttttataaggctgaataatattccattatatgtatgtatcacattttgtttatccatttatctgttgatggacatttgtgttgctttcatctttaagttactgtaataatgctgctatgaaaattgatgtacaaatatctgttcaagccccctgcttttactttttttgagcatataacaagaaatggaattactggatcctatggtatgtttgattttttgagaaattgctgtatcattttccacagtggttgcaccattttacattcccaccagcctgaactagggctccagttcctccatatcttcaccaatgcttgttattccaccttttaaataataatcatcctaatgggtgtgaagtggtatctcactgtggttttgatttgcatttccctaaggactagtaatgttaagcaccttttcatgtgcttattggccattagcatatcttctttggagaatcctctagtaaggcctttgcccatttttgaatggggttggtttttgttgtggtggtgacttgtagaagttcgttgttttctggatattaatctcatattagaaatataatctgcaatttttttctctttccatgggctacctttttactctattaattgtagtttttcttgtactaaagtttttaattttgatggaatttagcttacctattttgttgttgttgttgcctgtgcttatggtggcaaacccaaaaaatcactggcaactgcaatatcctgaagttttttcctgtgttttcttccaagaagtttatagttttagcttttacattaaggtctttgatttattttgagttaattttctatactgtgtatggtaggtgtccatttttattctcttgcatatggatatccagtattccccacatcagttatggaaatgactttttctcactgaatggttttggctcatttgttgaaaaccaattgaccatatatgtgaacattttcttctgagttctctattttattccattggtctttacgtctgtttttgtgccagttccacactgttttgattaccatggctttgtagtaacctttgaaatcagaaagtgggaattctccaaatttcttcatatttatcaatattgttttagctattcagggcctcttgggattctgtatggattttaagattaatatttctttttctccaaaatgtcattagaaactttagaagaattgtattgattagtttagatagttttgggtggtattgatatctcaaaaatattaagttttccaatccatgaacatagactatccttccacctgtttgtgtctttttcattttcttcagtaacattttgtagtgttgagtgtacaagttgcttgccctcatgattaagttaattctttagtattttattctcttttatgttattgtaaatgaaatgattttcttaatttctgttttcagattgttcattgctaatggaagaagtgcaactaatatttgtgtattgattttgtatcctgaaactttggtgaatttgtttatgagtactaacattttgtgtttatgtgtatgtatgtgtattttttagagttttatacatgtaagactgtcatctgcaaacaaagataattttacttcatccttttcaatttggatgacttttatttctttttttgcctaattgagctggctaggacttccagtgctatcttgaatagaagtggtgaaagtgagcatctttgtcatattcctgatcttagaggaaacatttttagtctttcaatattgagtacaatattgggtgtgggtttttcatagatggcctttattatgtttaggtagtttccttttatttctagtttgttaagtgtttttatcataacaaagtgctgaattttgtaaaagttctttatgtgtcaattgaaatgaccataggttttaaaaattttatccttttaatgtgtggtattaacttgacttttttttgtatgttgactcatccttgcctttcaggaataaatcctcccttgtcatgatgtgtaatcattttaatatactgtcaaatttggtatgccagtatttgttgagagtttttgtatcaatattcataaggaatattagttggtaaggttttttttttttttggtagttcctttggcttcataactcattctgtgaggctagcattgcctcatacaatgaattaggaagtttattctcctcttcaattttttcaaagagttctaggaggcttgttgctaattctttataggtttggtagaatttaccagtgaagacatctgagctttatttttatttttattttttggtgggaatattttaattattgattctatctcctcactagttataggtttactcagattttcaattgctttttgattcagtcttaaaagtttgtgtgttttaggaatttatccatcttatctaggtcatcaaatatgttggtacacattgttcatactattgttataatctttttgtttccgtaaaattggcagtaacactttcttttctgacttcagttatttgaaccttctttctttttttcttagtcaatctagctaaaggtttatctattccgtttatcttttttaaagaacaaattattgacttcattgatttttccctattgtttttcaactttgtattttattcatctctgctttagtatttactccattatttctgctagggttaggtttagcttttttcttcttttcttattttttaaggaatcatgttagaatgtttacttgaagtctttcttctcatataagagaagaatttagagctatacatttccttcttagtgctgcttttactgcaacccagaaattttggtatgttgtgttttcacttcattcgtttcaagatattttctaacttttcttgtgatttactatttgatccatttgttattttgactgtgttttaaatttccacatatttgtgaatttttctgttttttttttctgttgttgatttctaatttctttccactatgttcagaaaatacattttgtgtgatttcaatcttatttaaaatgtattaagacttgttatgtagtataacatgtgatctatccttgagaatgtttcgtatacacttaagaaaaatgtatattctgctgttgttgagtagagtgatctgtttatgtcatttacgtacaatagttctatagtgttgttcaattctctgtgtctttgttgatagtctatctggttattctatccattattgagagtgaggtattgaggtttcctactattactatagtgctatttttcccttcatttctgccagtatttgcttcatatgttatgagctctcatgatgggtatctatgcatctctaattggtacgtcttcttagtgaattgactctttttttaaagggtcaacataatgttctttgtcttttgcatttactttctacttaaagtttattctatctgatattagaatagccacccttctgccttttggttactatttgcatgaaatggcttttccatcattttacttctaatctatgtgtatccatagacttaaaatgtgtctcttgtagaaggcatgcatttggatcctgatttttagtcaatgctgccaatctatgtctttggtttatatattatttatatattgctttcctgattttctttagttctttatccatgttttcctttagcttttggagattatttgacagttgctttaaaatctttatgtagtatgtgtttcttcagagactgtttctagaaactatttctccttttaatgggtaagatttccctgtttttctttgtctaaataatcgtttgttgggaactgtgcacttgataaaatagccacttctcctaatttttgcaaattggtgtggaatacttctgctaattagtgatcccctgggtcttgagatcagcctggggtaacggcttatggtcttcatagttattttctgggcatgtagcctatctgagcctgtgtaagtgtgtgcttttgcctctttcttctgatgttccttggccactttcaaatgccttagtttttcagaaagtctcacctttttatcccagtgcctcaaatgttctaatgtattcccctatctataatcttttgcctcaggcacccatacgcctgcactcctcctttagttttcatgtgctctgttgcccaccaaatgccttccatggtttccaatcttagatctaaactatgctcttattcttgtgtgcttgctgaatcaggtaaaacagacactagtcctttgggcactctacaaccaggcaagaattttgaaaacgatttgcactttgctctttctgccctgaaggagagatcaggaattgagccatttctttgaccccaccaatatgggaagaggtgagcaaagtcaagtaaaacaccacagaatttttcctaccatttcaatgtgttttgtttgtttgtttttgattgggagtttggttggttgctatagatcttagactaatttccagagctcttgtaaagttgttttagtcagtctgtagttgtttatttagtgtttccatagggacaggggagtttggacttcctaatcagacatcttgctgatgtcactctatcctcttaatctttttagggggccaattttctgactaaatactggcattttgtgagctttttgacgtttgagcagaaggttctgtaatcacatactcagcctttttttttttctgccatgttatcaatagcttttcttgacttttgctaccttttcttttttttaacctgttgaggctgaaacttatcaaaattttaccagtttctttactgattttttgtttacttgtttgcttaacatttctttcctcattttatcgctctcctctctcattttactggaagttccagtagaaaccaggcagcaccttcaattcttttttggaaatctccttagctaaatatccaactttgttgctaacaaattctgttttccacataaccacataactgcagaagacaattttgctaaggtttttttttttttttaaaaaactaatgatctaaccaaggaaatttaagtttcctctagcgtgattccaaaaactctttcatccaaacccattccatgatttcaagttacccttacttttttaatatttgttatgtcacttctccatttccagtttccaaaatttattttagttttctattgctattaataaattaccatcaacagaacagattaaaacaatacctatttattttctcacagtttcttttggtcaaggggctgggcacagcccaacaagttctctgcttaggatctcataaagctgaataaatgtattattaagagtgcatttttatctagagctcaggggtctcttccaagcttgtttaggtctttggcagaatcagttccttgaggtgcccattttttggctggctgtcagctgggggctgctctcaattctgagaagtcaccctcaggtcttagctatgtgataaaatgtttacaagaatctaataatcatattttctttaaattctctcttacatataaaagttattaaaaaatgtatctcaaaggaaatgaatgctagaaattaaacttaggcaaaatgctaataaccgaaagagaaaataatgtgtatgtccagttaaaataaatcttgacataaacagtatcccaattatgatatatgcaggaggatattactacatagaaattagataagcaaaaaatacatttatagaattaacaaacttttgtaatactatataattccttttacataaagctcaaaaacaggcacaatcatactaaagtgatagaattaccctttggcataaaaaattttataagagctctgtcagaagtaaactggaagtttacttcttcaaagtgagcaggataatctgttttgattaatttaaaggcaactgattagcgttcttaatgagatctgtaaaatgtcttcacctttgtcatatgacgtagtttaattgtgggagtgacagtgtgtattcagggtctcactcacactcaaggggaggggattgtacatgggtttgagtcattgggggccactttagacttcttcctaccaaaacagtattataacaagctaaactgaatttccgcaacttgagcctctcttcatatttattagccatttgcattttctctttggtaacaatgtttttccttacctttacatataaattacatatttatttaagaatagtgttctaaatttattttcactaacataaactgcatacatcttatagtaaatggcacagatgttaattgtacaaccagatggatttttccatggtacatacctgcgtaaccaccacccagattgagctagaactttcccagtacttcagcaggcaccctcacatcctctccaggtcaaatccctcctcacaagggtaattgaattactttagaataattgtgcctgtttctgaactttatataaaaggaatcatacagtatatatagaagtctgtgtttttttctaagtattattttgtctctgaaattcatctatgtaattgcttgtgtaatttctatgtagtaatattccctgcatatatcataattggtctctacattctaccgtttatgtcaaaatttatttaaactggacatacacattatttcttttttgattattagcattttgcctaaaggtttaatttctgagcattcagttttaaaaaatattagttaacttttatatgtaagatcgaatttaatgaaactatgattattaggttctcataaacattttgttatcgtgagaagttagaataatttatgttgaagatgtattgcctatatatatcctctatataggatatatatatcctctttattatgcttatacatctgttttagaaacgataattttatgttctgaatttggagaacattattaaaaaacccatgtaaataatttggaaataaaacacgtgcaataaaagctaatgctatatgaaaaagagtgatgttttgaatttaagaaagaaccctgaagaaagaaaacttatgtttttattgccattataaaatatgacataaaaatgtaattttagttatcattcaaattataaatctgggaactgaaatgtatattatttaagaatcaatttaagtatttcattaccaaataagaagtaagtctaggatgcattaaaacaaatttgatatgagattgcctacatttgccaattttattatattcttcaaattcctcctataaaactccacatgaggcctcaacctaagtccagtttatgttacttagtagatgtaacttaatcacaacattagctcaggatattggacacagtgtgcattaatgtcttctaagtaaagtgatttagttgctttttgtgttgtgtgtgtatgtgatctacactagagaaattcaatttctagaatagccatttacaaaagcctttctcctcctattggtgccctcaaagattactcttttgttattgattcctactcctgggctgcacctgcctatgggcaccccttctctctacagatgccatatgtcttcagaaatagttttttaagggatagctctgaaataactcactccttgcttttctgagggattgatgaagacaaaataaaatataaaatatatactttttaatcatagggaccctagtagctccgtagaaatgagttatgaagaccgatgcctgcaactgcacttttgtccttgtctctgcaccgcagagtgtggaagtcacttcttcatggagaaagaaactatttattagctgcctgaagtggatcggacactatgataggcactttacatgatttggattttctcacttcatcattacaaccagtttgcaaacagactttcatatctctgttactggatgttatagagatgtgatttggatttctgggcagtgttgagagccctgttactaagaatctactatagagactgcgaactctaaatgataaaaatgctaaccttactgcgaaaaaaatgaaaactgtgcgatgagtaacaacaaattagcatggtgaaacctacaaaagaactgtgtgctaaatgttggaggaacatgtagcacagagtaaataactgctcagaagagctgagaggcttccagaggagagactgtgtaaacagaggctgtgtgagtgctgtaccatggccagtgcccatggggccagcttttactctagatcaagtcaagtggcatgaacacacagagtgtcccatcccactgccgagctgctgggttgaggaatcaaccagtcaaactctcacgttgcccatgtgtaagcgcttcaagaaaatgacttccccagttgtattatgacttccccaagttgtagttgtattggcagcttgggctgccaaactgccacagactgagcggcttaaacaacagacattcatttctcacagttattttctaaacctctaaactgaggtttagagatgttatctgatttgcccaaaccctcacgaggttcagcatgaaactctcatccaggcacaatgcctatatttatcctctttcttatggttatacatctgccattgcagtccctttgggtccttttttaaaataattttaataatttttattttttgaaaaggcttttccaaggctcaatatacataaatcattgaatttataatgtttagtatatattaactgcttagtgtaatgtttagaatatacataaatcactgaattaactagtcagcttcctgagaaatttagtgatctcacaactgaatgatgacctggagagtttgttacaacacagattattgggtttcacccccaaatcttctgactcaggaggtccaggatggggcctgagaacttgcatttctaacgagttctcaggagacgctgctagtccatgcatcacatctggagatacactgccttggtgtgatggaaaaagaattctacttacaatcataagttatggggctattctctcttttattggccttctagctgtgcgctggtggtacggactgaactgtgttccctgtttgttgaagtcttaaccctcagtacctcagcatgtgactatagctaggactttaaaaaaggcaatgaggactaaatgacatcaaatgggtggatccttataagaacaggaaatgtacgcataaaaagagacaccagggatgcacacacatagagataaaaccatgtgagggagaagaaagccgtcggcaaaccaaggagagaggcctcaggagaaaccaaccctgcccacaccttgctcttcttggtgctgacaactgtgagataatgattgtctgttgtttcagcagctcagtctgtggtagtttgtttggcagcctgagctgactaatacaactggggaagtcacttccttgctgagcttacacatgggcaatgtgagagttcggctggttgattcctcaggccagccacttgacaatgagatggggctttctgtgtgttcatgccacttgacttgatctagtgtaaaagctggcccccacgggcactggccatggcacagcactcacgcatcctctgtttacaccatccctcctctggaagcctctcagctcttctgagtagttatttactgtgtcctacatgttcctccaatatttagtacatgcttctctcacaggtttcactttgctgatttgttgttactcatcgcatggttttcagtttttcccagtaggtttagcatttttatcatttggagtctgcaggctctatagtagattcttagtaacaggactgtcaacactgcccagaaatttaaccatgtttccctggccaactctcacttcttgtgccaagtcaatttcaaatgtcccctctcctcgtgcctccggttcctcctcctcccactcccattggaggagggagttcctgcctcagaaagaaaataagagtgaataaatccatccacctcccaccctctcccacctgcatcctctttccttcctgttacaggaggaaacaccctctttccttcctgttacaggaggaaacaccctctttccttcctgttacaggaggaaacaccctctttccttcctgttacaggaggaaacaccctctttccttcctgttacaggaggaaacatcctctttccttcctgttacagagtagggccctcttcctaggtgaggctgatttctttgccaagatgaatcctttcccacctttgaaggaagaattcattgctctctgttttcaatgcctccccctgtcctgaatctttctcactatggattatacatgctcatggctcttcttttgctaaagacaaagcagcataagagaaacaaaacccttccttcaaatcatttccctccagttgcctccatagctctctcccctttacagccaaacttctttctcaagagttgtggagacaagctgtgacttgcatcgtcgtctctcacttgagcctcggtcaactcagatatgtgccattttcccaccatcccactcaaaaggcctgttttaatttcactggtgaccagcacatcactagtttcaaaaggcatcatcctttatctctaagctgtatccagcatcctctttttgggcaaaactttatttctttggaccctatgacacatcacttgttttcccctgagtacttgtcttcacctcacctcctgcttcatcctgaccttcatctgttagagttctaccatgctcaggcagtccctgagctctcttctctctttattcttctgaggggtcattttgtccctaactgaggtttccttgttcccatactgctgctcatacatctggggtcagctcagatcacctctcttggctcttggctataactgcctgctgagcaactccattctaacgcatcccaggtacctccatctcaacacgtttaagtccaactcatgattttaacccagaaaactttcctctggctcattcttggtcttagagaatattgctgctctctacctagtttacaaaccagaatgtcagagttattcatgagccttttcctcttgccctccatatgtagccatccctagattccatcagggcatgctctacactgcagccaagtctttctttctttctctctttctttctttcttttttttttttttgagacagagtttcactcttgtcacccaggctggagtgcaatggcgagatctcagctcactgcaacctccagctcctaggttcaagcgattctcctgcctcagcctcctgagtagctggaattacaggtgcccaccaccatgcccagctaatttttgtatttttagtagagatggggtttcaccatgttgatcaggctggtcttgaactcctgacctcaggtgatccacccacctcagtctcccaaagtgctgggattacaggcatgagccactgtgcccggcctagccaagtcttaagaataagtatttgatcacattattctcactcccaaatatttaatggtttttcatcttctgggactcaaattctgctcatggactcctaagatgatagaaggattggatcctgactgcaccttgtctatgccagttggactcctttcagtttcttaaacagatcaagctccttcttgcccccagaatctttacaacagctcttctccctgcctggaatgctgtctactctttcccccttctctgagctaatctttgttcattcttcagtacgtgatttatttgactcttctgcagagtcttcttcaacttgccagaccaagttacttccctcctgataaatgctcatgctcccctcttatgcttcacagaacctgtggcaggttgtatttaaatagctaattgcaagtgtttaacatctttgcccagtgaaagaatgcaaattcagtggagctatctcgtgtgtggctgtatttctggcagggaatgcagtgtctgtcataataaacctggaatataggtttcttgcctgactaacagaccagctgaatgagaagggacacctgcatatcaaggcaagtggtaaccacttggccttacctgggttctactctagggcttctggaatccatgtatcactgcacatatctggcctttgcgggctctgtcccacctacagagtgaacagtcccacagtgttggccacactgatgtggccaactgatgtggtcccactgatgtaccattgctttggttactttgttcggaatgtagttttaagagaaggggcctttttaaagaaagtttaaaaatcacctgggtacttagtaagatggcatattcttaggcctaactttcacaaatttggattctaaagacctagacatttacattaaggagcaccccaagttccttgatttagatggtctgtggccactactatgagaaacatcctgttagagtatctttaagctcaaagtttatgtgaaagatcacaaatctatctaatactgagtgatttggggagacatgattgttttctttatataatgctttgtcatgccctttaaaaaaaaaaaaaaaaaagaaaccttattccctgatgtgagacctgagattgcatttacattttcagctctatgatctgccactaccactttacatacagttctgttccttttttctcccacaatttaattctctgtatttcatttctaattactgcttcttctgatgatggaaagcaattttggcagtgattaatttgaagggtctgcaacctctcctttgctttttaagacaattctatttgcacagcccatcctatgaagggctagtagaactctgcctcttcagagggctgttccaaattttttgggtgtctccaggcttaaccatgatgctaatcctagagtgctgtcttttcttctttaaccaaatttcctcaaatttcaaaaaccaccttccctggaagcaaggtgggaagggacatggctgctgccaattatgcaggccaaagaaagtttgtgttccacattagctaaaagcagcagaaagctaatggcagggtgctttgcagaaaagagtctgccaaaataaaatggaattgaaatagatttgggcaggataaatgctggtggcaggtgccagaaagcagcaacttctgtcagaagcagtgaaaagagaagaaagtgtgtgtaattcttgcagccatgcagatcagagctactaaataaacctcctgaggttaatgataaatagttccaaacctcatctcctgtactggaatatcatattcctgtgagatatttaacaaaagatgagattaactcatcttaaatgcagtcattgcctcaaaagtgggtaatgcagacaggactagctctgagcaactttcactaacatatctacctccaggaagctaaggataaataggcccttgaaagcatcttcaatcctgtttcaacacccacctcctcacgggagcctaggagagttgggtagggcatcttgaactggctccttcaattccatcttcctccctactcccataatccatttctttctccctagtggatagagatacttgggaatactgtgagtagctgcatttatctctctttgaaccatggtacaaaatcatgactttactttgttaactactttaactttgttgtttttaactctgaaaatcatgttgcaatgaagccccattaatgacttgaaaactgctcctgaatgaggcccactaggcatggctgtcaaagttgagagtgaaatcaagaggttaaaggaactgcagaggtggtattaggttttctgaggaggggaagaatggacccaggagagagagaagcctcacctcaggaaggcaatacatagatagggatgctgaatacaatatttggtcaatatccatccattcaatcacccatcagaccttactgagcatctcatttgggctggggagtgagattaaagctgaagatattgagatgaatttaaattaagctccactctttctggtttcaaggacctcagcgcatatgaagaagacaggtaagtggaaggtgataggaacagtgagggagatgaacattgggctcaggttgaagagaagatttgatagtagggaaatttttcttctttttttcagctatatttattgaccctcacttgtgccagatgccaccgtaagggctcctacttgcattatcatcactaacttttccaagaggagctgtctgagccagacttccaatgggcagatgcctgacaacagagtccacatgcctgcctgcatagaaccttgcctcccaaatgtgaccaaaatagaaatcagagagcagggttaaggctgagatcataattatggtgcagcaaaattatctctcgccctaaccatcaatgacaaccgcaaaggaagctcaggtttggaaactcaagtgtgaagctgtttagagactgcaggaagacctgtctttggtgcatatttagagtttaggtgccttgaccaggtagtataagccctttagtgatactgatgggttcataccacccattcaatatccctgattccctgaatgtcaactcactgtcttttcagtataggtttaatcaaaagtgtttcagcaacctttattcaaaaatgtggctgggtttaaggtatgaccttattcacaagtgaaatactaatttgatcttttgacattttggctattacaatcatagggcattgcaaagaaccaaatcaatgatgaattagccacataggaattggaaattttaatggcatgacatgtagcatttttcttttacctatattgtgtttttttaagaaaaattacatttgaaaaagcagtatggttgttataagaaataaacagataaagtatcacataaattgataattatgagattatcaataaaacagtttagataaatattgcctccacttattagcttctttaaagaattaggcttaatattgattttactttttaagaatatatttaattaacctagctttatttatttatttgagacagagtcttgctctgtctcccagactggactgtagtggcgtgatcttggctcacggtaacctctacctcccaggttcaagcaattctcctgtctcagcctcctgagtagctgggattacaggcacccacaaccacgcccagctaatttttgtatttttagtagagatgggatttcaccatgttggccaggctggtctcgaactcttgacctccagtgattcgcccaccttggcctcccaaagtgctgggattacaggcatgagccactgtgtccggctcctagctgtctgtactgccatgtttaataaataattgtttttcaggttttatgttttgttagtaagcacccacatgccacaaaaacattcttttattttcttttccttttgatttctctctattccctttcctatttcctctctccttccttccttcctttttcttctctcctctcctcttcccttttctattcttctttaaaaataagatgtttgattttattggctctctacttggggaaacaaaaatgttttgaataagacaattcagtaatggtttggataaatatcatacagctttatatataccagaacaaagattgaagagtaccctatctaacagggaagaaaattacctgtccaaaatgttcagtgtattcagggttagccagggctggaattcaggcatcctgatgctagagtgtgtgacttcccctgtgagacatttacaaagttagtacccatcttaatggtgtctgcctattgaattagaagtatatttcccaaggaaacctgtagcactgttaaggtttccatgcagctcacctgattctatttccctgacttggtgagacagatgcaatgatttatgtcttttcatgtctgccaattattctgaaatccagcattatgactggggtcagcagaaaatagtcctcataccatttctgtaaccagcttagcatatttctgtcccataatccatgtctttgcatgagattccttctatttcttcacactctggttaccctccctacctgtcacaaacatgtttttatttttgaattgctggcattggctgactccttgaagaaacttcctctaatctgacattatgtatatttcactgtgctgttcaggtttcactgacacgttttgtttacttgtttgactctattacaagaccaagaacttctcgaaacccttcttcaaatagataacccagcacctagcatagcacttgcactagtaaatactcactgaatttaattccccaaatttaactcatttcacaacctctcttgaactggatttatttataaataaatgaaccttttgatctacattagttcagagagccatttcagcactagaattctgtaactcactgaacagagaattttactgtttctatctcataaaatcatgctttatttcctgaataagtgtacagtctttacaaagtaatttatcgtttacaagatgattaagtgttcagtgctgagaaaacccagaaaattgtgaagaagaataaaagagtcataatctcaccacaagaatataaatttttaagtaggttaaaaaatgcttataccaccttcgctttttaaattaaaaccttccattttatcaaatggcatgtagggtttatgaattattggataaaatgcaacttttcactaaaagcatatcaaaatattattttttatagtttaatattagtagttttagcaaattatcttcattctatatgtattactttgcaacatttttcatctgatatatgatgagtgtcttcctataatttcatatgtgatgttttaaccctccctcattttttggttaatacacgctgttaatacttgggtcatattccctctcccactcattttactgagtcacctttcatgttcatttttcaaaagactgtataatttcatcttaaattgctttattcacttacaaaatgtaataaacattctctatgagtatttacctatactattaccttaagcagattaatgtattttactacatccttgtattgtaatttgttcagttaatacctacacattaaatacttgtttcttgcctcttgttattatattcttttttttttttcttttctttttctttttcttttttttttttggagatggagtctcactctgtcacccaggctggagtgcagtggcgtgatcttggctcactgcaacctccgcctccctgtttcaagtgattctcctgcctcagcctcccaagtagctgggattacaggcatacaccaccatgcctggctaatttttgtatttttagtagacacagggtttcaccatgttggacacgctggtcttgaactcctgacctcaggtaatctgctccaccttggcctcccaaagtgctgggattataggtgtgagccatcgcgcccagcaagatgttataaatcacctggtttatgtatgtgatgaaattttattttattatttataataaaactcttgtattgagataaagcagatcaaaggcgatctgtatttgtctccaacagaaagactatatggacctgttctcccaccaggaatgtataagaagatccgtttccttaaccctcaataatattagatgttaacattatctttaatctttactatattgattagtttaaaaactaaattattgccttggattacaatatttacatattggctattttgtaaatcttttattaactgtatattcctgaacgttgtgtgcccattttcttttggagttttcatcttaattttactgacttgaaagcattatgtttgtaaagctttattataaaatcttcaagaacacttggatgaactgggtagtgtggagatcatattcttggatgcttgctgagactttgatatttaagctatttctcataggtgttaatgtttgaacaattgcagccaagtgaccaaaagaaaaattctttggacatttttcccaagcaatttgatggtcaggataaatgggaatgcatgattatggatgaaactagagtccttgaatataattgcactcataagtcaaagaaggcaattcataacaatttggcccagcattttaattttgtctgttaaattattcatgcgaatactttcatgagttaagccatgaatatttgattggtggttgattcataaccataaactatattagccctttatttttctcatttatgtccaattaacatatacgggaaggtggagaaaatttattcttcttaatatgagaaacatctttccccacagacttatcgaggctgtctgatgaacatttactatgactccgggtcaacattacgtttattctggcagtttaataactgttctaataataattctcattacatagagggaaaatattacaaatctctactttacaagtgaggagatgacattcagagaggttaaataatgttccagaatccacacgatatgttggtggctgagattagattcaaatccaggattaaaaaattgaatgttccccaccccacagtggctctgatgattgttctcaatgaacccaggccagtgtgcacataaatcaccactctctgagtctactctattccttttctgttaccagagctaattgctaagtagatatccaatacttgtttagtcatgtcagttttgtatcacttaacaaatatctcttctgccaactaagcaggtatttacagccatttccctgctgtacacaaatatgagaaggtgcacagtttggcaggtggctaagaatgggtggctagatgtgaatgtcaaaagctgctacgtaaaggctaatttgtaggttgtgacatttggtgaactgtggctattcagttccttttaagcctgaacaaagtatggcattttaccttgtcagagaaagagcttcttggtcaaagggctgtgaagatatcaagtaattatttcagtaattacttttagaaatccagggatgggcacccaaaaacatcccagttattttagcttgagttagagaattcaaatacttatcctaataaatatgcagacttaatagaattggtgttatccagcactataacctcataaaatcatcaagaagagtgtatatacttgtatgtgtgtatatatatagatagatagataggtagagatataaaatttagtttaatgacatacttttttcctagcaatataatctgtctatatgctgacttaataactgctttatgagagctgtatatggatcaccattgataaatgcattaaatcagtggttccatagactggctgagaatttcaatcttctgggaagttataaaaacacacttttaactctgagtctctggagattgggatttttttttttttttctgagatagggcctggcaaccagcatttaaaatgttcccaggttaatctgatatgcagcctggtttagaaaccactgctttaactacctaatgcctcatcctcattagaactttattcattaaaattaaatactaatttgccttataatttggaagtctaacatgtgactcagcccaagtgactactgggtttggaagtcttctgtccagcacaaaccctgaaatccttaaaaatgggtgtgcaggtctttcttgtcttggtttctgatcacttttaactctcatctcctgccacttgctacacggatgtgccacattctgtttccttgctattcacagagaatgccaggcctatttatacctcctgttttgatctttagacttccacattttcttgtctgcctgtaaactcccagggatctcaaggattctacctgaacgtccgggccgcttggcctgtttctcactttttcctcagcatcccaaggactcactccttggtaccgactctttccagcctgacactttgttacagtgtgctgggttatttctttacatttttatctcaacccgtatgttggggacagaaaccaaagagcccagcgcctgcacacactgggcactcagtaaatatcccaaatgaagttttctcagatatgcatttttatccccatgacccctctacaattctgttctcaatgctgtgacaaatgatgtctctttcacatggtacagcttctttaaaaatgttctcttttgggtcttcaaacttgtttgctgctctctattaactgtatttcagtttggtgtttgtgagcagtacaatccgtttagtacatctgttctttataagactgcctttcttgtgaaatacttcatattggattttctggagtactttagagtcaatcactgggaaaaactatcaccacagctgattgatccggctgagtcctgctttggacgtcgtttaagactgcagtccatgggctacctctgtctctgctcccagcttctcatccacccagtggacagaaaagctgctctccacagcttgtttggaacgtgcaacctcaactccaggagatttactgagattcgttggtagaggctccaaaggatcactcttgagggagcgtggccggatgatcagtagatgaatgatgcacagctcacgctttcctttcgaattttgcttgtggatcgctctgatagctgaggatgttttcacattcgctgcgtcccccagagcagggaagcgggagcagggaggcgcagtgggcaggcgccgggctctcctatgccctgcggggaagtggaaggcgccgggaggagcgggggcggggtgcagggacggtggaactgaggaaaagcaggccgtggggttattccctgaatgaatcccgacccacacataagctggggttttcccaggagagacctggagttaagaacagagaggaaaaggatggtgggagagaggaggaggaagcaaaggagcagcccaggtgtgtcgtccgctctaagcgcagcggagctcacacgccctgctcctgccacgcgttgccacgaggcttcctcttgcattgcagccttccggcccaaggcccagcttccgcactttaggtgcataaaggggacactcaagggagtcctcatggggtgggcctgcgtcgcattcccatggctgcgagatgccgcagggtcaccgagagggcaaacgaggcaaagcgctgtcacctccgcagagctgacccagccgcccttcctcccgcccgtcctgcaggtggctccctagcacggcccgcaactgtgcagggcgtccagctgctccgcgcacaagtggccgcgatcctggcccggaggctccgccgcacgctgcgcgccgggaagagcaccctcgccgacctgctgctgccagtcctcttcgtggccttggccatgggcttgttcatggtgagacccctggccaccgagtaccctcccctcagactcacacctggacattaccagcgggccgagacctactttttcaggtaagttgtttttgttcctttgatttcgaaattatgtcgaggcagattatgaattgcaatagcttcgatacttttgagaattctagataaaaactggaaatataaatgttttcattatttccgaggtctgaattcacgaggagatccttggagaagctcttgctcctctcaggctgtctcagggcaggcgcttaaggctaatgaggctgcctggtctccgaatcctgagcccctgacccctcctcatggtggccgagtccctgcgcgaaagggcgcaagctgtcacccgccgacctgcagagggcccagcacgccctgccccacaggagggcgggatagactccgggatttgtaggattctagaacgtattagatatatgtggtattttcacaaagccctccacagttgtttctgggacaacagccccacagttgcacacacctctctgcggagaaacgtatgacagcacggaagggatggaagccctgagcctccccaggctggggtcaattgagcaggatctgttgccggtgcgttcagaagagcctgggtttttgccaccaaatgaatttacgcaagaactcagagctttctgggttgcagattcatacacaagggttgggaacctaagatagaaaccgatcccctaagttcctttgccttagtttagcgggctcctctctagattcaggagaatctgtgcagagtcagggaggcccggcccttgccgggcacggccatggctgtgatccagacatcattacattgaacatgcaaaatcgtcttcaaggtggctacaatttttcacatttgggatggggagacaaatgactggaactcagtgatactagtttacaactgcacaagcatactggctaggcttttcaacatgaagacaactaagaggacagtgtcagttctgcttttgtcaaatatatatgcttactaaaataagcagcttaaccagctaatctctaagagcctactaatatgtgtgtaatttttgtagtgatgtgtaatttggaattagatttaaacaaatacatggacaaagtaaaaatctatggtaaactcttcagtttgttccctccttgtcacactcctcaactataaaagggctatcactattttgagtcttttgattataaaatatgtttcttgaagaaaataatacaaagcacaggctagccaaaaaataaaataaaaaacaatcacatgtaattttaccagagatatctacagtaaacctactgggataatctgccacatgatatacataatacttgtatctacatgcatttgtatttgttatcacaatgagattacactgtaatactctctgtaactcttttacactccataatatctttgtatctcttcttataaatcagtacaaccactttactcatgaaaactacagtaccctgactactgaatggctctttagtagtatgttgttggaggcacattaatttatttagacagtctctttttgggggcatataaaggtttatttatttgttttttttttcctattataggcaatgctgtataacaatctttatttagttagatttaggtgactatctacttattcttaccatcagacatttctattagaattttggggggcaaaggcatcagtatttttatggtagatagtgccaaattacccttataaatgtgtgccaattaacagtcttataaagtcattgattcttttcttcaacaaatatttatggtgtacttactatatgctagctactgttctaggtggtagttatatgtataattagaacaaaccaaaacccctagttttgtgggagaaaggaagttcagttctctaaactctaaaagttttgatagttcagacctgatatttcattgcttaataggcagctctttgattactattgaagttgaatattttcaaagttttttggttatttaaaattttactttacatattgaatatattaagcatcatctatatatatataagtgtatttccacatcatattttgcttctaactgacttcttcaccctcctcccctctctcaactttaccgcttatctttttcttctgagaccgctgagaatttcccttcatggtgtttatttcactgataccattttcagttgactccagatagccattcactttctctactgcattgttaatttggcgattatgtttttcatttgaaagcatttttcctactctcccagtattcatttgttatagaagtgatgcacttcaaaattattttgagtctgagaattaagatattttaatattttcttctatttctaagagttactattttaaattgagatattggtttgttctcatttttcataatgttacttaacttatgaaacagagacattcacatgtctggaggtttattttctcatccttacaaaggagtcctgcctacacaggctatcgtacctgttccatcagtgattgcaagtgccccacttctcatggttaatttctgtctaaagagaaaagaacaagcttacattttctcagtttttattttagtagagtggtagtttagttagttatgaggaaaaagtaaaaagctaccaggaagcatccacattgatggaacattttcttgcttttttgttattatctctaatgtttgcagtgatagtcaaaaattagtgggcgagaagaataactatcatcatttgatcattttatgggtgctataactgctcttgttaggaattctccactgacattcattacttttcttctgcatactggatcctctctgagtgtgtaccttgatttctctgaagacaacccctgttgttttgcatttgtattaaacttgcctctttccactctcaaaagtgccctcttatgagtgataaatgatgtggccattccttcgttattgaatctgagcaccatgatctaaatcttggcacaggaatgattcaaaaggggcccagattttcacatcttatagtcctcctgactccctgtgtacacaggccacccgtggtaacccagcacccatccttgctgctccaaatgtgggacaaccccattttataacatctgtgagcagtctccttgggaaggcatataagattgccattacactccctctctttctccttagggtaactccctgttgatagatgcataattcaggcctgcatgtggctttcaaaaatcatgaatgcattagctttgtgctgatttggaagatacatataaatcttatcttattagtgttctgacaattctcaatagagccccatgcttctaaaattttagagttgagaaaatgcaattatatatctacattaaattcactgaaaatttcttgcagaatacaaatcttcataaaagcacaaaccagaagaaatgcactagagaggttcttttctacctgaatccttctacaaatgaagggaacagatgacacccccacagctcatagagggtttgagcttcttgggcccaaacaaacctggggctttggcaactcagtctgcagtgttctccaactcacatgctttggtggccaggtagggagtgaacgcatgacatccacagggctgtaaagatgcttgttttgtaaccagacctccacagcacattgactttatagactgtgagggaggaggagaagtatggagcatgtctgtgttggtttggggtctggtcagccattcatgacccaggcttctgactcagttttgttctgaatcaacttgctctgattgctgttttgagagtgctccagaaattctccctccccactaagaagtgtgagaaaagggtggcagggcctctgtgcctgtttagggtggaggcgagcagcacagagcagccccagagaaattagaggagggtggtgcatctctgagagatatagtgtgaacacagctgcacctgcttgcagacatctgaggctggtaagacctgacggacctgctcaaaaccttgagcagctccatattgcccaagggatgatattgccacatcttagcatatcctacaggtcctcctggtgcctctgcagcctctgccactccctttatctcatgctctgaacttcagaatgacacaatcatacatgatgttgctgcatctctccctgtttaaggaaatggaaactaccttcctctcctcagtcctctgccactcccactctatacactctaatgttcccagcaaaataagaatacttcaaaacccggctcagatgcccccttccaaggatcctctgtgcttgctctctcatctgaatgtctgtcattcctgtgtggatgtcactgtggcttaacttagtgcgggagattcttgcctttcttcctacagggagacttcctggagcttaaggatcaagccttctttatatctgtacctttagttcctgccaacatgtctataaatgattactttcattaaatccttgttaaattgaaataatgaaaatgaaatgtatcaaaaatgtcttccagaaattaacttggacaggcagcagacaaacaaatggagcatagaaagacagctctctacacattaaaaatataaaatatttaggctccatgacctcatcttctgggatggggctcttagtccttactagaggagatggtcctaaatataccactagttcactgcattagaaaaacccgtgagccctccttgaacatggacctgaccctggcccactgtctgctgagtttgttcctacccccaaactctctctctttttctcctagttctccaactaggagacctagaaaaagacctagaaggagcaagtgtaggactcccaagtcctggttgctacaccagttctttaagaacccaagagggccagtggatgtatgtggccagtcggtgcccactgtcaccatccccttctcctgttagcatgccagcagaaactgggtgcgttttttagttttctagggctgctatagcaaagaaccacaaactgggttacttaacagaaatgtattttctcactgttctggaggccagaagtctgaaatcaaagggtcagcaggaccatgtcctctctgaaggctccaggggagaatccttccttgtgtctctagcttcagtggctgccagcgatccctgacatgccttgacttgtggcagcatcactccagtctcagcctcctgtcttcatgtggccttcctcctgcatgtctctgtgtccacatttccctcttagaaggacaccggtcatattggatatggtacccactctaatcctgtatgaactcatctaattatatctggacaaactcattccgaataagatcactttctgaggttctgagtgggcatgaaatttggagggaaatcattcaacccacaacatttcctacaacatcttccttaacaaataccactaaatttgaccaatctcttggccacttgcctacagtagaatcacttggtgttctgtaaaactcaagcttttctgctatatgcagaaggataacagaaattaaattaactgaagactgacagtgattgttggtgtatatttgttggtgttctgtcatctcaaaaacatccaccaggttttgcaaaatggtcaccgggatgtgataaatgtatacttcatgatccagtgatgttaacattcatagagaacatcttcaattatttatattcttctcctcatatatgtacaacttccttctatgtatgtggcatctttatcacatgagatagtagtgattgcttcactttgtttcagtaattcagtgagaggacgaatggaaagtaattggacaattgtttggaagaaatataatgaaagttatttttcttcttattcttagtaaatactaggatggacctaatatatcatctgtgcttttgagcgggatggagaggatgtagcacactcaccagcaggctcttggaagccttttttctggcagaataacatacaaagtgctggctgcccctctgatctcatttcctggtttcccttcccttgtctgcaaggtccgccttcacaccaggcttcgtccaggtcatagaacatccaaactctggaccgactttgcatgtccagttggataccccaagagcattcttcctctcagtcatggcacagaagctgctttctcaatgtaactcgcccatggtccttttacagtccagtgggaaaaaacagatggtaaatgaaatagctgaaactatttgcttgacttaattatgtatacattgtatggggacaaagtccagcactgagtaggcatttttaaaatgtttacccatgagtgaatatatatccttcatgctctacccaaccatgaatttaggatgtacttcatggcccctcaccctgggtgaactgttcttcagctcagcccacctgagattcagtaatttgtgaattgctggtagtcgtacctcttagtgggttgaaatttaagaaaaaagagagagaatccctgatgacgacattctcattgtggacagtgaactcacagatgttgggtgaactcctcagttggcacaacctagccaactagccaacaggactgagaatccatttcaggcctcctggctctaattctcattccacaaacacttacaaggccataagttctaccctgagaaagtttacagtcaagcagagaaatgatccctacaaacagatgggaaagtcttataggtagatacttggtgcaggggttgtgcataagccacatggggagatatttaggggtgtcaaagaaggttttttaaggctatgccccctaaattgcttcttctgagataacaggtgttttccagacgtggagaagagaaagtttcttctcttgtactctctctaaaggaagagtgtgagtaaatgtgaaaagtaaggcaggaagtctagcagaagccttgatggtttctggcaggtattacggtattataaggcattctgaggagaattgacattatcttgcaaacacaatgcagggaggcattaagaagttctaaagtctggggagtgatatgagggggattatttttgtagcttccaggtatgaagtcttatttggagcagtctatctgagtctcttcccctcataggtaactttttctgtctggaattgtgcaagatttcttctttatccttggagtaaaggattcccccccccctactgtttccttatcaaaactgcagatttaagtctttttttcagttcagggtaatttttttggggggtgggggagtacagggtctcactctgttgaccaggctggagtgcagtggcgtgatcttggctcactacaacctccacctcctgggttccagtgattctcctgcctcagcctcccgagtagctaggattacaagcatgcagcaccacatctggctcatttttgtatttttaatagagacagggtttcaccatgctggccaggctggtcgcgaactcctgaccttaggttatctgccggccttggcctcccaaagtgctgggattacaggcgtgagccaccgcatcctgccagttcagggtaattttcttctattattaatctaatttcttcacacccatttttcctttacctccttttagaactcctagcacatctcatgttagggtcttccaaatccatcttttaattctttatctttccttaaggatttctttttcctttttgtcctccttctgtgtggatttttcttatacatcactgtttgtatctaaacagtggctatcctcttactcaatttatacctctaatattatcttcaggaaaccattcttcttggtttgagaaagtcctgtgtaggcatgtgcttctctgtttttttgttttgttttgttttgtttttaattttaaagtgtgtattcctgcagcacctttatttttcataaatattggcactgtttgggtttttctctggttgctgggaccccaggacatgtgtttgttattgctgttttgacagatcagataagtatgttgcctatcaactggacgaagttccgaatcaaagcacattctgcctctgtagggcagcagctgggctgccagtactttctgtttttttcagggaggtggggacctttgcttcctatactctctctcatttaggaatagaaggcatcagctcctttaattaagctttttcttgactattggggtccagcgagagaggggaggctgaggtctctggagatttgcaggtctctgagggccacacctcccaggatgggtcctttctggtccttttccctggatgctctgctcctgttcttcacattgcattcatatgtggcctggcctgtagagatgatggccctgaatttgcttggctagtagcaaatcccatagagcccaagacctcacctggaaccagaaatttatcaacaccaaaagctggttggatcaggagaggtcgaaagactggagctgagagtgtagggaaggaaggaataaagaaaggaaaggaaaggaagggaaaagaacggaatggaatggaatggaatggaatggaatggaaaggaatggaactgaacggaacggaacggaaaggaaaggaggaagggaggaagggaggaatggaggaaggaaggggagagtgtaggctgctgtcttcccagatgccccagtgtttctcaaggttggtttgatccttgtctaaatcagaaccactggggggacttgttaaccaggaaggcccattaggagtgtgtatttgttcagccaagctccttgggtcactctggtgcacaataaattttaagagatgattattagagagagtgattccatttatgaagttcctcgagaatcataggtagtaattttcaatttctagagtctagtaaggacagatgtcaaatgtttctaacatagagatttactttaaaatatagccaggagtttgaaggcaacaaaagagggatagtttaggaaaaagcatttgaagtttgtggtgacaaagatacttttaaaagaagcttgcatttcctaatttgttagaaacctgaaggctgtttatacagaggtcacactgcctacttatgagacataactttgttgtaaatttcagcaagttccatcattgtgtgtttctggccacagctgtagggaattatattaggacagttgtaaaccatacgaatattttaaaatctttattaaattttatgcagtggggaagatagtgtttttctgtaaacatttatttctggatttggatgccacagaggtgtttgcattttaagttgctctggaaacaaagtcctcctcagcagaaatataatactaatttaatgtaatgagttgcatttcttctcaattaaattttgtttttgtttgaatggtaaaagttcagaaagggccagatttagggaagtaaaataattggatggagattaaggatgaggccaatgaattcagtgcattgttaacatatcacaacttggttcgacacatcatttatgagaccctgagttccaacacctatcctaagcattgtgccctttcctcaaggattgcttcattccagtaatgagaacaagggtaagcctccagttaaactccagtgaagatgtatactaaggccaccaggcaggacaaatggagcagaggaggcagggaggacttattatggaatcggtgttccaaccaaggtttccaggccaggctggagatggcttccaatcaagtgtccaggatattggagataccgagacagagggatcagcaccctcaaaagcagatctgcccaatcaaacagtggttctcctggtctgggctgcgctggctaggctgggctgggtgccgtgctcaggaagaaatggtgagcaacaggccctaggattgtggagggattcaaatactatttcaaaacgcataggtaacaagaagccattgatacattttgagcaaagaaaatgtcagattggtatgttagaagagctcactaaaggaattagagaaattgggagtctgtaatgttccattctatgtgtacggtcacactgaacagtagcctaatgagaagtttcttctcattctgagcttacgtttgttctgcaggatgtggttggaaattcctacatttccacctcagacctttctacattttaatgctaatagcaattcagaaaaatattttggactcaattatttcttgtctgagaacaaaaaattaattagagaaatcagtggttacagattgctctgtggttgcttacatttcttctttctttttttttttttttgcattttctgttttaaagcttttttattgctcataataattatacatatttatggggtacatgtgatattttgatacatgcgtacgatgtataataaccaaagcagggtatttaggatatctatcacctcaaatatttataatgtcttactttgggaacatttcaaatcttctagctgttttgaaaataggataaattgttgttaactacagtcaccctgctgtgctatcgaacactagtacctatttttttttataactgtatgtttgtacctattaaccaacctctttctctcccctattcttcccagcttctggtgtttgcatttcttcaatgtagctaatgttttaagttctttaaaaggagtcacttatgtatatttgttaatttatataataattctttccaaaaagaattgaggtcaccaggtatatctatataatctataatgctgattatataccatttttgaaatttttgagacaagtgtttgcaaagattcttactcaaaaagtattttataaataatgcaatgtaagttctgaaaagtaagaaatctatactcttttctaaatactaatttagaattttaattaattaaatgagctcattctcattcagtccaatttagaaaatcttaaaatgtctttttctctacattttctcaagattgtcttataattgaggtataaaatttaatacagggtttgtttctacaactccccacagtgacatgaatagtgtcttattgctgatggtgtcttcagtaaggaaattcagtattggtggttttggctttcagtaatgctgcttgaactacaaatagacttctgagatgtgtgccagtaaaatttaatgtgtacttaaagcacacataggattctgtgttgaggacctctgttaagaaaatgtagctcaatgtagctcacatatagaaaccaaatgatatttcttacattagaaattgttttatttcaggactatgttaatagaacaaatattcagaccaaactggagctccaactttaagagcatagttttgcagattttaatatattaacacaatatgatattatgtagcctttaaaatttgtttttaaaaaccatgtaaatatgtgaaaaatggtggtgttatattaagtgaaaatgttgaggaaaataatgtactgtgaatgtgagtctataaaaatgcatatctgatggcaaaactatacttgtaataaattttccaattttattgcttgtttggcattatcataaaaacagtggaaaattagctgtatctcacttactaggaatcattagatggatcagcctgactagggcacaatgtgaggtcagcagctggttctccattctctgttgggagccactaataatcccactttgtttcctttgtctcacaatgaacagcagcagtgggggcgacaacttggacctcacccgtgtgcttctgcggaagtttagagatcaagatttgccctgtgcagatttaaacccacgccagtaagtgtcaggtgctctctgcaaaagtgaacactcccaactggtaatattgtagcctgggaggactgtttttcttcatgattggttatttcatgtcacaagtttatgttataaaaaatgaaaattagcctaatgactaggttattactgaatgggccttatgggtatcaccatataaaatgatccgaaataagcttcataattaccccctttctcccttcgtacatgcatgctttatattattgcaaaataaattaataattaacagcattcaatttgtttaataaaacccaaagctgaaaagaatgaagtaggaattaagtctgaattatgtcttagctattatttacttttagagaatccttgtacatataaaaaattaattatatatttttttaacttaaaagacttaaaggtcagtactgtacatcaatctggggtgaattactttgaaaatgatctttttggtatttaatcatggttattgtgatgatctttctatgaaacctggataggggaggcctttctttataaacacttatttccctcttattttgctcaattgttatatattgaagatctactacaagcaaagtgctgctgtaggaaccaaaattaatacggaatatggccctggtctcaaggaatttacagttctgggtagagcaaatgaggcaaatgataaaagccataatgatttattaagtgccagaagtgtatgtttttaagtagtaaatataaaaatctaacaataatacaatattggcaatttgttttctaatttgcgatgacatattttgcccattagtcatattggtaattagtgtgagactgaaaaactattaatgttctcagtaagaaagaattaatagataattatgctgcttcactctagtctttgcaaaacaaagtaatttatttaactaaaacttcaatggtaatgtttctatttttctcctctctgatggaatacacagggtgtaaaatatgtctacctttgaaaaattgaaatgtaacctagggccccatggggtccagccctggtccaagctgggatcaaagaagaaccagttagaaaaaaaaaaatcttttatctagtccttctccttccagaggaaaaaaacaaaaggtagaatcaataattaaaggacagcagaacgtattggacattttgtttggacacgtattttacttccagttccttttacatgggttgcagtagagccccaaactctcctcctctcctctctctgttccatgagctcctgccctccagcccagcctgcagatcagcctcatagcttttctcctctgtccgttcttcttctaccttcctggatttatgtttttgtgttctcccttttctttgtgaaatctacctaatctatccttaactcatttctatatttaatcatttctatctatttttgtggtcagcataacaaaagggtaggaggagaggtacatgaaaagatgctgtgaacacttgtattaataataatttatgtccatgttatacaaatagggcttgattcactaggacctcaaatcagagcaaaaagttttacttaaaacctgtagatttccttctgtaagtgtaaaatattgttgaatttgatgatatctacattttacctccttggaagacttgggcaatcacttgataattaactagaggaaacattttaaaataatacattagattctactgataggttgcttttctgttgagatactcagctctgagtgtcaactcaatggtgctatgttgaacttctgatttgtacctccctctcatacgaagacaatgaagagctctagaaaaatccactgttgtctaaatccgatctaaaatatgagttttctcacagtagtaggtgatgcataatttaaaatttaaaatgtgttaaagtagtcaacttttagtagctgacgggtagatatagatatttagctttattttacaaggcttatatctggtggcacttcagtgttgaattctcctactatttctaacacaaaatggtcactttcctcacccattcttgttaatggtttagtacagaacaaaagtcatagcaaatcttatatttctatcaaacttaaaacgccaagtggggagatggataaggtttatttttgtaattaaaaagaaagttattagatagcagtgatacaataaatcatctcagtactcaggaaaatctagaaggctcattattagccaaaaggtgggatcttcagagcctgtcatggctggtgacagattccctcttaggggcctgtaaagaggaaagttgaggccatggatcagcagtgtagagaatgtgcataccagggatcatgatagaggggtaatataggaccagtcttcctgaatccaaatctcagctccactcttactgactgtgtgacccacgcaacttgctgaacctctctctgcttttcttcatttgcatcagtgtgctctcagttctatagaaagaacagtcacctcaatggcagggtagttcttgtagagagcttttgttctcttaaggcaagttcctgcctcagaaagcaactctcaagacaggaggtccttagagcttctgcctctgtcttcgagatttaaaatgcaccttagcactttggggaggccgaggtgggcggatcacgaggtcaggagtttgagaccagcctggccaacatggtgaaaccccgtctctactaaagatacaaaaaattagctgggtaaggtggtgcgcacccataatcccagctactcgggaggctgaggcaggagaatcacttgagcccaggaggcggaggttgtagtgagccgagattgtgccattgcattccagcctgggcaacagggtgagactccatctcaaaaaaaaaaaaaatgcaccttaggtgattgaaaactccaggcagccctgtagtagagagaactatttcacccagtgtgtccaaacctgaaggaccaaatgaccctcctccagcagcctctctgcagctgtgtcctgtaggccactttagggaaatgctttgctaagtcaaagtgtatttttcgattcttaaactttaaaagaaaaattatgtagaaacttctgatttctcatagatcatcccctctgtctctcccttttatgaacattcacacagcttcttagtgaatctgtttgaacacaaaacttgttggaggctgagaagtgctcaaaaaactacctgtcatgggtcattatgtacctctcatggacacctagttttactctataaaagggagctaggagaagaataagggaggatttggaagagaaaaagaagactttttgaagtcatatattaaattataaacacttgttaaccatcatctaaggcatctgaaggaagaaaggcctgctgagtttcagaagtataaatggaattttttttaaaagtacatatcagatacagtactctgattaaatacgtaactctcttaggtgttatttccatgtaaactcttaagtttcaaactggagtccctataagctagtcagccaacaaagtgtggagaaatctttacgttatttttgttgtttcaaaaattacgtagacattgtactttgctaacctggttaatagaaatggcaagtttcttttcactgggcaaggctttcttcaattggtgttatcatactggctttctcattggagcagcacacactttgcatagagctgggatctcgacagctgcttcacctctctggaccccacctcttcttctgaaaagcagggctagtaaggatggtggtaaaaatatctagccggtgcttgtaattcggtaaatgctagttttcttcctccttttccaatttttgagtaattaagagtaattatcattactgaaacaaagtttgatttccaaatgctagaaaaaatattttaaagtatgggactcataaggaaatagaaatgatagggaaactgtggaatacaaatgtgtttttgaaccactgctacaaatggttttcataactgtttctgttgcacaatctttctgcaacagaaagtttaaccaaaaaggtttaaagaggaaatttaaaaattgtttttccttaagtgattattgaattactgtgtcatgccacaaaaaggaattgacgtcttgctgtttattaattgcttcttggtacctgtttatgagactgcaagcctcagtttccaccaggagccccagccgcaccgtgaaagtcctagggagccctgtgatacactcagtacagtaagaaaagtgagccccatgtaatataatggaaatgctggcgttgtaataaaacattgtcatcagattaacagctcaagctgtgaaaacaaatgtaagagctctgccttctcggcagtgggagatgattatcttgtgaactctgttctagtctgatgaaactctcttttatggaaatacaatggctttgtaaatctaaaagatcattccaattctctcctttgttttttaggaagaattcttcatgctggcgcacagatcccttttctcacccagaattccaggattcatgtggctgcctggtaggtttctgcagcatttttgatctttttaagtctaaaattcaagtgacaaaaatgagtttaccctatctataaaattttcatatttgtaactgtgtctttataactttttggtttcctggattagctgtttctgggaaaagttttgtcacataaagtgaatatttatagaacacagatgctgtatagattgacagtgcccctctccttcattgccttctgcctttggtctttaacattcccctggcattcattaagaaaatgactattcttcaagtaatgataaagaagctagaattgccctaaggaaggaaatttttctaaatttcaaggcagcatgacctcaaggttcttgccatatttttatttgggctagatattaacagctaagatgccccttagctctctgactatggttgattcttacaaaaacatgtggaagtaggtgtgccactattgaggtgagagacatcactgtctaatctgtgaaggagaataaattgaaatttatttggaaaactgattggaactcatctcaaagaaaatctcagactctaattaataaaaggcatagacctgctagccacaatcaataagcaagtatgatgacaggtctaatttataggaaaaagggaaaagaaaaaaaatattgaagttaattgagcatctgtaatggaaatggctatttggagaacgtgtttacagggccttcctagttagtggatgatgagatgcaattctccttaatagttgtcaacctaagggaagaaactgagacaaattaatataggtagagagtttatttgagccaaagttgagaacagctatgtgggacacacttccaagttatctttggaagtactctagagaacaaaaaagaagctcaagtgaaatggccttattgtctagggtgtcaaatgaagttatttgtctcatggccaaggaagtcaaggatgtggacacaccaagagtgagcttagagcagaaatgtaataagtgaaagaaagagagaaaactctctgctgcagagagggatctcaaaaaagcgttgtcattttgcagtgaagtgcaatagttttaataaaaaaagctagcagggaagggtgctccatttatatagggctcaaaaaaccggttaggactaggtgtgtcatttccataaggcacgaatccctggcagtccccaccccatctgtttagtgtacatgcaggtccttagcctaagttactccatattgcttatctcctcctactgtgcatgcattaggggcggaaccctttttattaatccattttcatgctgctgataaaggtgtacccaagactgggcaattaacagaagaaagaggtttattggacttacagctctacatggctggggaggcctcacaatcatggtggaaggtgaaaggcacttcttacatggcagcagcaagagagagaatgagaaccaagggaaatgggtttccccttatcaaaccatcatatctcatgggacttagtcactaccatgagaacaataagggggaaccacccccgtgttcagttatctcccattggggtccctcccacaacatgtgggagtacaaatcaagatgagatttgggtggagacatagagtcaaacaatattacccttcaaggtggatgtgcctggcccaggctagctcttcttatctatagtgttgcagccatgttccaagcaagctccccgtgcaagcttccttatgtgagtatgtcgaaaaaggaaaggaatgtgctcactggggcccactgtatgtcagtgaaacttgctgactacacaggaggcccctttctgtgagggaattcatctccccatctatgtttgcagcccgaactttcaggctgctctttgttagaaaataaatgccgctgaggaccttgccctaactatctgcctagccagtttcttccttccttctctctcataatttattaaagaaaaaagaatgaatcaggagagtgggtggttacaaaagtcgtttgtcagggattctcactggcattgttaggttactttatagctctggtggtggcactcagcctagggtccatatagcgagctgcttagaaatgattgcttagcccaagggggatggggtggagtgtgactgctatctcactccagtgcctctctgggcctgattatttaaagggagctcacattcctcagataaaaagtttttttgtttgtcttttttctagagattttagaagccttgcttttggaggaactagtctgctttcttctcttagacgaaagatacacatgtaagcgggaatagtgacacagtacgcttagtgagcactcagagtgttggttgatatgggagaggttttggaactctccatgtttccctcttggccccagctgtcaataaactcagctacatttggtgatcctttgcagtgatcagttatctttttttttaaatacataattattgttttttttcccctggtcttgtttttccatttattcactttaggggcaaagggcaaatttccctttcaccctctgaagcttcactgaaaatcagttgacaaaaggcaggttaactggggaaataccatacaaatgtgtgaatttgcatgggaggatcacatcacagagtaattaccccaaacccccaaagaggtgcagaaatttctatacccttttcataggggaaggaggagatgggaaatgtggataattcttttagggacaggaaatgattgttatagagaaagaatgggccagggagagagaaattaggttctctctaattagatgattagatgattagaaattagatgattctcctggaatttgagtgagcccgaaagtcaggcattatcttgtgaaaaagtccatccaagcatggttgcattcttcacacttcttttctgaaatagataatgagatttcagggaggggattgaggacttatgtgtttcctttggtaaggagttttttggtcagatatggaaattccaaagagaattggaatggaggaggaacaagacaaggtttcagggaccttgattctgaggcttatttctgaggcctttcaattgataaaaatgcccagcatgcacaaatgccatattttgggggattgttttctatgcctcagcactcatgagatctctgattttttacaccacgctcttattctctagccttgatttgatcattctattatagtagtggcttttagtaccaccagctacctaaggcctattgggattagagtgggtaaatatcagaatgattggtgtttatgttcctaaattcacttcaactcacataaactatgagatttcagtaatatgtaagaaaaaaggttttatctgaaaaagttccatagtcaaatacgttttgcaaatgctggataaagcagtattaagcaggtatctttgccacagctcttctaagaagctatttggtgataatgaaattgtccttgaattgacagtggagtagatgcagcattttctgcaaatttgactgcaagagtccttcccttttgtggcagcagtgtgtttcgggatgcactttgagaaatgttggaccacacgttagaaatcagagaacctcaggagacagggagttgaggtggaattaatgaaagtcctaagcaatgggtgtggctactctttggggttgtctcaaaggagacgtacacaaagctgtgtggaaggaaggcctatagacccaaggccagttctctggtctttagtgttcatgttgagccaagttgactgtgttttgttagaaggaaaaatatttctcttcccttaaatacatgtgtgctatccagcagccctgggtctgcaagagcatgtcaatttaatttttttttttttttttttttttttgagacagagtctcgctctgtcacccaggctagagggcagtggcgtgatctcgactcactgccacctccgccttctgggttcaagtgattcttctgcctcagcctcctgagtagctgggattacaggcatgcgccactgtgcccggctaatttttgtatttttagtagagatggggtttcaccatcttggccaggctggtctcgaactcctgaccttgtcatccacctgcctcggcctcccaaagtgctggggttgcaggtgtgagccaccacgcccaacctgtttcctcatgttttatcaaatatgctgtggctgtctccaaacctacaaaaaggttccatggttagtccttctgaggatgaaaacatgatttggaagcgacaccgttagaaaaggcttaaaggggaacaggaattgagctaactctaaagaacaaacagggatttttagggtctgagctccagtggataacaacactatgacccaaaacatgtcatcgggactgagtgtggctttatacagaataggtggagggcatatttgtttcttgtcgctgagataataaattatcacacagttggtggcttaagaaaacatgagtttattctcacacagttctggaggctggaagtctgaagtcagtgtgactggagtgaaattaaggtgtctgaagactcttgaggacaatctgtccttttcctcctccagcttctcttgtttctggccttccttggcctctggtgacattacacacatctctatctccattgtcacagtgcctcctccccttctttctctgtctagtcctcctctgcctccctctcacagtggcacaggttgtaaccagcaaaagggcctggctgctcgctgcttgtagaaagaggccaaaataataacgagctgattaaaagtgagcaagacttttttatatgtgccagcaaggggaagagcagaaagcaattccgctgtaatttgtggagggaacacagggttttttaaagaaagggtttggaatgcagaagaggcaggggtggtaggttgggggttggggagcggggagctaggaggtcccaggaggggttacttactccaatggttcatcttgaattattgtttcatttggtgaagaggctgaccccatcgtggatcctgccaggttataaactaatcacaatcttgtagttagtcttcagccgggaatgggttctggccttgaagtaatcttttgttggggacagattttcagaggtgtctagtcctctgaaacttctaaggaaatatatgaccaggtaagtgagcatggcatgtgcttaacaagcatctaggtaaataaatatgcataaggcatgggggcatgaagtgggaaaggaaagagaaagaaaacatttcgaggctataagtttatctcagagctacatcttgaaactcggaggggaaagaggaaaagggaaaggataaaacattttaaaatgttgtttgaggctaaactgctaagcagctcagttacaaggtgagtgcatgagggtgcactgtcacaatccaggataatcttctggactcaagatctgtaacttaataacatcgtcaagatacaaagtagcatttaaagagtccagagatgagggcctgatattttggtgggggggcggtcaatattcagtttaatacagagggtgtatttggggacacctacacggataatggttagaatgagaccaaggatattttctcatgatcattaaaaagtcaggaaacaacaggtgctggagaggatgtggagaaataggaacacttttacactgttggtgggactgtaaactagttcaaccattgtggaagtcagtatggcgattcctcagggatctagaactagaaataccatttgagccagccatcccattactaggtatatacccaaaggactataaatcatgctgctataaagacacatgcacacgtatgtttattgcagcactattcacaatagcaaagacttggaaccaacccaaatgtccaacaatgatagactggattaagaaaatgtggcacatatacaccatggaatactatgcagccataaaaaataatgagttcatgtcttttgtagggacatggatgaaactggaaatcatcattctcagcaaactatcgcaaggacaaaaaaccaaacactgcatgttctcactcataggtgggaattgaacaatgagaacacatggacacaggaaggggaacatcacactccggggactgttgtggggtggggggaggggggagggatagcattaggagatatacttaatgctaaatgacgagttaatgggtgcagtacaccaacatggcacatgtatacatatgtaacaaacctgcacattgtgcacatgtaccctaaaacttaaagtataataataataaaaaaaagaatgagaccaaggatattttctagtagacctgaattcttgataataattggaattttttttagcaagaaaatcatctaatggaaaacaccattttagaaggatgtatcttgataagtatggggggtggtgaagtgaattggagagaggaaagctggaggtagggaaactttggaggttgttatgttcatcaaggttggctgatttatttatttattttaattgagaagcagaagttatatatatttgtggttacagcatatcatatatcatgatatatatataatacataaaatgatatgatatatatacatatatcattatatatacatatataatatttcatttatatatagtatttcatttttatatatatcatatatatcattttatatatatatatatataatcacacacacccattatggaaaggctaaatccagctttttaatatatgcattacctcatgtacttattgtaggggcacaggaaaacttgcccttcatcctctgtaagtttgctaaaaaatcaactctaaaagcagattaattggagaaaaggcatatgaattcttttaacatgtacagggggagaattacagagtgattatctatcccccaatgaagttcagaagtttatatatcatctcaagtttaccaaaagaatagggctttggatcctggcaaatcaggttatggcgggagaagacgcattctgtactgggacaataaaagattgcaatagagaataaatggatcttggaacagacactctctgtttaggtatggttacattcttggtcttacagggaggagaagaaataaaacattctccttggtgagtctagattttagttaggtaaagaatttcaacttcatcctgtgctttgggagagatggtgggtaggagggaggtcagagagaccttgaagcttctttagctcagcatgtgaaagcaccacattttggggtattgttttctgagccccaacgttactatttgtgtgcatgtgtttgtgtgtgttgaggatacttaaaatctactctttttttttttttttttgagatgtagtctcgctctgtcgcccaggctggagtgcagtggcgcgatcttggctcactgcaagctccgcctcctgggttcacgccattctcctgcctcagcctcccaagtagctgggactacaggtggccgccactacgcccggctaatttttttttgtatttttagtagtgacggggtttcaccgtgttagccaggatggtctcgatctcctgacctcgtgatctgcccgcctcagcctcccaaagttaaaatctactcttttagcaattttcctttttcctttttttgagacagagtctcgctctgtggcccaggctggagtgcagtggtgccatcttggctcactgcaacctccgcctcccaggttcaagcaattcttctgcctcagcctcccgagtagctgggaccacaggattgtgctaccacgccctgctaatttttgcatttttattagagatggggtttcatcatgttgcctaggctggtctcaaactcctgacctcaagcgatccacccacctccgcctcccaatgtgctgggattacaggtgtgagcccctcgactggctcttttagcaattttcaaggtacaatacattgtcactaattgtagtcattatgttgtacaatagatctcttgtacttttgcctcctgtttagctgaaattttgtatccattgaccaacatcctctctgccaatcaccattttactctctgttcctatgagtttgacttttttagattccacaaataagtgagagtcttgctgaattattatgtacaacaattattattctttttagtatctttcctcaagcctttctttcaagaccctgaaagtagtatcttaaatgcatatcgcccttcttactttgctgtagttctttcatgtgtatctgaacctaacagcaaatccatgcatttaggtaagcctgttttcattttcattttgcaaataagcagacaagcttccaaagctgtaatgaatgtgaaactggcccaaatgtctcttagaagtaatatttatggattttcgaataaacatagaaatggaccctccctggtcttaaaagttgaaacttacatttctctcacctgagtttcttcctcaagaaactgatcctcaggcaagggactgaaatacgttagatctctgagttcagaaaatgagactccagacgtcttatccatcatgattgcttccttacccctccttctttcctgttttcccattttcccctccatataacccccaccagttttagatggttgaggagatggatttgagactttctctttcattctcctcagctgcagaactcagctaaaagcttcctccctggcaacactcattgtttcagtgattggctttctgtgcagcaagaccaaacccctggcattttgataacaaaagactcagagacagagtcgtttcctattttaatatatcatcttttctgaaagtgtttgagaaatggaaacaaagcacattaactctaaagccggtctgtggcagggcagagcacatcattgcgcagcctccagtggcctgggttttgcgttgtgttgatcacctcctcctaccttgttaggtgattattccatgatgcagagctggtgttggcatgctggtgagtcgctggagaaaagctgtttgatttctactttagacccttatgaaagagacacacgcctttgaattatcctgcttatcttcctcccactagttgtttctgactctctttcaggttcgtcaaatgcaagatcaccccagtgaaaacattttttttctttttagtttttataaatctgcccaaacttacatacagaaaaggatttgaagttctcagatataattgactgcataagtcacagtggtattctggcataattctcaaatacatgtgactgaaagagattttagaaattagaacatataaagggctgcagataatttattaaaaattgaaagctagagaacaatcacatgtagtttcaagtaatgtcagtgaaccagtttgtgaattataaaaaagtttgtttttatctttttgaaaacaatttcagaagtgtccaaatagaagtgctagtgctccctacctgaccaaccacctgggccacacactgttgaatctctcaggcttcaatatggaggagtacttgctggcaccatctgaaaaaccaaggtgtgttcaatactcttgttgggtctttacttgtttggattactatggaaaacttattgttttaaatgctaatgttcttaaaaagtcaaaaatctaagactgaccttggtgctcataaaaattccacagtgtgtgatgttccccttcctgtgtccatgtttttacattgaaagtagacaaatagttttgtcatctgtttctcatccatttctaatatttaaatataataaagtctaattgaatacaaaaacaaacaaaaaaaattccacatagatgccatggaccttaataagattccttactgctgactttcactcttttaagtgctgggggaaatcctatcaattgagatttgtcagtggcagaagcacgagagccagaagctgttttactgctttaggaaataagagcagataagtttacagcatgcaagctccacctcccaggttcaagagattctcgtgcctcagcctcccgagtagctgggtctacaggcacctgccaccacacctggctaatttttttgtatttttagtagagatgggatttcaccatattggtcaggctggtcttgaactcctgacctcaggtgatcctcccgcctcaggctcccaaagtgctaggattacaggcatgagccgatagctttttgaaggtgggaacttgtgtgcccagaacttagaatattatctggcacatcaaagatgttcaaccagtatctgttgaatgaatgagtgtattcagttgagccagttgggaatgtgtacttattcctttgcctgaatttttgctgagagtagaacactgtgatagaagagaagactattcttcagtctccttttatctagtgagtggaagacaaaatttatttagataatagttaacattatatttttttaaatgttaaccctttttttgaagtttaatagatacaagatactgtgcaactcatggagatattaaaaaaagatataattcccacccaggaaaaattcacagagctacataaagataaaccagcaaatagacaataaaacccagtgtggtaattgataacaatggatggaaatacagggtattgtgggaactcaaaagacaaggaacatctaacccacttgaaattgtctggaatgctttcctaaaccagacaagatttgagtgaaagattaaagaaatagagtagggaagacaaaccagagtggctcaaaagattatgaccactattaagaaattttttttttttttgaaatggagtcttgctctgttgcctaggctggagtgcagtggcacgatgtccactgtaacctccgcctcccaggttcaagcgattctcttgcctcagcctcctgagtagctgggattacaggtgcctgccaccatgcccagctaatttttttttttgtatttttacaaaatacagaaaaagacagggtttcaccatgttggccaggctggtctcaaactcctgacctcaggtggtccatctgcctcggcctcccaacgtgctgggattacaggtgtgagccaccacacctagcccaagaaattctgaataatggatttgtagagggaatgaccattaattaaaataataacagtgctgatgatcaagccctacctgttacatggcatgtatttcctaacaagacagtaaggtgtgacaagtacactttctaatgtggccagccttatccacaccttctcaattatcagtgccttccgttttgcctggcttgggagccaggaaacttgcatcagcacagcacctgtctgcctgtgtgttcatgtcacagaccacagatgctcagttggctactgtcctaagactgctgtacctggtggggttagtaatgaataccctctgattagaagtcctggtgctctgtggttgaagcactaacacaatgttcattgttaacaggcttggaggttggtcttttggattaaaaatccccagtgaagctggaggtgcaaatggaaacatatcaaaacccccaactctggcaaaggtaatcatatttttttatttttttcctgttttagaaagtatttaggaaaactcaacattcaaatataattttgagcacagggttcagaaggaccagattaaatccaatcatttgttactaagcatcaaggaaaattatatgtaaacattgtcttgaaaaaaaatggcttgtttttctttagaaatcgaggaaataggtttttgctttttgttaagacaggacttcacctagtaaatataaagtggaggaaaaaatctattttcaaagatacccacagttgtcataattggaaatatcactagtttctttgctggccaaggagtacttccattcatgaatgtaaatgccttatcttccagaaggctggatagataggcctggagatgacacaaagaaagcagcagttacacagagctactcttaggagtcctggattttcaagccctgccaggactatacctgtgaattaggaatggtccccttagaattaaagagactaggtgggagattcttcagctttgagagaatgaggactgggatagaggaaagatgccttgatccatcagtaggaatagagaagtggtgaacccaacagtgagttgttatttaaggaaaaaagtcaacactaccttaaaatggggaaagcagaaagattcaaagcattcagtctccatgactggagaaatagtattgtgtttgattgagagagaaatcagaaaagggtagattgtgggaggaagttaagtccactgcgggagagtgagtgtgagttcttattaggatatcagtatagacatttcattctgtagtgtgtggatgttgtgtctactcatgagccaattgtggagctatgagaacaagaacaatctccatgagcccaggaaggcactctctctcttctgtagtggggacttgcatggttcatgtgaacctgaaggagcttattgggataaagacatgcacatgttggaggtttattcagtgaaataaaagttcttacaggtgcttcacaatgtcatccctgatgagacagtcatacttcacaatgtaatccctaaacaaaattttaacagtcatgtattacgatgtaatctgggaaaaatttccagtcatagtgtggacgattcaggaatctctccaacagctgaggtttgttcaaatctcttttccttctaaagacaacacacattcatgaagatttaaagcttgatatgaaaatatcattattaataacttgatagaaaaataaaatgtatttgctgacatatattggaatacattatgtggccattatgaaaatatacctaattagtagaaggaatctgttcatttcctctacaaatattccgactttttagtctatcccaatctaaacccttcttacgtattcataggagatggttgtgtctttgctttgaagtgtctgaggcacggacctcttgttcagtgatgagtggctggggatttgtgtgttctcctcacatctctaactttttgtctttgtttagatgagtcttctgtactgacatgtttgagtggtgattgctgaagtttttaatgttatttacgtgtccttcaccaggcacaagcatgcaggtgaattatacttgaccctttggggactgagctcctctccagcaagccaaggaactcaacattgttgtggggtgtaaagggcaatctattatttgaaataccagaactgctggcggctgatactgcttcaaatgattgcatttatctttctgtaatgaccggctttttctttcagcccttaggctacattcatcgacatagatgatatgatttcatagtccttctgaaggaaaacatgaaaaatttgcatatgaataggcttaatgtatggttcaatatcttgtagaatgtctcttgtgtgacctttatgagttctatcattcacatcttgagtgtttagcttgtttaatcaaaacactctttagaacttacacacttcagttaaagaagccaaacacattttcactttcgtttttttcatagttctgttctcccatggaattttatatatttgaatatccactgagagttttttttttcttatagctgcttagttactttttggaggggctgttattcctgagatgaaaggtctgttttgaggtgtcatagtatgttcctaaaagaagattaatttcctatttcattattggactttatcacttcgtgacttatggactggtagggaaggaaatcccacagcttatttccagaacacagcctagttttagaaaaccattcttgggagaaaaagaaaaagaaaaagaaagaaataaaagctttttctttgatctctgttaagtcctgaatggtaactttaagatcatcacaaagtatgcatttattacttaaagaatctataaaacctttctcaagtaaaggccagtttataaaggaaccgatcaggagttccagaacattttaaaatctgttccttggaactctgcaagtcaatcatttattgccaaaatgatgctatgtagcaaacaactgcaaaccgttagtagcatcaagagtaaacatgcatttcgctcatgagtctgtgggattgtgctgctgtgggctgtgcataacagatggtgccaggccccactatctgtggggaatttgggatgctctttatccaggccctggttctacatccttggaatgttccccagctcatcatctgcaatgacccttaactctactctgccaggtgcttccccttccattgccctccatagctatgtgtgaagatactttaaaatatgccttttgagtagctctcagcctgcttcctgcctgtggacagctgggttcttagagctatttacattttacatgtattccagcctggggtaccttcttgatatagcttcctataaagcaccctaggctttctagttttctaactgagatccacaagctactctcacgatcttgttgagatatgctgctctctctaaaattaattagtggcatttggggaatgccagaatactagaggacaacaccctttaggttcctaaaagccctgtgtctccctgagagagtctcttagcagcatcattctttgaagatctcaacaaagttcttacaattgcacccttgacttgatctttcttctgaggccatgtctttcaacattctctcaagagagctccgtacccaggtcaagatgtttattgggcaccatttccatctttgaagttaatacaggtgacattacccactgttttcacactgtaatatgcgtcacccttttttcaattatttatagcagtttgttttttattatttttccccagtattcctaaatactttatcatgtatttccaggcttctcaattgtctctttgtcccccaacttgctagtatcaaaagcaacgccaactattttcggtttttggtacagtaacaccccattccagtgtaaatcactatattggtactctattgccacaataatgctctataacaacaatttcaaagctcagtggcctccacaatggatgttcatttagctcacgggtctgtgaggttttgctaatgcagactgggctgggctgatcttggccaggaatgaacatgtgtgtggtattggcttcagctgggatgacagtggaggtctcagctccactgttgcatctgatgatagcagaggcataagggagacttcaggaacatacatgtgcctctcaattgtgccacattctattggccatagcaagtcacatggccaagcacagcatcagaatgggagggcatgaaagtcatatagcaaagcatgtggatacagggatggtgaagaactagggcccttaatacaatcatgaacagaagttttggcccggtgcagcggctcatgcctgtaatcccagcactttgggagtccaaagtgggcggatcacctgaggtcaggagttcgagaccagcctgaccaacatggagataccccatctctactaaaaatacaaaattagccgggcgtggtggcacatgcctgtaatgccagctactcaggaggctaaggcaagagaattgcttgaactcgggaggcagatgttgcagtgagctgagatcatgccattgcattccagcctgggcaacgagcaaaactgtgtctcaaaaaaaaaacaaaacaaaacaaaacaaaaaaaacaaacaaacacaaacagaagtctcagaatctacaaagggtgaaactagggaggctgagcaggcagcctcctgtctttccagctccattcagccaaagaagctctgtttttgtttctgtactgtagtgtggtgtcatttttaagttttttttttaatcactctacttttaaaacaaaaattaaaataataaaacaaatcaaaacaaaatttaaaaaaccttaattcagggcagggactatccttgtgtcttctattttttccctaaatttgaacagttaagggaatcaagacttgggggagaaggaggtcacagaccaggctagtgggaggttccactttccataggcagtgggcttttctaccagattagcctgtcccttaacttcaacagaatcctgagtttctatcatttccagaaatctggctagtgcctgtgtaggtgtctgtgtgtgagggggcagggtggcatgggggagaccccaaagggtgacagtacagagttgtgtgggtggatgacatggacacacctctgatatatgacataaactccttcagttcacttttgacttttccatcaaaggaacttggaatttaccctactttggagaattgtgtctatgttgctgtagtttttttgtttgtttgttttggtcacaaaatcccactctgtttagacatagctttgaacactcacagttctgtagttagtgggtctcaagctgcacttcttctccttggggtttaaaaaaatgattggcaaggatttctctgtgaacttaagaaaatattttaaaatgagtggtgtgaaagatgagatctgcattctgaattgcctgaagaggtaggctatttgagaaggaattggggaacattgtcttgtgtagtagggttttgttttttttttttctctttttggttttttaactatatgatcaatattttattacttagctgtttccacaaacacaatagctgccacacaagtctctggttaaaaaataattagttatagcatgaaggggtggaaagaaaagagattggaagccctcaagttggaagggatttgagatctggtccaaagtttgcataaactacgataacttgaataggttcccccaagccttaacttgctgtgaggcagcggtaattctaccaagcggattatctgtcacaaaaggcagcctcttctagagaaatgagctgttcagtcaattgaattaagaccaaaatgcatcagttggagtcatcatacttcttgaagacactcacttgcttttcaaattaataatatattttcatttttattaaaatattgatactttgaaatatagatactgatggtttgattagtgttttttatgatgcttctcattccagctttaataacattgtctttctcttattttcacctttctcttgacaggcatgctactttattctccatgctcagcaaatgttcagttcagtttattttgagaaataatgttccatgttcagttattaatttgaaagtaatcattttttttctgataatcttccacacatttaatttgcaggtcaaatttcagtagcttactaactgagaaagaaaaaaaaatgatagggtttggttcctttattcttataagaaaataattatagagcaacattcacatttgttctggggaaaattaatctatttttagctgtaaattatatgctggagataaatataaaattagcagactagaattgactgctcactgtcagccatgcaggaacattactttgaatcctgcactcaggtgccttggaagttaattgacacatacgttccttaaatcccagaatagttgacaaacagacttacgagctaatttcgtgagagccattaaattatctttctttttttaggtgtggtataatcagaagggttttcattccctaccttcctacttaaatcatctaaacaaccttattttgtggcagcacctaccccctactgtggactggagacaatacggtaatgttatttttcatgcattgtaattcactactttcaaaagacaatgtttttaaaagtgaaagaaacagaaaagtttctgaatagaaatgtgaggggcaatgagaaggtttctacttggcaaccaatccgtgtctaaacacaataccaagttgtaggctgtctttccctttgtgtgtcattaaatgtctttattttcttgaacctgtaacctcatctgtaggatgaggggaacaaaatgtgactggagagttctctcctaaaattattttattctgtgacttaatatcttacagaagcaagaaaaattttaccttttaaagacaatattatatggaatactgtaatagagaatacagactgtccctcctccttatcactgggaagatgaacatcacattttgatttatgctgagccctcaattcatcagttatttatgttgatcattgattcattatctatgctttcttattttggtaaatggcacaggtccatttctggtatccagagttaacttactggtttaagtgaatatttatttatttcacttaggtgggataaattataatttgttaatttaatttagcttcttttttaaagaaaggaaagaaacaagaagtataagcaacaggccatgtccaccacaatttattcacaaaatgtatttgttgaaacattaattcacatagacatcaacactaaacaatttttctaatatgctctcactttatttcaatcatactttatttttccatatttatttttccttctacaccagttttttaacaaagtaaatttaattattttgtggcattgtaattattttggaatgctaataggtaatgtaaaagttaaaaatgtacgtgactaagagaagtacaaaaatagtacaatagtcatacagagtagggacagcagaataacatttctaacatatttgaagtgtatcaagaacttcattagatatttaacatccatggtcttatctgatttttatgtcaattttgtaagatagacaatatttgcctactttactgattagaaaactgattttcagaaaacatcgcctatcagctgtggctctgagcaaggtaataatggggccatgactggattctaggtctagctgataacaaactcttgcttttctactacatcaaactgagatgtcattctggtgggcatgaatacagcatggttcacagaggggaagtcattaacactggatcttgaacaatgagcagaagtttgactgaggtcagaaagccattctaggtcttagcaatgcaataacaattatagtgtatgttcagcttatatggaacagtccagtttcacctcatcataaagctgaatgtagagggataattgttgatctctttggaaagattgtttaagatcaaatgctgcttggctttgactgacatgatgaagagtatggactttagtaagcaatggacaggctttaccaatatgtgagaataagaatgacataatctatgtaatatgttaggaagaatgatctggaagccactgattaaagggagaagactggttgtaatttaatgacctattggaaggatactgctcacaattttgaggttaaggccaggatgaatccagaggaaaaaaatgataaatttcagacagatgggagaaaagattgaggcactagggatgggaataaaaaagattttaagaaactaaaatataaacctgagcattttagagttcagtactgatgacattataagaaatggcagggagaagagatgttttcaaggaaggggcgaggtgatttgtgcaggattagagatgctagtttggttcacatacatagatgaaaatgtgcgtaggattcagaaaactggagagaaaagtttggtagagcagtcataggtaacctaagttctaacattaataacaaatgatagataaaggtgttggtaaagtgagatcctgcacgggtcagacacaggctcagaacagaagaaggctatgggtagaacagagggaagaggacaaaggttctgtagcccttgaggtaagaagatcttggcacagaggccagtggagggcagaatttcacatggatgggcaggaaaaatgaaatatttcagggtcatccagaagaagtagaatgcagacgttttgctggtgacttccagagggctagttcaatggtgtttcagaaatggaaaattaaagtagaaggaattaagcagagagaggttgttttaaaaacttgagactaaacagataaattctaatttgacttgttgatgcatcatcatgggaaaggaaggtttgtgcaataaattgggaatatacaatacatagcaccacaggaaggtgtgttggcagttattatcaaaatattgataaagaactcccacgagcagggttctgatgaaaatatttcatcacatcccttgatgcttgcttgttcctgtgggaaatggacagagctagaactattagcttaatacttagagtgaaacaaaccttgccccaatgtggaacttcagtaaatcccatgaaaacagaagctgtgtcttgctccctgttcgtctcagcagtcgcacagcaccaggctcaggggacattcaggctataacaagtgaatgaacggatcattatactacacggacaatatatcacacttctcatgacaatggtttttgatgaggtttcagcagatgtacacattctaatattagagatttctgaaccctgatgcaggccgcttgataagaagctattttcttagaacccaggctggccctttctctctaggagacagctagctgctcctgacctatcttctcagcctcatgtctcgcttatggcccctcactttcccctccgtgtagctggcctttgcatcactgccctgccatccctgtgagcctggtagctgcattgcctctgctgagactgcctgtcttctcctgcatcaccttaagcatttctgcttaactttctaggcccatctcagacatcacctctgttggaatactcaccacccctgcaggatgagttagtggcttctctttcttctcccacagttatttgcttatgaaattcatccatatatttatttctatcaagcattcatataatgacagatatttcccagacactgtgttaggtcattgctgtattttaaatgtgtctcccaaaagtctgtgtgttggaaacttggtccgcagtgtaacagtgttgggaggaggaacctttgagaggtgcttgggtcatgaggcctcctctgtcatgaatgaattaatgtcagtgtctcaggagtgggctacttattgctgttgccatgcccttggacttcccagactccaaacactgtaagaaataacttttttcctttataaattacccagtctcatagctgggcatggtggctcattcctgtaaccccagaactttgggaggctgaggcaggtgtatcacctgaactcaggagttcgagaccagcctggccaacatggtgaaaccctgtctgtactaaaaataaaaaaattagctgggcgtgttggtgggcacctgtaatcccagctacttgggaggctgaggcaggagaattgcttgaacccgggaggcagaggttgcagtgagctaatatcactgcactccagcctgagtgacagtctcaataaataaataaataaataacccagtctcaggtattctattatagcaacagaaaacagactaagacagtcattagagcagttgatacttcacattatcattatttgtttacattcctttgttaataaaagtgtaaacacttcatggaaggtgtttatactactgatgtttgtgttttctaaagtctttattcataggtattcaataaataggtcatttaagtgaatttgcttttgcactatattttagggttactatagtacattccattatgataattacattctaaaataaagataaatatgcagcaaaatatgtacttgcttctttcgttattaggaccttttaagttggcataattttgttaaattaaaatattaaataaagatataaaataatgaacctaagaggaaatttcttttaataagattaacagaataagtgaaaacagaagattaaatagaagtgcttaagtagataggaaggtatcttcctctgatagagtaaaaatgaaaagggataaagtattattttattttgtgttattgggggtggttgtgggtggtgatgatagcagttgtaaaggttaaacttcttcaactacttattgaaatttcatccaaaccttggcatgccagtaatgaaatgccaccatgtgggaggaattaacctcagcaatgtcatgaacaagccagatccatggtcattaaactgtctgtacattggaatcacttaagcatttaaaaaatattgatttatgttgcttatccaaagattctgatttggttgatttggagtaagtctttaacagcaggcatttttaatgtttttgggtgattctaatggtaaccaagtttgagaaccactgggttaaactgataaacttcccagctgattcatattctgaccactgaagcaggaaaacagacagaagtgtaagttaggagtcagtttagagatatccacactcaccttctcactgctaggaaggaacctgatggatacctggctactgggtgtcaggggaggactgttctgtattagaacaagaaagagctcttgactttcttttctccccatttgtatatctcttttggaatcccctggagggccacaactcattagtatgctgcaaaccccagggaggaaggagaagggtggtgcatgttgcatgctaggatgatgggacagagatgaaatgaacctgggagcagtggatgacatgcatggtagattttcctgctttgcttttgatgaaatgagaaacctgctaaaatctccaaatcacaatgagagagtatgagcatgagaacaggggaaaatctctgatctgtaatagagctactgaatgaacagcattggctgttggaattcggctggcatccataaccttcaacatgcccttgagagctttgggtatatttgagatatttgagagagaagatctggtggtacccgagtgaaggtaaaggggcaccctggtaagggaggattctgagcaatgcaaagcaccagtactagcttgcccttgctggaatcagggagtaagaaacaaaaggacagcaaagccagttatcaaacccagtatggaacaaggactgatcccccaaccacagagaggaggacattgcataccttgagagggtgttttcatggggagcatctcatgatgtgtttatatctgcataaatagaggaaaatgtgtgaaccctatgaaagagaggataaaagataagaagaaaatgccaggctgagctgcagtgtgttacaaaaacggagctagctaagatgaagatagaaatatgaattttcattggatgcagtgaataacattattgattgattacaaacctctctccttcacttagaattattgacttaaagaacaaacatgcagtattctctaagaacacacagggaaaaggtgacacagtaaaactgatcagaggggaaaagctagaggaatcgggtatagaaaaaaagcagatgaataagaaagtaagaaggaatgatgtaagaagaaaatgaatcgaacacaaaacaaaacaacaaaataattctgtaccaatagattggaagagtttgtcatgattctatcaaaatttatgaattaggtattatggcagtagcaatgattgatgcacaaatttgatgaattttctaaagttcaaggataaagaaaaaagtttttacaaagctatgagtcaaagcacattagtttcaaaggaataaaaataagactggcctctgacattttttataatttctcttgagacttcatctttgacccagggattatttcaaaacatgttgtttaaattctaagtttttgagattttcctgtggtctttctgttactgatttctggtttggttcatcacggtcagtgaccatactctgcattatttcaattattttaaattggttgaagttcattttatggtcaggatattgtttatcttgaagcttccatgggtgattaaaaaaaagtattctactcttgttgttagaaatgtacattatatgtcaattagatcctgttggttgattgtgtggttttgttcttccatatcttcactgatcattgaagattactgaaccttcactgaagatcatcactgacacatttcgtttgctgagaggcgagtagtaaagtctccaaattgtggctttgtttcttttttcagtttcatcagttttttcttcatgtattttgaagctctgaggtacacgtcaaatgtgtgtacacatttggcatggtcacatatttctggtggattgagccttttatcatttgggatgattatattttcctggtagattaatcctttgcatatatgtagtgttcctctttgtcactagtaaatgtagttgctgtgaaatctattttatctgatctcaacatagtcactccttctctttttcttttgattaatgtttacataatatatctttcccgttattttatttccaacctatctcattgtgtaaagtgagttttgtgtagagtgtatattgttaggtcatattttttaagctgcactgcctatctctgccttttaattggtgtttgggaaccattgcatttaaggtaattactaatatatttgggtgtaagtctgacattatcatttgttttatgtttcctctgtttctcttttcttgctttccatgagttacttgagcattttttttgattctattatgatttatttatagtatttttaagtatatacattcatttagttttcttagtggttcttctaggtgttataatacatatatatgacttatcacagtctactgatattgttatttactaccttgggtgaagtgtagaaagcttacttcaatttacttttaccctgtttacctttaaaatattattgtcttaagtgtttcctatacacaccacatcagatggtgttctaattcttagttaagtcaccaaatatgacttaggaaactcatgagatgaacaatagtctattatatttacttctatttttaacgtatcttgatgttcatctttccttttgtaagttctaagccttttcctgttatgatttcctttgtgcttatgtaacttctttttgctattctttaagagtaggtttgctaatgaaaaatttgcttatttttttcaactgatacgatctttatttcaccttgattcttgaaagatattttcactgaatatagaattcatggttgacaattaaagaaaagctcagcacttgaaaaatgtgctacttccttttggcttccatggtttcaaattagaaatccattactattctagttggtattttcttccttctctctttgtgacggctttaaagaattttttttgttgacttattagtttctagaaatttaattatgatgtatcttggtgtggctttctttggttttatcctatttgggatttatttagctcttggatttttaggtttatggtttttttttgccaaacttgggaagttttcagctgttatgtctttgaacactttttcagccccactctctctttcccttttctctaagatcaggtaataagattattagctcttgtattgttttcccagaggtctctttcctgagtctcattttttaaaaagtttatttctctatgttatttagattggataagttttatttttttcatctcgagtccatgcagtctcttcttttttagctgcactcaactgtggagcatgtccagtgggttttaatttctgtcattgtatattttagttctagaattttcattcattttttaatcatttatattttctaatgagattttaatttgtttttcatatttaaggaaaattcaaaattactttttgaagcatctttatgatacatattgtcagataatttcaacattcagttcattttgacattaccattttttattgcctttttcaactggtaatattctggctcttgttgtgaaggattattttcagttgtatcctaggcattttggaaactgtaatatgtgactctggattccttttcctagcaggcaagccctctgttgaggaatcatatgagagccacctagatgtatatgttttgattccctgtgggcctgatgacaccaccctggctaggcaaaggtagagaactgacttacactgcttttgtgcagatgagtgggaccagatcgcccaccagcctcactgacacattcatggcaaatgaggcactgactcatgctgtctcattgtctctaagtgagtgggggagtagagtctgctccccattgggccctgatgacgctggggacaggtagtgaagtaccagctggctcactttgaaagtattctttagtctcatcgaagccagatgggaatggatgcttggcatccctctgtgccctgctgccactggggtgggggcagtggtggaaccagggtactgagtagccgtattctgcacttctgggttcagtctcattgctgtcaggtagatatggaggctcagctctttgttggtccctcatgacatgagaagtagagtggcggctagccctgtctcactctgctttgtgaagtctcattgctaccaggtggggatggagtctcaacttgcctcaggaccccagtgagaaaaccactgtgccccttgtctctgtcaggtggggagtggaagattcactacccaatgggccctgctgaaacctgagatggtggggacagttttgctggtggtgtttgcctagagtaaggcagatattgctaaaaagtagttcttttgttagaccactcttttccgggtccttgggttttttatttttgggagcctttcttatttgtacttgttgagtttcaatttggagactttggcaatgccttgttcaggatatatgtgaggtgataaggaagccagaatatttactgttgtattgttgaagtcttatagtctcagggcaccatcatcttgtttgcaccccagaatcttcctatttctgtttgttgtgttatgtccagcagttttttattgtaaaaatgaggacttggcagaactggggctgctccatctaggaggactatctctgacatattagccacaacctcaaaggcaaagaataatagaatagcacctatggaatatggaaagaaaaggctatactccccacattctgtacctagtgaagatgtttccataaagtacacaggccacagagatatgctcatatagaatgtggctcaaaaatatactgtagacatattgtccattagaaagaatgccaggaggtagttatttgagatattaactgaaaggaagatcatgaaaatattgaatgcacacaatgaagaaaagaacttgggtgagcaccggttgtagtgaaggacatagattatgcaaatgtttgcatgcatgtggtgaaaaattaatggaagatcaagaattacccattaaactgaagatatgtaatataaaacttaataataatgcatacatgtagagaaaattctcaacagaattaagatccaaatgcaaacagtgattacttctgattggttttggataggattataagttattttaattttattctttaccctatttaaaaatgtaaaacccttctacaattggcatctattactcatagagtaataattaatattgagaaaaatacattttttcaggatagattgatgaggaagagagagagaaagtcatcaaaacgccttgtagtcagaagaacgcatatatttcttttaatagtttgttagattgaattaactttttactcttacatatttcactgatatctcataatgaattaattaaaacaacgtaaactttccacatatattgatgataagacaagtttttccttttggtagatgcttacagacatctgggcattaatacttctaaagatatacattttataggagtaatgaacccgaaagtgagtacttgaattggagacatcttaagtatcttgctatcataatggatattggacaaaagcacagatgtgcatttttaccaatgacaaataaacagagtctggaaaccataacagatgtagccataatgagaacactaaatgagaaaactaattttgtacattcatacattgctgtgggccaattcctggaaagaaaagccggaatataaatgataataacaatcaaacaaagaaaaattattcaaatgtactcaacatgtacattttgaaacgtcatttctgaaaacttgtgaagtaatgtcgtaaagacttcagtgagattcttctactcaattctggtgttgaaactatgccccttttacttaggagccttggaccttttaccaacatcattgtctcaagattctatcacaatacaattgttacctacctagagtactgagtgctcaacatacaatgaaatctacaacccaattacagagattgtccattgcaataatgtgttttttacagcaagggtatcaaagactacaaatgattttcctagtctcataggaaattgatcagactggtatccagaaaatcagggttgtagttctcactctggtaccaattatgcttgacctcagataagttagtagagtaagcttatgcctcagtttccttacctgcacccactcaccaaccttggctacacttcctctacagtaggctccatcacgtctcgtaggattcctctttatgagacagggcatagctatcctctctttctttggatccatgaagagagttctgctttctaacgttttacaattttaaagaacaaggggtatcatgggaaggtgcagggtagtgtgagggtgagcccatgccgttgcaattgctcctacctgctgctttttgctcagggatctaggacaaccaaggaccttaggtaggagagtaagcttccacctgtgtcttgtttgttctttctttattcattactcttatttttgagaaaatatccattatttatttaagtaactccaagtccatcttcctttttgaaaaataagagtaaaatctttttagcaccaatttaaagatatatttgcttgatttttaatgtatgtttaattctatgcagctgctttcaacgaatgactatgattctaaaaacatctaatgtagtgattgataagctaaattgcaagataaaaatgaaaagttcacccagtgttcctaaaccaaaacattgcatgggtttcaccctgcacctctctgccacccctccagtcttcccactgaagctccagggcagccctgtaggactgtactttccttgcactccagccctgtgctggggtatcctgtgcatctggaatctacctttccttagaaagctccccgacttcctcccaccctgctgcacccaacctcttaggtgaccttacacaggacatagtcctgtgagtgggctatagtaccctcaccatggtgtgtccctcccatcagactgctgcggcataatgggcagagaaaagatgcgtgttgaatgaattctccgttctgtgaaggaagaggaatcaaatctctatttgacccttggtgaaactcaattactgtccagtgccccggttttcaccaccaaaatcataacaaagtcagaacattctttaacccttggcctgacaggggcaggctgttgtcttataaaagctggtggtcaatgtccagtggagggaggtggggagtgaactcaagactgacagcaggtccagggttttctctacttacttgatgacattattttcctaaacactgtggtctaagccctctcattctctgtgtattagctttgaaagataattttttaatttcagagtaaaaacatgggaatgttaagccccaaaatgcttaggaattgtccaagagctctgagcactaagcagaaaggccccattccaaggccatgaggattccctagagcgccccatgagaggaactgtagatcagtgtgttctttaatagagtctttaaatatttactctatgacaatcatgtaaattataggactctaaagcctgtgccaaatgaaaatctgtggcccctctgaattatttatgagtaagggacctaggaagagagaggcagccactgtagtttgtgggggttcaggtatttgcaccagtggttttttacttctaagacctaagtagagacagagctcatggaagattacagctatgtgcaaaaaatcggaaaaggcaggatggctgccatcagtgggctgtctcctgaagttcattacgtgaaatttatcagctgctctcttctgctgtcatagttgaggttttcatttctatgttatgctgtcattgggatccattgcggctcattgtagaggcaggattttcagtgctctgtatgttagtaggtgatttgatgagagagacacatacctgtgactccagacatgtgggttctgcctgtgtcaggagcaggttctaaactccaggaaaagtcacaacattcctctgattctgtttctgcttctggaacacaagggcctgtccaagctagaccacttcatgggatttcattttcctaaaagaatctataattctaaaatgctgaaagctgacttacaaagaactgtgcatagcatactagcttccttaacacaatttcaccatcagattactgaatgagaaaatgtattatgaaaacttccaggagagggtctggcacgttggggaattactaactacaggagcagtcaatcatttcaccagcgagatgggagaccagatgtactctcgcctcctagatgaaaaccctaaaagaatgacacaaatccaggaaatgtgctaaaatgaagggcaataaattcataacagaagaactaggatacagaaagcaaatatgagaacactgtttttaatctttcagcagtgactgtcatggtttaaggtaagaaaaggtatttatgcgacttgatcaaataaagatccaaccttggtagtttaatattttattattgagctccccacagaaacagcagtgttcttttggcagcttttcactgaagaatgaatagaacagaggccttcaacttccagccctgtatccttcccactgtatggctatagtcttaggaaaaccagacacgtgtgctgaagaagggtgtatgatatgctggcagggaaatagttgtggtgtctgcagactaaggcctgaatctcagctgtgtcatagctgtcagtctataggaacatttcctaaatatctgtgcttcagatactgcttctgtaaacaggcataataattctgatgtgacatagttgctctatcagaatttatacaaatagtctaatgtcctaaatagcatacagcacatggctacaggctaatttttgtgtatttctggctaccaactctttctctctgctcacaagtttgaaaggacttagagtttgagattttcctctcctcctttttgcccatcttcatactcctgaaaatttaattaatcctttttttgtgaggataactaagatctaatttctcagcaaatgtttagtatgcaaaacattattaactgtagttgccatgctatacattaggtctccagaacttatttacatatttacttatgtatgtatttatttattgagagagatgaggtctcactctgttgcccaggctggaatgcagtggcgcaatcatggttcactgcagcctcagactcctgggctcaagcagtcctcccacctcagcctttcaagtagctgccactacagttgcatgccaccatgccctgataattaaaacaatttgtttggtagaaatggggtctctccatgttgtccaggctggcctcaaactcttgggcttaagcaatcttccttccttggcctcccaaagggctgagattacaggtgtgagctaccatgcccaggctttatttatcttatgtctggaattttgtatcctttgactaacatctccccattgcctctttcccctggcctgaggtgacagccttctactctctctttctgtgaatttgacttttaaaagttccacacataaatgagattttgcagtgtttgtctttctttgcctgacttatttctcttaacataatgtctttcatgttcattcatgttgtctccaagacaggatttccttctcttttgaagctgagtaatgttccattatgtgcatgaatatctatcttatattttctgtatccactcatttatcaacagacacaggttattttcatatcttggctattgtgaataatgctgcaatgcacatgggcctgcagatatctcttcaagataatattttattttactttattttttgacatacatctagaaatgggtttgctggagcatatggtagatctatttttaattttctgaggcacccctatagtgttttccataagggctgtactaatttacattcccaccagcaggataaaaattgtgataatcattttgtaatgtatacatatatcaaaacattacatagtacaccttaaatgtttgcaattattatttgtcagttatacctgaataaagctggaaacaaaacaaacaaaatgaaagcaataataattgaaaaccaaggaaattaaattcagcgttggacagacatgaggcaggagtggggtgtcagcagggttggacaggaagcataagcaaatgacaacatatgcctgcagccatagagtttggggaaatgatagcaatccagcttttcaaatgggagcagtgggagaatacaaagattgggtttcactttaaaggagatctgtgtctaggtaaagaatatgggctctatatttttctatttctttctggaagttctctaggctttctgggtgagggattcatgagtgtgcggagaggtgagctgagcagggatgcacatgtttgtgagtgaggcctggcactgcgaggatggagttcacgtgaaagtaacaggactcggtaacttcttggatgtgtggggtgaagaagagcagggagatggggagggcttagtgttttttgagcctgggtgactgggaagatgatggggatatttgccccagggtgtgtgtgtgtatatttaggttaaacaatttcagtattctactgtgttcctcaaataatataattccaagacatgtactcagctaaccacatttctctggatcctcttaatccagagtgttctcattcttacgtagagtctagaagagcacacaacattgcaaatatactccacagcaccagtggtccacgggccatactttggcaggatctgatactttataaacactgtctaatgtcgcttggctttttctgacctcctgataaggttggttgacattgggctgcacatcaagtgagaagctccctgtgagtcaacactttagctaggaaggacaggactggcaggccccatgaggtgtaggctagaaataaagcttggtgaaagaaagacacataggagaaagactggtgggtgttattggtccagacaggtgagggatcaagaccacacaattcagttcatgatgaatgtggtaagtccaggatccaggaagcgatgcagcaggtgtcaggcacacacactgcgagcctggaccagaatatctggacagtattaatttataatcaaaatttattctggaaaactgtacagtggatttgctgaaccaacagctcctactgttgttgcttttatgagccggaacttgccttagtacgtggctgagttcccaatagaaggaaaaaaaaggctggcatagctggggagaagagcaggtggcaaagggacagaagtccagatgcctggtcgcaaagctgttggaagtttggagcactgtagcctgttccaactctgtaccttttttgtaggcttacttataccccatgatgtttcagtaaggatttaatgtgctctcataaagcagtgccgataagataataccgataagatgaattaaaatacaggtgatagtataaattaaaatacagatgatagggtaaattaaaggcgagccaaaagaaaaataagcaaaatctaggactggcaacatgaaatggagcaaggatttgtgcctttggtaatggcctccacatacaagccacacatttgactccaatcactgacacaaccaattaggcaaaggaaatctgattactctcacagtccacaatgtccaagataaaacacgaaccaactttatttatggagttcttcttaacacaatattgactagaatttctggggaagcactgtcccactctgtgatattataaacagctcttataataaaatgcttttaattgataagctgatggcagtttcttcattttggccgctggcatcacacacatgcgcaagcccaagaaagcaaacaaagcaaaacaaaacaaacaactccaaaaccaaaattggttcagtgaaacagtcgttatctatctatctagatgtggcttgatctagaggtgaatattgatctgattcatatcagatagtcttctttgcatattgttacttagcctgagtatgtttcctctctgcaaacataggctatgggatacttatgaggattacacaataaaacatgagaacctatgaacatagggcctgtcatgtaaagcatgaacaattcatgctggttatgtttgacaacaacagcaatgacagaaatcccagcacatatttgctgaatttcacaatggaatttgccatttttttctgctaattgaccagggcctgggcaaagcaagcaggatacattgtgatggcacagggaatctgcgtagcctgtagatgagctgcgattcaccatgcaggagcaggctgaaggctcacttttcaatttgtctttcacaggaataacactctacagccacccatatggaggggccttgctgaacgaggacaagatgtgagttgatggaatgctgaggggtgtgtgaccctgactatggaagaaaatctttgtgttacttagggatgactttggtctctcttttgcatttgccccaagagatggcttatagagttagcaggaaatgcccacaggacttgggcatttctttgcaaagtgtgagaaaaacgactattaagagagtcagtacattgactgagcttaaaacagatgagtttgtcatgcaactgtacttctaagcagaaattcttctaagggaatgatttaccagaaacttatgggactgtacatcttctgaagagttttcggggttaaaatcataaacattgcattcatgtacataaacatagtaacgcctccttgaatatttctcatgcaagattttcctcctgatccagatggagacatgggtggggataaggccagagctcttcaggtacagaattctgtgtcagttctcactgtctttgtaaagggtagcatgcttccacctgtcttctctttttctcccccatctcccttctctattatatggtcgacaaacttttaattaaaagtcgataataaaagtgggtatttttgaaaaactttttatgacctaccaaattaagtcgcagaatgcaaatctgcttaatgggcattctctgctcaagttgttaatctggcaggaaccggcaggaagcaccggttgggttgcagcttgtcctcacgttcacttaatgattttcagggttctagctttaacagtgtctgacacctgccagaattccaagagtaggctagctgacatctgttgtagaatgcgacacgatggagcagaaggcatggcacagcagatgacttgtgctgaggagttccatcgtgtcggcctcctgaaagaccatctgtggtctgactgttcctaaaggagttgagaggaggcagcaattgacttgagtaaaagtagtagtgttccaggtaaaacaattactaagaaaatgtacagtgtataatattacagagcacctcaatctattgcaaaatcttgttggtatttcatgtgactaaattcagagatgggccagtgcagtgtggagctgtagtgaaggctcctctctggcaggtgctactgtattgcaaagcagtccctgtgtgggcaaaggtcacagcttacccggatgctgctcagaggatatctttcatcttaattgggagtcaggctcaatggtgaagagcagattttgacacaagaagactccgaaatgccctcaaactgtgctcctcagttttgtcttctgtaaactgagcttagtcatccatgtctcaaaaggtggctgaggggatttaatgagggaatccatgcccttagccaacatgcctggctgattatgaatttttaattagcagttttcactgctgtcatcattgctgattgttattagcaaagaaggcttgtgttcttcgtcaggtgcctgagagctgctctgttccacccgcagcctggagagcatccgtcagtgtggagtggccctctgcatcgtgctgggattctccatcctgtctgcatccatcggcagctctgtggtgagggacagggtgattggagccaaaaggttgcagcacataagtggccttggctacaggatgtactggttcacaaacttcctatatgacatggtaggatttgggaatgagattctgtgtgcctccacaatagtgatctaaatagtgcgtgtatggagggatggaggggggcattggggccctggctgccttggagtgtccacaaaaaggggtcatcttattgataagagcatttcagattaagtcacctttactgatcaccatagaattggttcataaggggaagactgataagcttcaggctggagaactgggaaattatagaactttacaaagatgcaaagtttcttattgagaagatgagaaaattattacctttactatgctcttttcaatggggtagcagatgaggtgataaaaatcattagaaatgatctttcatctgcatgcttaacaccccctcctgtgagacctgtgcctcattgcctaataggtatggcgggtattattagcatttttggaatgcactcagtttcccaatggaaaccctccagatcagtgtctgccatcctgggggacaataacagatgctttgtctaggtgttccctattcttcaggacatttatcttaagtaaaaaaaagcatcttatatgataagttgttcttagtggtcaatatctactgtcattgttctctggtggagctgtctttattttgtaggaaagtgatatccttgccctcatacatatgattcatcttgtgatacagaaaatcatacataagtcagtggaaggccggaggtcaaccatttactgagcaccttccatgcactaggtgctgtctgagctgtgctacaccaggcacaaatttccgcatattaacatgttgctttcctgtaaggtttatttctttgagctggcttagaatttagctaatttattttcttttgatcatgtaacttggatttttgttttgttttgaaagtacaatttatcggggtcacacctaagttacctaacatttcaggagttcatttaatttaatcagaggtttccctgaacctgcctggtgatagatatcacctgggacatttggtaacaataaggattcccaagggcctatccttcgagattctattcagtaggactggggggacttggaggtctgtgttttactaggtactcaaggtgatttatgaatcttaaccaagattgacaaattctgggtctttaaacccttatctttactgagggacacttgaaggcaggcaagtggaagtgacttgtccaagattttacatctagttggtacagagatggcttctcagtgccagcctctgtctcctggtccagttttgttccctgtgctacacactgctgctggctacttgtctctctgccgtctgtcatttaacagtgtctaagggccacaactttcccagataaaagggaagaagtgtgtggcaagagagaatcacaacacacagggggccacgtttctaggacaccatggggctttcaaagtctccaaaaccccaggatcttccttcttttcagcacccttagtttattatctctttatgcctcccactcagtctgactcttctttactctgtgatgtttgatcttggtgattaaggacaggaagggtttcttgcttcttgcttggatggttttccatcttcatccaatcattctctgcttattctattcaatcactaatttaataaatatttttgaggatctgttgtgggtcaaggtgggtccaaggttgctatagactaaatgattatgtccccccaaaattcatgttgacacctaatccccagtgtgatggtatttggatgtgggatcttggagagataattaggttctgagaatggagccctcctgaatgggattaatggccttgtaaaagaggccgcagagagctctatgtgaggacacagtgagaagtcacagcctgaacgaggaagctggccctcgccagtcaccgaatctgccagcaccttgattctggtctttccagcctccagaactgtgagcaataaagttgtgtggtttataagatacttggtctgtgttattctgtcatagccccccaaatggtgttgggcataaagccatgcataaagcagagaagattgctccctcaaagagattcttatgagaggaagcagaaaaactagtaaacaaacaaataaataaatgcgcaggatacagttggccatgactgggtctgttgaaagaatgaaagagattgatgggatggaggatgacttcaaatgtgaaggtcaaagaagacagtgaaactttacctgagatctgtgaggtaagaaggggccctgcccatggatgacgtgcaggaagaggtctgcagcttgaggctctaagagaagaaggaaccaggcgtgtgagagcctgaaggaaagccatggctattgttggcctgcagggagcaccttaaggtgaggctggatagggaggtagtgtgaggagcctgtccttggttctacgtgtgtgggaggaggctgtgtttcatgaaagctgattggattccttgaccctcctcaaaggagatggatatgcatgacagtagtagtcacctcaggccaccataacaaaataccacaggctgggtagcttcaccccggaaacttgattctctcattgtcctggaggctggaagtctgagatcaaggtgttggcagggttgattccttctgaggcttctctccttggcttgtggacagccatcctctccctgtgtcctcacatgtcagccctctgagagtgactgcatcctgatctcctctagagacaccagtcatgttggatgagggctcacccaattgacttcattttaccttaatcacttgttcaaagtcctgtcttcaaatacagtcacatcttgaaatactgggggttcaatgtataaattgtgggggggtacaactcagattaaaacaagcgactttccaggactaattccacggctacagaactcctaatgtgcaaaataggaaatatatttgtgaagttgaaaggaaacttcaggataagtagatgataataaatatgaccatctgatgtaacagctctcccttatttctttttatcttctcagctcttttacttggtttccgtctgcctgtgtgttgccgttattgtcgccttccagttaacagcttttactttccgcaagaacttggcagccacggccctcctgctgtcacttttcgggtatgtgatgagaaacgctgctgcagaattacggtttgttttctgaaagagaaaaccctcaggatggctttgaacctgctgtcgacttcatgatttcctctcttttgaagcaattatgttgcttctgcaagggacacggagcaaacaagcctgagcaggatgatgaatgccccgtggaggaaggaagggctgacctggtcgtgatgaagacagcactgccctgtctcagacaggcccttgagctgtttgacaaacttgtgcagctggaaatggattctctattattctcactttgacattaatcaggggctcaaatacataatccaattaactcggagattgcatttgtggaggttctctcagcaagctctctggcattttttctcctctcctctaatattagtagtttgaaaatgttttgtctaatttctatcacttttttttcagatgaaaaaatagcaaatggagaaaagtcattttatgaatttctgatttatgcatgctagtcaggatcattgctagtggcctcaaaattatatctatccggtatcaggatatatatgtcttcttatttgtcatgcacgtatgcttatatacaggctaactacataagagatgcttagtagggaaaatcattatcatactaatttattatacttcaaggctattttaaaagataaaacagcttgctcttatttaagaggattacaaatgaagtgatttttacagtttgtatttatataagtgccctagaattattcaaaacatctaattagagacagagttttacttaaacaaatatataccattactagatgattgtataggtgggtgggtggatggatggaagtatgtagataagagaaagaaagatagacagggagagagagattaacagagagagggaaagagacactaagagagagagggagagagagattaagagagagagagaaacaagacagacagacaaacttttgggggaacattgatattactactcactaaccccaatgctgtagctttggtaatactaattattctgtctaatcctcagttttttctttgtaaaacttcatgtcttttgctataaagattaaatagtttatatgaatatcatggacaatgactggtacaaaattcccattaaattaattttagccattattgttactctttagaattattttactctttagaagatgtaatatcctgagctataaaacatgcttatagtagacatatatttattatatttagctagaaatttatggacttgtgtataaagatctatgtgtgtgtacccagctctaagaacacagtttgatttcagtttattgatccaattgaatggatagtgttgtcatgtctccctctatttcaagtaaaatagactttgctataaaattatttttgaattttaggagagtatatctcaaaaactgagttaaaacttagatgaaatggttagaaagccttgaaaacacgcttttagaaatttttattagttgttttgattgtgaaaccctttaagaatttgaattaaactaagaattctcttcatacataactaccacatttttcaaagaatttctggagattcacaggtctgttgaagcacaatcataggcaataggggttacacgcttctggttaagaactcttaggttgcagagactggaaagatgtcagagataactcagaccgtgtttgtaatcatggctaatcccagggaagaagagcccccaaggaaagtttatcagggtcactgggtgacatccatgggaatgcagatttagaaggtagctctttcttcattggagcacagccagtggaactggtgacaacctcccccgccactgtaacaggaggggcagtgagagacccggtctggggaactgctgtctcctgtgtgcctggcaatctctgggtgaggatagcagaattggctcatgcctgctgtccttctaaggacctatgggtacacggagcccaagggcaaactcaggaaagctgaatcccgagctgaaacctaagagcacgtccaggcattaaatggctgcttaaaggcaggaatctgaaggaataagggatagtatacacgaattgattcttttaagagataacaagataaacatgcctaatcgcagtcttattgtttttcttctttctatcaaggacaatttgttatttaaactataaaagggagagtcagggagaattagcatccaaaagagggaagtaacacctaaaatgaatgaaagaaaacagagcctaacttacataaagatggaaaccttaagaacatatttgatgtatatttaccgctaaaagatgagattgcagaatcctgcttggtgtcttgggaaatccacaaagcatggggaagcggccgattttcaaaaggggaattttcttccgccataaattccatgatgttgtgaacagtaggccagtctctagcaaattttaaaatcattaaaatgatattatattttaataaaagcctggagattgttgaaattcattgtaattttcacaaaaaaataaatataagccaatttcatttttttcttataaaataggagacgggagctgctaatacgttaatttgagccaagtattttaaagataactaatgaaaatgtagtaaaaaaagtgatggaatcatagcccgttgaaaaccacactggaatactcttcattcatctagcaataggaactctcatgtggcttcatttaggacaatgtctctgattctttgtttttcttaaataatgctttgatccacttgtcaaatatttaaatgacataacccaacatggaaaccttatgtaataagtaactagatacagatcctgaaccatctcaaaggaagtagagcctaatgttgaggtggtaattagtcactcaagtgcagatcaggtatgcagactccacagcaagaccgggaggctgctgtacccttagattgtattgctggatgtggagatgctgatcaaagcagatgataatcttgctgtgtgttgtgccaggccaaccacatcatgttctctgtgaggtagctttacctaaactcccctaagtcccacaatgcaaaatttaacagagagagctggttgaatatcgtgttgttaaaggagcagagaaagacccagtcttttgtagtggaggtttaagcagaataacatggctatcctcagctatttaaaggactgtcacatggaaaagaaaagcaatttgtcacgtgctgttccagaatatagagtttgaatcagtagctataagttggagagagttttcattcactcttagaatgaattttatagcaattacagctgccccaaaatttggctcacaaacttctactactgcttatatttctgttgcaaaaatacttgcaattctgtgatttcatttgattctcaaaacagttgcgtgaaggagtgtagcacttgatttttgtctcagaaggcacagtaaaggaaagagggtaggtgtgtggtgtgggtgaatatgtgttggggtttgaattctctctgtggtagtttatttcagacagagatgttgataatgtacagccctaagaagtcatgacttatctctctggtaattattttgatttaattagttgattgtcttatgtagcaactgttttagaacagctcttgcctccattgtgtgctttgaaataattaatgcccacattttgaggcagattgctattgagtagagtgtctaaaacactatatgattttatatatcatattatatatatcttatgaactatgagaatgtatcttttaacccaggaaagcattccaacatcatggatgtcatatgaaagggggtgcatactagactaagagttaacttgagggcctggcatctcttatatcattttgaagtctcatacttttcagaacttgttaacatattaggaaaacctcagacattttgcaggcactgaagtgtttcaggttaatccaattattcaccataagaaaacagtgatacatttaccttgagtgagcagagaacttgttggagctccggatatatgagaatcttttgggaaagttgtgattcaaaatcagtgacttctctgctgatattaggaaccatcgttcaaagtgtacttcctttattgggtgcagtggtattatttcaggaaggagatgagggaagttgccatgagtgaaacctggctctagaattgaggagacggaatgaagaaaatgagatgttttccttttagggacatttgggtggtatcttagatcctgatgtcatctgacacatgtggggactgcttctagggttcaatgtttagcaatgcttcttactccccagctttggggccacatggaaatgaatcccatgttcatctacttatcacctgcaaagctcgatcaagtgtctgaactctgcaaatccccattgttctgcctgtaagatgacagttacagtgctgtctcctggcttgctggggactaaaggaagattagggcacactgaggagttacagatggtaccccctgtgcagtggatgctggaaggaggctttcagtttttatttttaggccttattttttttacgtagctctgcagctttttatattcttgatatcttttgattctcaatataatgaataagtattattcctgccttcctgatgagaagcagagcagagaagctccttttggagaagagaggttggagaagtcagccgactttctccaggccacagagccgacaagttcaggcccacgtacaacccgtgtgtgtgttgtgaccccatccggtgttctttattgcattgcagagtcctctgaagccccaggaagagtgtgttgtctttgaaaaataccgtggaatgtattatgtaaagttcatttctgttcaccaagtgaggaaaaattgctgggccaataaaattgcatctataattcagtcttacggctgtccccttatctgcatttttgctttcagagaattcggttacccacagtcaactgtggtctcaagatattaaatggaaaattccagaaataaacaattcatcagttttaaagggcacagtgttctgagtagcaggatgaaatcttgtactgtcttgctctatcccatcagagacgtgaatttcccctttgtcctgcatatcctcactttggacctgggagtcagtgagttaccaaattgactgtcgcagcatggcagtgcttgtgttcaagggacctttgttttactagatggccccaaagtgctagagtaggcacgctggcatattgctgtaattgttctattttatactactcattgttcttaatctctcactgtgcctaatttataaatcaaaccttatcataggttgtatgtatggggaaaaacatagtatatgtaggattcagtaatatctgcattttcagggattcaccccaaggtcttagaatgtatctgccatagataaaactactgtaaatgttacagtaaaacaaacattacttttcactttacttttcagatatgcaactcttccatggatgtacctgatgtccagaatcttttccagttcggacgtggctttcatttcctatgtctcactaaacttcatctttggcctttgtaccatgctcataaccattatgccccggttgctagccatcatctccaaagctaaggtcagtagctttgtagcatcacctctacacttctgcacctctagtgcaaagacggtgttaactcatgcctcttttgttgcttttctgactggaattcaatggaaatgcattggtatccactgtctttaaactccagagagataaatggattctaattaacaaaaaacacattgccgttataaaagccatgcctaggcttagcaacaattgacgaaaaaatgttctgtttcggccactccattcttgagggtagagccatgaagatgttcactgccgcatccctagcattttcatcagagactatttattgatgaattactgatgaatggtggaagagtgagtcattgaaacatgccctctcaatgttcaccatcgtttgggtcagacactacaagatagaatgggccacacaacacagctgaccatgctctcggggcacagcatgtctgaatgatgatctggcgggattctaccctcttctctgggatttctggaacaaatttaattttgctgttttccaagcatggcagccaagggctttcctgagcctgaggcccgtggtcaggaagaacttctccttgtgaggtcaacgccactctccaataggccgttctgattagcaagtcatttcttaaatgtcatctccagctggtgtctaggtcaaggtgaacccattagtcctgccacattcctttcactcctgtctcctcccttagtgaggcctgcctgggtgtttgcctctgctttaatacatctttcagcccctcagcatccccagtgctacctggagatacagacttcagattttgcactttcctctgcacccttattgcaatccttttcattctgttttcttttctcagctctgaccacactattctctcctgattccctgctgcttatatggagtctgattcctcagtagttcccaaatgtttggccagctcaggggctgagaaatgacctggaaaaggtactgagctcctagttttgaagcatgtgctgcagttctcatttcaaatcaaacagggactgatgcctatttaattgggatgagtctacttcctcatggctggactttcagagacttagtaaatttgccactgatagctaacattagtttttattactgtgcttcatatttggatagaagcagtgaactctgtaaacatctattatgcattcagtgatggtaataatctattttggtgatttttacagatttattattgacactgatttatattaatatgtctacactttaaagagaaaacttgcagaaccattgattggctttagcttgaggagaaaattgaaatcagtagagatagtgtacaatttccctcctccctcatcggatctctagcatgacatgaaccatcaggatgtcagtcatgaatcatggtgaaactgaaaagagactcacagtagataatcctattggtgaggaacttgaaagcagagagcttccctggggagtggagtcacagaagtgagatttagctccaaaagaaaaacgaagaagaattgtccatatccaaagaggaagctgaccaggaacctttccactcatgaggttttaccagtgtggcaagtggaaagccttgttacctttaattataaacagcattgcttacttgttaaaaaaaaaatcaacaggcaatgaagtgtttgccagaaaatggatctaaatcaattggtaacaagtaattaaaagcagcttattgcttttgtttgggtctttcttttcctttgctctttattttgatattatttgcttaggaagcaaccttattcaaatgtttatttcaaataatttcaaattttcatttgtaggttatggagctttgtagcattaattcttatagaattaatgaaagaaaccaaaaaaggtgactggattctcagatcactctttttcttaaaaaataaaaatattttaagttctggggtacatgtgcaggatatgcaggtttgttccatagataaatgtgtgccatggtggtttgctgcacctctcaacccatcacctaggtattaagcccagcatgcattagctatttttcgtaatgctctccctcccccaccccatcccccaacaggccccagtgtgtgttgttcctgtccttgtgttcatgcgttctcattgctcagctcccacttataagtgggaatatgcagtgtttggttttctgttcctacattagttttctgaggataatggctttcttgctccatccatgtccctgcaaaggacatgatctccttcctttttatggctgcattgtattctatggtgtatccatctatccagtctatcattgatgggcatttgggttgattccacgtctttgctattgtgaatagtgctgcagtgaacatatgtgtgcacatatctttggaatagaatgatttatattcctttgggtttatacccagtaatgagattgctgggtcaaatcgtatttctggttctagatctttgaggaattgccacaccatcttccacagtggtgaacaataagtctgaatatctagtgtaaccagtattaaccattgtgtttacaaattatagtgttaattaatcattttcattgttaccaaatcacagtttatatgatgacacattttgatttcaaacacaagatctggaacatctgtctttcccactggtgaggctccctgttggagcgagggggatgtgggggagcaaaaactcatgttttctaatttatttctttgtataattatcattttcacataatcctaaatcgaacacttatggattgttattctgtgagtttgtgcacctgcatcccccttctatgtatggattatttgttaactcagtgttcatatattgctaacacctttgttcatacttgtgtagagatcattgtgatttccttaaaagtagatgtaaaaatcatcactgttctcaagcaagaaaaccttgaaaggcaaataccagtagatctaattaatatctctaaacaaaatacctttgttttgatggctgtctgagaatatcagtgaatagttgggatagggaagacctggaacacagagctaaccaaggagaaaaagaagttattggtatatattatgaaaaggggaatagcttttaattggattttttttctttttttcactgtgcagaatttacagaatatctatgatgtcctcaagtgggtctttactatttttcctcaattctgtcttggtcaaggactggtagaactctgctataatcagatcaaatatgacctgacccacaacttcggcattgattcctatgtgagtccctttgagatgaactttctgggctggatcttcgtgcaactggcctcgcagggcacagtacttctcctcttgagggttctgctacactgggaccttctgcgatggccaaggtgggttctgaaggactcatcctcgagctgcacttactcctgcaaaatgagaggaagagaaaaattcatcctggaggttgtaaaataaaaattatatctgatcagcattatacatagttctaatgcgttaagattttattattttttaaacattgattggtgtcagtcacccacaccaggaaggaaaatttcaaaggataaggtgacaaactgtgagatgatctttccaattatttgtctcagcatattttctttttttaaaattttttttattgtactttaagttctatggtacatgtgcacaatgtgcaggtttgttacatatgtatacatgagccatgttggtgtgctgcacccattaactcatcgtttacattagatatatctctgaatgctatccctcccctctccaaccaccccacaacaggccccggtgtgtgatgttccccttcctgtgtccaagtgttctcattgttcaattccaacctatgagtgagaacatattttcactttgaaattgctgaatttctctgttactttgaagcagctaaggtaaatttggttaataccataacattatttttacaactaaatgccaagaactctgggagcaggaagataggaaaattcagtacagatgtctgtgtgtcctttgctggatcttgttgcttatgctgctgtactctgatctttgtcaggtgaggtcgaaagtcagtagcatggggcatgtgtagacatgtagatatataatgtggtttatacacatgcatgcacacacatgcattcctactactataaataggatttaatgtggccttgaaaggatatctgaaatattgtcagataaaacatttgaactgcataaggaagcaatgtgctttcctgtgtagggtccacaatggttggcttcccccccatacccaagtggcctgaattcattggcctgctctttccaagggctatgtatttccgtctgacctctacttgagggagggatcctttttggagaaattaccaattaagaccatgtcactagaaaatctattaaggattataaagacacatgattaataatttatggtgatctcttcatagaattatttttcctttcagccatttcctgacatattttgttacataaccccttttaataaagtaaaatagacaccgttttgagtataaatcccaatgtgcttttgaattggccacatcaccctggagtctgcagatttccaatagctgactgaacctggagtaaaatgcagagtgccctttaaacataatttgttctctgatgtcccttactagtttagtctattttataaaactgtaatgtaggatcccccttggcagatttcagggtactccattttcctatagtatcaaaagatttttctttaaagagaaaaatctgtattacctttactttctagagttgtaagtataagttgaattgtattttagaataatatccttgttacccacagtaaagagtcaatttttttctctacatgaaggttacagagcatagaaatttaagtgaatttagacactagttgcctactaccattttatggataactgtcataatgactgcatgacccagtcaatttacttttaagacccagatctaactaagccactaatcattgtttgaaaggtaaagcccaaggttcttagcaagcccccctgaagtgtggtgccttctgctcagtgaaggtgtctgtgatcctcctcccatcccacagggatatttgttgccctgcctctggggctgggctgatgccttctccgtgtttctgttacgccctctttctctattagggcacatctatgttggtttatggtatcgatatgctactcataattgaatcttgcaagaaaatagggagaccctgccctgtgcaactgggaatggatagatcctgccttcccagcctgagcagggcccctgtcacctgcacccactgctggacatgagtgctgagatcccacttccttgctgtccttccctaacctgcgctgactcctgtccagctgtcccactgtcctgctgctggccttgggttgtttgccatgaattcaggtttccattaggacctgagccctagttcctgcctattttgtctcctgcctagagctgcacttttgctgtctgtaccctaggtgctggctgggttggaacagccacactgttcagatatgagatatgctgcatatctggaaagttctgctatacctaggtcccatctgaattcttcctatttaatacagggatcgtttgttagtcattttcagttagaggataactaagtggcacatttctgggcatagttggattcctgtattaggacactggattgttgtgagtgggtggaccagaagtaagctcagtcaattgtctccaccaaccagaattacttgaagagatttaaatgaatgtgcacacctgggcccctccctagaactctgcaatgagaagctctggggatgagacccaggagctgttcataaagcttcccaggtaatcctcctgaggagagaatgagcaagctgatgtgggttactgtgaatactactctgccaggcaggagggaatacagtggcacaacttcctgttggagtgggaagacttccaaaagtccaggatagggtgaaaggtcaataaacacaccttcatctgggagagggaaataacattcaaacagaaaagtgtaaaattcaatgaattttcacaaattgaacacattgatgtagccccctctcactaataaactgaatactgccaacacttcagatggcctctcataaacttctccatcaatagctgcaccctaggtaactgcaatccttatttttatttttattgattcatttttcttgcctttgaacgttatataaatgaggtcatgtaagatagaattctgagtatctagctatatttttctcatcgtctatgttctctgtagaataaattatatattgtcaaatggtgattttatatgtggaaaaataataaagaaaagttgctggggatactgggagcttgccatggatattggattttatttttaataccttttttattttgaaatagtttaataatcagaagaagttgtaaaattattatcgaacattgctatgtaccttacacccagcttctcccaatgataatataataatatattacatggcaatttacactgtcaaagccaggtaattgatgttggttatgatactaactcagtcgttatcattaaaatataatcattaaatatattttaaatgattaaatataataattaaaatgttggcatattatagtttataggggaaattgaaatttattggaaagttaaatgtgtcagattgcaaattagaaagaagattaaaaagtgagcagctcagatttagagaaaataagagttgaaaattaaatttgcattcctctgatagatacttactgaatactttttgcaaagtattgtgcaaagtgctggttatataatccttttatgcgattcaacatatactataaacttacaatgtttcagtacttttatatacaatctacattattaaatgacttgtttagtaaaaagcacttaataagtaaatgccttataataattttgtgataagctattttaacatttagtacaattaatctggcatgatcttattcataaaattaaaaactagctctagtttagtgccaattcatttcagtatcttttaggaatgtatatatttcatttatgttagacaataaaaaatggattcttgcctgataatcaggatggcagaactggggtgctctggacaaagctgactgcccagaagtccgaaggtgatatcttcaattttttacaaatctctgacctttttgcctcttctagactattctggtatcatttgctaggtgtgaattcactctgatttcatcttcccaggggtcattctactctccaaggcacagtcaaatcttctaaggatacagatgttgaaaaagaggaaaagagagtgtttgaaggaaggaccaatggagacattcttgtgttatacaaccttagtaaacattatcgacgctttttccagaatattattgctgtgcaagatattagtttgggcataccaaaaggagaggtaatgaagcttctatttttaatcttcttctgttgtgaacctgtacaactctagtagctgatctgcttgtgttagtctcagaatatttgaaatcagagccaaaaatagccttcaaattttagaaattcctacaaaatcagtaggagcagaaccaaatagagggtctgttgactatttcatagtaaaaacttggctgattgataggatttattttgttttataatgttaaaaatttcatgtgattgcatagttttaattatgacttgggctatgggataactttttgttgagcaaatatttttttgaatctaattaaggaaccacttttatctcttactgggacatcagtactctaagtgtccaattaagcccatctggcaaaatgctactcagaaaaggtaaagaacactcatccacctagcaatagctcaggaatttttgttcacaggtaagacattaattctagttataatgtttaatcagaactgacagaagccatataaattgttcctgatttatgcttaatgtgtaaagggaaatcagttctggaagtgattgccttcaattaactgttaaaaataaaagagcaccttgcattcatacggttcccagctcctgagaaattcaaaataggttatattgttatctgattggtatctatattctacttgtgatctgacagtaggtgtctcagatatgtgtattctgaggtaaagagaagccgagagatcaatctgaagtaatgcaggcatattcttactctctgaactatgatttctggtagattagaacaaaatgttaagaaaggatttttttttttagtagttgttagcttctgctctaagactggctatgcaatcttacccatcttattgaactattttttgtacccttgctttaaaaatcatgattattatagttttgccggtacctctccatagtagtttgaggcaaaggggtgtgggagggccaagattcactgaaaatcaactgacaaaaggcagagtaacaggaaaaaggcatatgaatttatttgattatagttttacgtgatacgagagccttcagaatgaagacccaaagatacagggaaactgtctgtttttatgcttaggttcaaccaagtacggacagccatgtagaaatatggttggacaaaaagagtatgacccaattaatgctattaggctgagaggggaagcccagcaaggcctctctgtttagatgcgctttttttttttttttttttttttgagttattatctacatgtttatgatgttttatttttattgttaaaaattttattttaagttctgggatacatttgcagaatgtgcaggtttgttacatagttgtaaatgtgtgctgtggtggtttgctgcacctctcaacccatcacctaggtattaaatcccacatgcattagctatttatcctgatgctctccctcccaccatccctctgacaggccccagtgtgtgttgttcccctccctgtgcccacgtgttctcattgttcagctcctacttataagtgagaatgtgcagtgtttggttttctgtttcttccttgtgggtgtggggcaggaccctctctggaatgcaggtctgtcttatgacctacagtcaaacaaggtaggacagataacttctttaggggtaatttttgtactgaaaaatatgtaaaaggggagaagttagggtaatatttttggttttatggtggctttggggaaaagaggttctagtttctatgaccagcctcaggggagaaggaggggccggagacagcagggcaggaaaaggtcagagtaaaacttttgattctgaggctgcctttggggccttcactttggggtattattttctgagtcccaacagggctaagagataaacttgtaaaacattgacagaatgatgctccaggtatcttaaatggtccaagatgccatttaaagttagattttattatcttaagctcttataagcattacagtttaattacctagatggagagtgctatgcaaaagtctgtggaaaatacagaaatgactaagatacagtcctgtgttgtttaacaatggggatattgtctgagaaatgtgtcattaggtgatttcattatataatatactttcacaaacctacatggtatagcctacgacacacctaggctgtatggtaagcccattcctccttggctacaaatctatacagtatgtgctgaatactgtaagcaattgtaacacaattgcaagtatttgtgtatctaaacatagacaaggtacagttaaaatatggtattgtcatcttgtaagatgaccattgtatatgcagttcatcattgcctgaactatcattgactgtatatccttctccatctagaaattaataatcagttaggaaacaaaatatcataagcatgtactatgttacatgggagcataagcattgtcccaaggcagggactgtgatataataatgtaatattttttggaagtcacagcatcataataattgttatcctcccaatttcatttttgtatatattaaagtactttctaaaaagaactgaaaggtgcatgagtggtattgtcttcaatgctgtcagtccagagagggtggctgtgcaggcagggaaggaaaggtgggaggacagggtatgtggggagagctttattaaaaatgtggtttatagctaagcctaaaagcgttggtagaatttggataggctgatggtggtgtaccctggaacatggacagggtaggcctgggggagacggactcatattgcaaatggtgggagagatgcagggaaagcggggaaaacatggtaattgaagcagatggcaactcatggggttgtgaaattcagaggtccaaaatagggtgaggtgatggttaggtggggcttggtggcagaaaatccagaagcagtcactttccaagatttgaggagccaggaagccagtttgtatccatagatcgcagctcctagccatcagaaaacagctgtcttggaaggagattgacagaaccagagagacactgtcaccaaggtggactctcaggcacagtatatgctgaggcacatgatagagacaaagtgtagaaaagacagcaagaaggccatttttcacattggctgtaaggcgagatttgatcaagaactgagttgactctatgctcaatgtcagaatatagaacgagagtttctcttttaattaatatcaagattagcttagactctgagttaggagtgaatttgcaggaatttacaggctcttcaatggaaaaagaagatatataagaaagctgtgagcactacacacacacatacacatacacagacaaacacatatgtatatacagtagaagatggaatcttttaagaaaatactttaaaatacacaaaaatgaaattaggagaataataattataatgatgtgacttcctaagaatattatattatctctgcataatttgggggtagttggcatttacttctcatcctcttgagttttccacacatgaatttattgtctgtaaattactgctgaaattcttataccattcaagtgccatgatgattttgagaggactttgtaatctatacagtgttttatacactattgtcattttaaaactccataaataacacaaaccagcaaagtcaactcaaagttggctaaaagcaagtgctgtttctgatataattttgattttatttaacttgttctatttatttagcttgtttgattgaatgtgctttacttaactttgtttcctcttagtgctttggacttctaggggtgaatggagctgggaagagcacgactttcaaaatgctgaatggtgaagtttctctaacttcaggacatgctatcatcaggactcccatggggtaagatacagatttcatcatttttgttgcttaaagagataataagcccagagaacccccagcattttccctcagtcccgtggaataaaatttgaaaacatcattttcctccaaatttaccttccaattaccactcctctgatgtggggaaaagtttccaaatatgaataaactgagctcagtacttccagctggagtaaagggccttggaggtcttatcacagagcagccaaaggcagacgtccctgggaggtatcagagtggattggaagtgcccagctcctctctgcagatggaactcaggggagcaggaaatggccaaggggtggttcttctttattctcctctggataaaacttcaaatgttcccatcagcctaagtggccagatggtttccctctttttaccacccagacttcctctttcaggtggtcatgactccttcagggtgggagcagtgaacacattaaaaaccaagaaagcggcctctaggggagtaggcaagatgtttattccccttgctttaacatatgtgaggtccctgggcaccctgcacactcagaggctgcctgaggccagatgacccctgcaggctctgtgggtaacatacactcatgcattcctttatgtcactcttacctgggccctttcactcccatttcacagggcacctgattcttcacctccttctaaactgtgtgcttggttgggaacattcagggcatggtgccttcacgcccctttctgcacctgtgtggtagtgtgtcttcctttttcccctgctctgatcaggactaatgttaatgatgtttctctctactgcaagaagaaatcccctgctctaaacctctctgtgctcaatttgctctttgatttgtgtgctatcaagtttaccctaacagcaaactgggctcaatatcacaaactaaaatcttagacctttaatttcatagccagtttctggtgattctttctccacataccactcctgtgctgtgccttctaatatggatgtcctcgtatcccattcttttttcagcactgtgttacaaggccccaggcatctatctttcttttttcccactacagcaaactcatggtaacttgatgggtagtcaaattcatagctgtctttatgaatttaaacccagcacccaccagccaacaggttgagatgcgacctccagctttctgttcagtttctgatccgcagagatatttatttttaagagaggttatatgttcttgaccctagttttgtagcaatgaatatggcaaataaaaatcgattaaacattgttttgtggatgtagagaaagaactgtaaaggattgtgtctacaatttcccactggaattttaattgactttatgttgcatttataaattaatttggaaagaactaacatttgacaatctctttttttttacaatcacttgctaaaataaatataattcatttgtgaaagtattttaattaatccttgcagtctattagaagagaatgctcttatcagtaattaatgaaacagttttctacactttctctacagtaatgtctcctttttaaattttattttttatttcaataggtttttggggaacaggtggtgtttggttacatgaataagttctttagtggtgatttctgagattttggtgcacctcacccaagcagtgtacacagtacctaattgtgtagtcttttatccctcactcctctcccaacatttctccccaagtccccaaaattcattgtatcattcttgtaattcattgtatcattcttatgcctttgtgtcctaatagcttaacttacaattatagtgagaacataagaatgcttggtttttcattcctgagttacttcacttagaataatagtctccagttccatccaggtggctgccaatgccattatttatttagttcctttttgtggctgagaggtgtttcatggtgtatatatatgtatatatatacacatatacatatatagatgtatatatacacatatatacatatatattctttatccacttgttgattgatgggcatttgagctggtttcaaatttttgcaattgcaaattatgctgctataaacgtgtgcgcaaatatctttttcatataatgactttttttcctttgggtagatacctagtagtgagattgctggatcaaatggtagacctacttttagtactttaaggaatctccacactgttttctatagtggttgtactagtttacattcccaccaacagtgtaaaagtgttccctttttaccacatccatgccaacatctattattttgattttttgattatggccattcttgcaggagtgaagtggtaccacattgtgttttgatttgcatttccctgatcattagtgatgttgagcattttttcatatgcttgttagtcatttgtctatcttcttttgagaattgtctattcatgtccttagcccactttgtgatggtattttttgtttctttcctgctgatttgtttgagttctttgtagattctggatcttagtcttttgtcagatgtatagattgtgaagattttctcccactctgtgggctggctgttaaccctgctgattgcttatttggctgtgcagaagctttttagcttaattaagtcccatctgtttatctttgtttttgttgcatttgctttttggttcttggtcatgcagtctttgcctaagccaatgtttagaggggtttttccgatgttatcttctagaatcattatggtttcaggtcttagatttaagtctttgatccaccttgagttgatgtttgtataaggtgagagatgaggatccagtttcattcttcaacatgtggcttgctaattatccctgcaccatttgttgaatatggtgtcctttcccatctttatgtttttttgtttgctttgtcaaagatcagttggctgtgagtatttggctttatttctgggttattgattctgttccattcgtctatgtgcctatttttatacaagtaccattctgttttggtgactatggccttatagcatagtttgaagttaggtaatgtgatgcctccaggtttgttctttttgcttagcaattgctttggctatgtgggcttctttttggttccatatgaattttaggatttttttttctagttctgtgaagaatgatggtggtattttgatgggaattccactgaaattgtagattgcttttagcagtatggtcattttcacaatattgattctacccatccatgagcatgggatgtgtttccatttgtttgtatcatctatgatttctttcagcagtgttttttacttttccttgtagaggtctttcacctccttgtttaggtatattcctaattttttttttttttttttttttgcggctgttgtaaaagatgttgagctcttgatttgattctccgtttggttgcttttggtgtatagcagagctactgatttgtgtacattaattttgtgtcctgaaaccttgctgaatttatttactagttctaggagttttctggatgagtctttagggttttctacgtatacaatcatatcatcagcaaacagtgacagtctgacttcctctttaccaatttggatgctctttatttttttctcctgtgtgattgctctggctaggacttccagtattatgttgaatagaagtgctgaaagtgggcatccttgtcttgttccaattctcagggggaatgctttcagcttgtccccattcagtataatattgtctatgggtttgtcatagatggcttttaataccttaagttatgtcccttctattcctattttgctgagggttttaatcataaagaatgctggattatgtcaaatgctttttctgcatctattgagatgatcatgtgaattttgtttttaattctgtttatgtggtgtatcacattaattggcttgcatgtgttaaatcaaccctgcatccctggtatgaaacacatttgatcatggtggattatctttttgatatgctttggattcagttagctagtatttttataaggattttttcatctatgttcattagggatattggtgtgttgtgttgtgttctttttttgttatgtcctttcctgattttggtattggggtgacactggcttcatagagtgatttagggaggattccctctttctctatcctgtagaatagtgtcaataggattggtcccaattcttctttgaatgtctgatagaattcagctgtaaattcctctggtactggatttgtttttgttggtaatttttttaattatcatttcaatcttgctgcttgttattggtctattcagagtttctgtttcttcctggtttaatctaggaggattatatatttccaggaatttattcatctccttcaggtttcctaatttatgtgtgtgaaggtgtttatactagaattgaatagtattttttatttctgtagtatcagtaataatatctcttttttcatttgtaattgagcttatttgaatcttctctcttcttttcttggttaatcttgctaatggtctatcaatttgatttgtcatttcagataaccagctttgtgtttcatttatcttttgcattttttttgtttaaatttcatttcattctgctctgatcttcattatttcttttcttctgctgggtatgagtttggtttgtttctctaagtctttgagatgtgactttacgttggctgtttgtgctctttcagatgttttgatgtaggcatttaaggctatgagctttccttttagcattgcctttgctgtatcccagaggttttgacaggttgtgtcactattatcattcagttcaaagaatttttgaatgttaatcttgatttcattgttgacccaatgatcattcaggagtaggttatttaatttctatgtatttgcatggttttgagggttcctgttggagttgatttcccattttattcaactgtggtctgagagagtacttaatataattgtgattttcttaaatttactcagacttgttttgtgtcctatcatatggtctatcttggagaatgttccatgtgctaatgaatagaatgtatattctgtagcacatgaatgttctgtaatcatctgttgagtccatttgttctagggtatagtttaagtccattgtttctttgttgactttctgtcttggtgacctgactagtgcagacagtggagtattaaagtcctccactatcattgtgttgctatctgtctcattttttaggtgtagtagtaattgttttataaatttaggagctccattgttaggtgcatatatgtttaggattgtgatattttcttgttgggctagtccttttgtcattatataatgtccttctttatcttttttttaactgcagttgctttaaagtttgttttgtctgatataaaaattgctactccagcttgcttttggtgtccatttgcatggaatatctctttccacccctttaccttaagcttatgtgtatccttatgtgttagatgagtctcctgaagacagcagaaatttggttgatgaattcttctctattctgccattctgtatcttttaagtggagcatttaagccatttacattcaatgttagtactatttgttgcctgaatgtcttgtttgtttgtctgtttcattgtgttattgttatataggtcctgtgagatttatgctttaaagaggttctattttggtgtattttgaggatttgttttaagatttagagcttgttttagcagttcttgtagagtggggctggtagtggcgaattctctcagcatttgtttgtctgtaaaagactgtatctttccttcattcatgaagcttagatttgctggatacaaaattcttggctgataattgctttgtttaaggaggttaaaaatagaaccctgatcccttctagctttcaggatttcttctgagaaatctgctgttattctgatagcttttcctttataggttacctgatgcttttgcctcatagctcttaagattctttcccttgtctttactttagataacctgataactatgtgcttatttgcatggttttgagggttccttaaaacgtaggtgatgatcttttttcaatgaatttcccaggtgttctttgagcttcttgtatttgaatgtctagatctctagcaaggccagggaagtttttcttgattattccctcatatatgttttccacacttgtagatttcccttcttcctcaggaaaaccaattagtcttaggtttagatgcttaacataatcccaaacttcttggaggctttgttcattttttaaaattcttttttctttgtctttgatgaattgggttaattagaaagtcttgcctttgagctctgaagttcttgcttctgcttttccagttctattgctgagactttccagtgcgtgttgcatttctctaagtgtgccttgatttccagaagttgtgattttaaaaaatttatggtatctattacactggagatttttccttccatgtcctgtattatatttttgatttatgtaagttagagttcacctttccctggctcctccttggttagcttaataattgaccttctaaattatttttctgacaattcagagattttgttttggttttgatccattgctggtgagctgatacgatcttttaggggtgttaaagaattatgttttgtcatattaccggaattgtttttctggtttcctcctcatttgggtagactatgtcagagggaagatctgggactctagctgctgtttagattcttttgtcccacagggtgctcccttcatgtggtgctcttccccttgccctaggaatggggcttcctgagagcccaactgtagtgattgtttttacccttttgtgtttagccacccagcagagctaccaggctccaggatggtattggggagtgtctgcaaagagtcctgtgatgtgatccatcttcaggtctttcagccgtggataccagcacctgctcaggtggaggtagcaggggaatgaagtggactctgaggttccttggttgtatttttgtttagtgtgctggttttgcattggttggcctccagccaggaggtggcgctttcaagagtgtatcggctgcccttgtggaagaaggatcaggtggtgggtggggccatagagttcccaagagattatgtgctttatcttcagctaccagggcaggtagagaaggaccatcagatgggggcagagttaggtgtgtctgagctcagactctcctttggtggggcttgctgtggtggcagtgggggtgggtgtgtggttctcaggccagtggatttatgttcctcaggggattatggctgcctctgctgagtcacacaggttgccagggaagtggggtaagtcggcagtcacaggctttaccccgctgccatacagcctgcagtcctaaagacaggtctcactcccaccgtggccctcccaacagcatcaagtcaatttctgggcagttggtgaccagggctgagaacttgccccagagaactcagccttcctgctgagaaagcaaatggactcatggttttccgatgtctcattgagccagcagcagtgatccagttccttcaaagggtctgtggattctctcagctttcctggtatgttcctagggtaattcttgtagcaaaagttcacgatatgagtcttcacatgcagctgtctgagcaggagctgcaggctagtcctgcctcctttccctctatggtaacatctctgattctaattctccttattgctttccttagaactatcaaaacaatgttaaatggcaatgcattttctcatttaatggtaatatttctatttatgaaatgatggattgaaaattatctacaaattttcatctaatgtagacattattttgttggcaattttataaaaagttcttacaagaatattttaaatttatcactttaaggccaggtgcagtggctcacacttgtaatcccagcattatgggaggccgaggtgggaggatcacctgaggtcagaagttcaagaccagcctggccaacatggtgaaaccccatctctactaaaaatacaaaaattacgtgggcgtggtggtgtgtgcctgtaatcccagctactcaggaggctgaagtgggagaatcacgtcaactctggaggcggaggttgcagtgagccaagatcacaccactgcaccccagcctgggtgacagagtgagactccatctcaaaaaaaaaaaaaattataacttcaacatttataaagttgcatgtattttatagttcttttccttttgacaaatttgttataaataagaggtagttgattatccacctatccttagctttccataataaattttatttttgttagatttttaatatttttgttaaatttcatatgctaatagtctatatagattttatatttattattcataagaaaaattaatttgttgaaaacatcattttcaatttttgctattaactattttgcatttttgtaattttgacaatttgtgtttccttagaaactcattaatttaatttaaaattgcaaattacttacataggattataactatggttctcctaaaatttgtatttccttcctatacctgtgtctgtatatttgtgttttatttctataagttatattttccagattctgacttttatttttaaaaggatgaaatattaatttatttagaaattcaaattatttttgcttttcaaatttatcaaactttgtcattcttcttaatcccccaccatgcttttctcaatctagttttgttgttttatttctaactttttgatttaagtgttttttgtgtttttcatcttaaaataaaaaatcaaattatgaggactaccaatatgctttttgtacagcttttaccttgatcctaaaaatgtaataaatcatagtattgttgttattctctaaatgatgttagaaatacattttcagtgccacaaaggaagtagcactcgaacatgaattttctcagcaaggcaattttacttctatagaaggatgcatctcacggatggagcaatggcgagagcacacctgaacaagggaggggaaggagtttttatccctgacgcaggtagcccctactgctgtgtcattcccctattgattagggttggaccacacagtctaagctaattcctactggctattttaaagagagcagggttacgagccagagtggtgggatgagcagttctggtgggaaagacggttacagaacaaatgactaaatgtgactcaggtcagaacaggtgaccaagggtgactcaggttgcagcaggtgatcaggggtgactcaggacagagcaggtgatcaggagtgactcaggatggagcaggtgaccaggggtgactcaggactgagcagatgaccagggaaacagttgtgaactactgattacaactggtggggaggttgtttactgaaactaggggaaggagatgaggagaacaaggaagttaaactttaaaatgaaggtcatagaactgaacatactgacatactgatactttgaagagaaacttagaactcactgtatttaacaatgacatatatgattttaatatagtatttttatcaaactttagaaggctttttttcagatactcattatcttatttttttctttctttctttccttttttttttttttttttgaggtggagtcttgctctagcacccagcctggagtgcagtggtgcgatctcagctcactgtaacctctgcctcctgagttaaagtgattctcctgcctcagcctcctgagtagctgggattacaggcgcatgccactgcacccgactacattttgtatttttagtagagatggggttttaccatgttggctaggctggtctcgaactgctgacctcaggtgatccacccacctcgacctcccaaagagctgggattacaggtgtgagccatcgcgcccagcctatcttatttcttccttcaatatttttacaaaataattttaaagacttttttgaagtttaatttacatatgaaaaagaacatccaatgacttttcataaaatgaatataattatataatctgtacctacctcaagaaacagaaccagaccaccaacccataaattccatctaatcacatccctgttgaggttaactcttatttgcatcttttttgtttttaatacaacttaatgtattattaaaggcaatcttgtaaacaaaactcaggacaagaagtagaactttggtagctaacttataagtcattctatgtactccattccaaatacaacctcttccatttaaatgattttttttgaattcattacgcaagagtctattcctagacaccatagtttaatcttgcatgtttgtaagatacttgatagggcctttaagttactcaattcacaggtcctttctccattcctttcatttctttacaaactctctgtcgaagaacctgaactgttggacatggtgagttggcctacaaactttgctgactgcatactgatgatggaatttaatatgttcatttgttctgtttcttgcaattgcagctggattcagaggtttagttagacgcaggttcaatcctttggcatgactaaacaggagatgatgttctctttcatcaagaggcacataatgtctgggccaggtgaggtggctcatgcctgtaatcctagcactttgggaggctgtggcgggcgaattgcttgagcccagagtttgagaccggtctgggaaacatggggaaaccctgtctctaccaaaaatacaaaaattagccaatctcataaccttgtgtaaaaataataaatattaaaatataaaactaaaaaataggcacataatagctggtctttagtctttttttttttgcttttagcagttttgatgtttaatgcttaggtgaattcatccattgcaaaatggtcatgttttaacctagtctttttgttttcatttactagtttggataattttgtacagagatgctttaactgtcttttatttggctactcagaggtacagttcatacaggaaaagagacagaatttatttacccagttttcacaataatcaattggttttcagctgtcctcagaaagtgacagattaggttttcatgtatttgtttccttgtatcattctgacttcattctgatagaattagaatgtatcacaagtgtcactttgtgcttagttatctcttttacttcttagaatttcccttttttattctctcgacattctcctctagtcatttcttcatccatatactagaaataataactcaaatgtttaaatgaaggttcaatgctataccacataaaatccaccttgtgcagaaacagacatgctgttgtcatttaactgcaactaacttatatgaagaaaattgcagacctgaaatcaaatctatcttgctccaaatgctacatgctatatctgtttctgtctgtcggcagataatgcagttttacttgggttaatctatgtcaataggtgaaaactcaacattaagagctaattatgtttgagaacagaaagtagagaaaatttattagttgagcaagtgtttgaggttggtatgtgtaaagagagttgtgatactacttactctgaaaggaaatcctgctgtatgggattgaatctctctcaagtgtttccttgatttttctctgcagtcatagaagaagtaagatatttttgttgaatttggaggtaggttttgaaaaaaaaaattctaacttctctatttacaagtacatgtagacaaaagaattttaacttataaagcaaaattaggtttatttcttcatccctggaagactgactctctcctttgtaattctatttcatcatttgtaaaataattggaaaatgaaattcaaataactactcttgaaaagaagaataaatttacatacaaataatggtctgcaagtcccttattatactccatatctgtgtaattagtttaattataactaaatcatgcttgcattaattatattttaaccttgattatttgtaatgttaattgcacattggtattcaaagaattaaataggtaattagcagcacaatggaatttttcactacttagagagttgaaatgtaccttcctgcccatgaagcccatagcttattgctacctaattgaaacacatctactcattcattcaatatattaaggtatttttgtctcttctttgaggttatattatctaaaacagggctcttttactttcctgtttaatttactaatctccatgaatgcacatcttcaaacttgagagtaatacatgtctaaatatatttcaaaattgtccactgtagtttggctcagagcatgtcatgttctcctgatatactgatagttgtctcaggccagaaatcacatgcatttttattattattattttctattctctgtagctcttcttcctactatcgtaactctcaactttttgtcttggcaagttgtcaaggctgcagcatgatagactaggtcccagaggaagtgaagacaaggaagtgaagtaaggaatttaagactaagatttgttttatgaatttgatcaacacagttgagaagcaggcataagaataaataattatttgacttaaaactagcagtctcatatctggaacactaaagtcctgctaaggtagtggcaagattaacaaaaggctctaaaaattggagacaagttttctgatgaaaatcttatgttgtgatatttacttaaaatatgaaaggctgtggcatttttatttggtcagcatagtgttaaaattttggatttggattggcgttggttccagtttgtcacagttgccaccattgcttgttgccttattgatggacaccatcaaacatttacttggactattacatctgaaattattgaaatttgtggctcctgaacaccataaatgttaatctcattagccatgatttactgtgtctctcttattcgccgagtattaagttaggggctttacattctagatcttatttgataattataatgacaaagaggttgttatcctaattttactgacaagaatctaagattcagaaaaattaagtggcttgccggaagtcaaacttctagaacatgatggagctttgaatccaagtttttgaaactctaaatcacatgcagttcctatccaccctttgactattagagaaaacaaagtagtcacaatcaatgagacagaacataaaatattttaaaagggagaagaaaaagagatatatatatacatataaaatatcatgtatataaatatcatatgatatatatcttagttatatctatatatatattttaaaaggaaagttgacagataacagagcaggcacatatttttataataaatattattgggagtatctttccttaaaaaatcagacactcagaaactgggttaaaaaaggtatttttttttttacatgacacaacacaccattacagtgaaattaaaaataatggccattatgcaaatgaaaacaaaacaaaactgtataaatacgttaacatttaaatatataattcaagtaaaggtacatatgaggcaaagacactactaaataaaatacattctttgatgtgaagtcattgcagtcaagaaattctgtatatgaaagacatagaatgataaggtgtaaagcaaagtctgttgggaaaaccagaaagagaatgagaggatacgttggaaggaagagaccttaactctttaattatctaatagttacaaagtgtaatatatttggagaatgagtttcacgtcatcaacacaagaaacaagactgtttatcatacaaacatgacaaatacaactcttcatttttatttatgaagtactagagtaattcctgttaaaataagaaacagaataacatgatcaacattattatttagcattttctggaatttaagttcctgctataagacatagtttaaaaaatagtatgagtatttatactgctaattattatcttttgtgtcatcatacacttaaatacccaagaagatcaattaagaaataatttcaactgaagtggccagaaaaaataataaatacattcaaggctatataatatgaaaaacaattacaatagaaaaaaacacatgcaaggtaatgaataaccttagaaggaaatatggtcaacctatatgttaaaatgtagatgatgttttcagcataaaagaataaataagtaataagataataccatgttgctgaatggaaaagctgaatcatcttactattactctcctctagcaagttttatagatttaatgtaattccaattgatattgcagagaatagagtaggctttacacagaatttctgaagttttaaacacaagaataaatagatgggtctaatcgtgacatttttcaaaaagaataggttgataatggctaaatgacttaagaaatatttcagtgcattatattgactttgtaataaaataatgtctttctaattggattgcttaatcgataagagaaaatcaaaatataaaaaaggtagtatacacattttacattagtgataaaaggaaaagaagttgcaaaattttcctgagattggtattttctatccctcaaagaaaattagaaataaggcaaataaacacattgtttattcaataaggacatttcttttagacattaaattaatgtaaaatttacagtagaaaatacagatatatttaaacatagaaatttaaatttcttctgtaagtcgaaacattaaaattgaaaggctgaaaacaaggatcaaataagacaaagcattaataggtataatatgtaaattactgtatagtgataaggaaaagactacaattacaatacaaataggctagctgggcacggtggctcacgcctgtaatcctagcactttgggaggccgaggcaggcagattgactgaggttaggagttcgagaccagcctggccagcatggtgaaatcctgtctctactaaaaatacaaaaattggctgagcatggtggtgggcacctgtaatcccaactactcgggaagctgaggcaggagaatcgcttgaacccaggagtcggaggttgcagtgagccgagatcgcaccgttgcactccagcctgggcaacagagggagactccatctcaaaaaagtaaaaaataaaaaaaataaaaaataggcataagacttaagcattaaacacaatatgaaagtgaatggttaataaacattttaaaaatagttgccatcattaatataaaaatgcaaaacaaacaacagatacatatatatttttaatcattataaacaactaaaatgtagtgcacaatttcatgaaggtatagtaaagtggacactgttatatgcttatctttggaatataaatcataattttactggagttaagcatggcaatatatataaaaaatacttgggctaataattttccttctgggaaatttgtgcctagggagataacagaaacttggataaaggtttaaatgaaaatatatttattctagtaaataattgagaaggtattgttcctatatatttaacaattacattaattacaaaatgttggtgcaaaatcatttaaaataatattaaatatattaaaatggaagattagcataacttgaaaatgctctcattactagataagaattatctaaaacgattatattagtacctatctgaggtcacaagaaaggagggaaatttccaggtgccataaaagaagaaaccaacaaacctgatgtgatactgtgcaatatatatttttgtcttagacccatttccaagcctacaactcctaaaattcttggaatgtccaaactgatgtaatttttatgctaatgatttatggcgctggcagcctctaggtcacttcaggatggggctggtcaccagaaagaccaaggcaggattacagggttgggacttccagccacacccctcaatctcaggggatgatgagacgctgaaggttaagttgatcacaaatgaccaacgatttattcaaccatgcctctgtaaaagctctgtaaaatcccccaaaactgtgttcagggagtttctggatacctgaacacttgatagttcctggagggtggttcccagagagggatggaagctccataccccttcccacatgctttcccttatacatcttttcatttctatcttttgtaatagtctttgtaataaactggtaaatgcaaataagtgtttccctgagttctgtgagccattctagcaaattaatcaaacccaagaagagggtcataggatccctggccgatcccaaaaggtcagaagctcaggtaaaacaacctgaggcttgtgactggcatctgaaagggagcggtcttggggactgagccctcaacttgtgggatctgattatgtctgcaggcagatagggtcagaatagaactgaactagagaacattcagctggtgtctgctgcagaaatgattgcttgattgttggtggggagaaatccccacacatttggtcacagaagtcttgtgttgattgttgtggtgtgagagcagaggaaaaacagagttttcacactttcattccagagtaattgcttgtgttgccacctaagaaaggggcaaagcatatgtaaatttctgatttggaggcataggttttaatgtccctgatggtgcaagagctatgactgcagctctgcatgtggagaagcattgaactgaaactctgtataaagctaggatcgttgaaaggctgcatccttactgaaggggtaggatctagaaaagaccttctactggcatagaaagataataggaaaacattaatttctgtctaggattagaggtgaaaagaaaaaaatctcccctggaattttgaaaacctgagcttataccctagaactgaaactcctagaattgtgggagtttaaatttgactacctgtgatctgagaaccacaactccccctacccaagaatataacataaacattgacctcagtttgatgatacccatgggcacttttaagaagaaaacacaaatctttgcaaggatggtctcacagctcatatatcattttttttcaagagcccattaaagtggagtgactaaacaaacattacaaaacacacaagacaactatctactatatagataaattaatggctatcacaaaaaggagaattggcacacaaagaatgtaatgtaagagaactacaatcacaaagaaaatgtaagaagtaccatgatatgagagagaatagatttgaaaaaaaaagtactaagattaaaaactgtggctattaaaaagaaaaacaatggttgggttaaaaacaaatgatgtactgctaataaaaaatatgaaaatgaaattatgtgaaatatggaggatagaaagaggtctaacataagtctaattagatttctgaacaaaagaatagagacaatgggagagaggcaccatttgaagaaataataggtgaggattttctagtgttaagactgttgcttccttcaattgaagaaacattacatttattgaatataataaatgagacattcatacttaggcactttgtgttgaaaccaagaattccaaaaacaaactcttaaaagaaacaaggtggcaggtcaccacaaagtaagaaatacacctgcatctgttcacaataatagccactagccacttgtagcatctaaaattaaatgtaaatatgttaaaatcaaatcaaattataatttttttctcagcagccactagcaacatttcaagagtacaagaaccttctgtttcaggcagcacagatacaaaacattttcattgttgcagaaagtttaatttggcagtgatgaattagaccaaagaccaacttcttgacagcaagaatataaacagaatccagtaaaatgaaagaacataatgaatcaaaatgcattaataggtcaatagttgttatatatagacacagaattataggttaagttttattttttcttaatccttcctgtactttccaaatcttgcgctatgatcgtgtgttagattatcagacaattaaataataaacgggatataaactcttaagacaaaagcctttctcttcacatttcaaactagcattttttgagtttgctccattttaatatatgcaactgggataaactgttttttccttaggttttcccgttttttaagtgaccgtatcatagaattcatgtgaacaataactatgaagtgctatgacaccatcaaaattctaagtattatgtatataatacttaaaaatttatgtataaattactgtgcttcatataaaccaatgcactaccaatatatacaaaaagacatggaactcatttattgcttttaaatgtttcatcttcctttagactaatatgaatcacaaattagagtagtttgaatcataacctcaccaactagcaactagttgacaatttaattttctccatttaaaattaaatgacaatttaacaatactaacctaggaaaacaatgaaagaaagtcctctctaattttacatcaaagtgatttttattcttgcagacaccagtttaaaaaaatggtctaactgtgcctctatgtttgtatgtatcaattatctgtctgcatgtacacatgcttgcatgtacatatacacaaaaatgctcatatacagtgtatatttttttcattcatttcattcagtttttaaatttacatcatcatatcaaaatgttttcagaactgctgcacagtcttcacattaatgcctaccttgtattccactggttttctatgccagcatgtactgagtcatttctctattacatagttatattctcatttgaatttcccttccctggaacaaagtatctcttagctgaaaaagtcttattctgtgaaagaaaatgctgcctcttccatgctatgtctaagatatggcagaatgtgcaaactagcagaaagcatctgtatttagccacaagcattgacttcagtcggccccatgtagatctgtattagatgggtttccctgctgcttgctgcctcaggcttccatggggagcacccagaatacagtatgtgcagaggtgttcttaatttcacactgaagatgctcactcctctgcacacatggtccgtgatgtcccaactttacactggtgtaaaaatgatacacatttcagtgagtaccatactttgggtacccatacaatcattcttttcactttcagtacagtatttactaaattacttgagatattcaggactttattatgaaataggttttatgttagatgattttgcctagctgtaggctaatgtaagtgttctgagcacacttaagataggctaggataagtgatgatgcttggtaggttaggtgcaataaatgcatcttcaacttacagtattttaaacttacaataggtttattgggatgtaaccccatcctaagttgagaagcatttgtatttgctacttgttgatgtttacttcctgtttgctaacacactacctgtggtgtggcttctgtcatccacgatgtcttttgtgtcttttcaagaacaacaaggttgatgcatagctagaactgataatatgttctttttagtggaaaatatcttctgtatataacaaactgctaactgctcatacacagcgagtattttcatttgttagttttcactggaaaatattgtttatcctataggaatacatatatttctatattcctatcccgatatgccactataattaaatcatcttgggtacagtctttgtttcattacgcagtggtattagaaaacttctgaaagtcccctggcggagaaatgtccctaagcattttgttaattaagggataatttcactgaagaggaatattggaaggaattgctttctttctcagacatttaaatataaaagccgagttgaagtctttgttaatctagaatctatttttctttctaaggctatgccaacataaaaccatattttctttagttaatgtaatacagtactgggagtgaaggatgataaaaacaccagcatgtaacacattttttttttttttgtccacagattgttaaacgtcaaaagcaacctcacgctatggcttatgtattgagctgtgtgagagttcacatgtcgacttccaatcttcaaattttagttaatatattgtttgagctccctagcgcttcatgggaagtcctcactgggagaccttatctccctttcagctgctctcgttacatagaaactaagccaccatgagcaatgtgcaggttccctcatgccagggtgttttctgcatgccttgcttgcacagcttctatgttccctacatgctccttacacctggggagctctaatcctgtcagtgccaggcacaggtgagtctactgactcacacaggaagggaggattattctcagcttctttctaagattgaaacttgactacatctctattaaaatagagatgggtggtggttgcctggtaaacctatagccagacaactctagcctatttaggagtcattattttttctttactttttttaaaaaaaatttactttaagttccaggatacaagtgcagaatgtgcaggtttgttacttaggtatacatatgccgtggtggtttgctgcacctattaacctgtcatctaggttttaggccttgcatgcattaggtatttgtcctaatgctttccctccccttgccctctacccgccaacaggcccaggtgtgtgttgttcccctccctgtgtccatgtgttctcattgttcaacttccacttatgagtgagaacatgtggtgtttggttttctgttcctttatgagtttgctgaggatgatggcttccagcttcatccatgtccctgcaaaaggacatgatctcgttcttttttatggctgcatagtattccatggagtacatgtaccacattttctttttccagtctatcattgatgggcatttgggttggttccatgtctttgctaccataaatagtgttgcaataaacatacgtgtgcatgtgtctttatagtagaatgatttattttcctttgggtatatacccagtaattggattgctggatcaaatgatatttctggttctagatctttgaggaatcaccacacgtcttccacaatggttgaacaaatttacattcccacaaacagtataaaagcgattttatttctccacagcctcaccagcatgtattgtttcctgacattttaataatcaccattctgactgacgtgagatggtatctcattgtggttttgatttacatttctctaaggatcagtgatgttgagcttctttcatgtttgttggccagttgaatgtcttcttttgagaaatgtctgttcatatcctttgcccactttttgatgggattgtttgtttctttcttgtaaatttgtttaagttccttgaaaattctggatattagacctttgtcaggtgggtagattgcaaaaattttctcccattctttaggttccctgttcagtctgatgctagtttcttttgctgtgcagaagctctttagtttaattaaaccgcatttgtcaattttgaattttgttgccattgcttttggtgttttagtcatgaagtcttcataggcagatgaagcatagctaacatttctgtcctatgcttaccacaaagtagctgaatatttatttttatagaaaattctgcgtttcatatattttcttctttaccaaactctttgaagtctctatttttcttttttttggaaatggagtctcgctctgttgcccaggctggattgcagtggtgcgatgtcagctcattgcaacctctccccaacctgattcaaatgattctcatgtctcagcctccagagtagctgggagtacaggcgcctgccaccatacctggctaatttttgtatttttagtagagacggggtttcatcatgttggccaggctggttttgaactcctggcctcaagtgatccgccccccctcagcctcccaaagtgctgggattacaggcgtgagccaccaagcctggtctctactttcttttttatctttgagtaacaaatctcttaatttatgtgtgtgttgttgtttattcttcttttttcagtggatgatgccactggctgaataatactgtgaatccatctatttatctatctacgtacctacatacctatctatctcatctatctatctttttaatctatccatccgtctgtccatccatccgtccatccatccatccatctgcttggcagacctgcacaggtcatccatgttatgtcacctccccacactatcagtgtgcaccaactgtcatcccaggcagatactgtttttaataattttacagataagactaatagaggccaactgaaaattttttttaccttccagctctttactgagcattctattttagtcatatttctaaatatttcaagaattattttttctctcttgacttatttatgaaaaaaatggcatcctactttttagaaatgcaatatctaaataaatcattttttctttaaatattgatgtatttttcttttaaattagtttatctgcattgtttcagctacctgaattttctggagttttttgtttgtttttgtattgttcatgtcatatatttccttcaaatagctaatgttttgtgattgtctactcctacttaatatgtgagcattaaaatccttaatgaaaacccttggtatatggctagggcttactgactgttcactatagagtgagctatcattttgatagaatttggtgaggcaataaaagtaaaatgtacatttaaacttcatctttaattagatgtctagattaattaaaaccacttttgcattgccactataatcccatgtgattatgttgtattcctttgaatttttcaaaaatttgaatttccagaatcaatagtgaaatatttttgagttacagacacataaatctaaggattattagatctgtcctttttctcttcagtcttgataatgttctttgattttagatttagactgcttttaggttattactttattattttttcttttcaaataaattcgtatgtattgcactcttttttttttttaagatatatgtctgttttaatttgtttctactgaccaccaactttttcattcattataataatgcttaattcccagtttggtaaaattaatcttagttgtgttttatttttgtaacaaaggatgactgcagtgagagattccctgtcctgattccctgactaccagagagtaggtttcagccttcccttctgaaagacaagaatgcacatgccattctaaggtcacacattttctcaccagactctgggcattatcctactgtcttctgacagtcagcatgcaatggagaggtccaaggcagcctcactttgattcttgttcagatatttacatgttttatgttctttcctctgaagttaaccaaaaaaagcaagaaaacaaaacccattaaactccttgtcaaatcatcaaggcttagtagtattttcatttgtccttttagcctttattcatagttttgtttttaatttaagaaaataattttggtttccttgcagtccttactaattttaacctattaacctgttgttctcattctggagggccttaaaaaaaaagttacaattttatctcagacattcctttccttgggttttatgtttctatttcattgaggctgcttcatcttgcattcttctggaaataccagtgtctttccttaatattcagatacatgttttgctgaatcttagagattttgttccttttccactgtttatttttagaggatgttgttttactcatctaagaaaatgtaaactttttattaagttgatgttgatcaacagcaatggacagtagaattctctctgcttactttggtggtggttggatacagaatttggacctacaacataggttgaatagaaatgtataggtcttagttcagtcttggtttttagcaaggttttactttgtacttcctttgtattgtaggagcattgttcctcacctttgttgccttttttttttttagaaaaaaatatgtattgacaaattataattgtatatatttacggggtacaaagtaatgttatgatttaagttgtttaatttttaatatttgttggtacataagggttatatatatttatggggtacatgagatactttgatataggcgtacagtgcataataatcacatcatgacaaatggggtatctgccccctcaaacacttatcctttttgttataacaatccaattatactattagttattttaaaatgtataattaagttattattgactgttatgctataaaatactaggtcttattcattctttacaactacttcttgtacccattaatcatccccacttccctccctacacacccactaccctccccagcctctggtaactatccttctattctctttctccatgaattcaattgttttaatttttagctcccacaaataagtgagaatatatgaagtttgtctttctgtacttggtttatttcacttaacacaatgaccaccagttccatacatgttgcaaataatgggattctcttttatggctgaatagcactccactgtgtatatgtgccacattttctttatctattcatctgctgatggacacttaggttacttccaaatcttacctattgtgaacagtgctgtgataaatgtgggagtgcagatatcccttttacatgctgatttcctttcttttgggtatatacctaggagtgagattgctaggtcctttggtagctctatttttagttttgaggaacttccaaacttttctccatagtgactaccaatttacattcctactaacagtgtatgagggttcccttttctctgcatcctctctagcatttgttgcttgttgcctgtcttttggataaaagccattttaactggggtgagatatctttttgtagttttggtttgcatttctctgatgatgagtgatgttgggaactttttcgtatacctgtttgtcatttgtatgccttcttttgcaaaatgtctattcagattttttgcccatttttaaatcaaattattagatttttcctgtatatctgtttgaacttgttatgtattctggttactaatcccttttcagatggatagtttgcaaatattttctcccatgctttgggctgtctcttcactttgttggttatttcttttccagtgcagaagttttttaacttgatgtgatcccatttgtctgtttttgctttggatcacttgtgttcgtggggtattactcaagaaatttttgcccagaccaatgtcctggagagttttccaaagtaatagtaatagtaactgttcaagtaatagtttcatattttgaggtgttagatttaattctttcattcgtttggttttacctttttatatgatgagaaaataggggtctagtttcattcctctgcatatggatatccagttttcccagaaccatttattgaagaccatcttcttctgaatgtatgttcttgacacctttgtcaaaaatgaatttcctatgggtgtatggatttgtttctgggatttctattctgtcgcattggcctatgtgcctgtttttatgccagtaccatgctgttttggttactatggctctgtagtatattttgaagtcaggtaaagtgattcctctagttttgttctttttgcttaggatagctttgtctattttgggtcttttgtggtttcatataaattttagggttgttttctctatttctgtaagaatgccattggtattttgatagggattgtattgaatctgtagattgttttgggaaatatggatattctaacaatattgattcttccaattcatgaatatggaatatctttccatttttttattccttctttgatttctttcaccaatgttttgccatttttattgtagagatctctcacttctttggttgggttaatttctagatatttaatcttatttgtggttatattaaatgggattactttcttgatttctttttcagattgttcactgttgtcatgtagaaatgctactgatttttgtatgttgattttgtatcttgaaactttaatttgtttatcagttctagtagttttttgtgctagagtgtttagatttttttcaaatataagataatattatctgcagcaaggataatttgagttcttcctttctagtgtggatgccctttattattattatttattattattattattattattatttgattgctctggctagaagttccagtactatgttaaataacagtggtgaaggtgtccttgttgtgttttagatcttagaggaaaggctttcaggttttccctcattcagtgtgatactagctgtgggtctgttgtatatgacttttattatgttaagggatgttccccagttttttgagggtttttaatcataaagggatgttgaatttactgaatactttttcagtatcaattgaaatgattatatggtgtttatccttcattctgttgttatgatgtatcacattgattgatttgtatatgttgaaacatccttacatccctaggataaatttcacttggtcatgatgaatgatctttttaattcattgttgaattcagtttgcttgtatgttgttgaggatttttgcatcaacattcatcagagatattggcacatagttttctttttttgatatattgtctgatgtgggtattaaggtaatactggcctcatagattgagtttggaagtagtctctcctcttctacttttcagaatagtttgagtaggattggtattaatttgttaaacatttggtagaattcagcagtgaaatcattgggtcccaggctttattttttgctgggatattttattatggcttcaatcttgttacttgttattcacatgttcagattttgaatttcttcatggttcaatcttggtaggttgtatgtgtctaggaatttatccatttcctctagattttccatttatgggcatatagtagccactaatgatcctttgaattgctgtggtatcagttgtaatttctcctttttcatctctgattttatttatttaggttttccctctttttttctcagtctggctacaggtttgtcaattttatttatcttttcaaaaaacaaatttttattttattgatcgtttatattattttctttatttcacattcatttatttctgttttaatctttatttattttttaccaattttgggtttggtttgctcttgcttttctagttctttaatatgattattaggttctttatttgacatttttcttcttttttgttgtagccatttatagctataaattttcttcttggtactgcttttgctgtatttcatagattttggtatgttgtgctctcattagcatttaaataaatttttcaatttctttcttaatttctttactaatctactggttatttgtgatcatattgtttaatttccatgtgtctctgtaatttccaaaattcttcttgttcttgatttctagctttattctcttgtggtcagggaagatatttgttattatttcaaagtttttgaatcttttaagatttgttttgtgatctcatgtatgttctttccttgacagtgatctacgtgctgagaaggagaatatatattctgaagctgtggagggaaaggttctgcagtatctgttagatccatttgttctatagtacagattaagtccaatgtttctttgttgattttctgtttataatatctgttcagtgctgcaagtggggcattgaagtccccaggtattgttatattgaggtctatctctctctttatctctcataatatttgctttatatatctgagtgctcctgtgttgggtacataaatatttacaattgttttaccttcttgctgaattgacccttttatcgtgatgtaatgaccttctttgtctcttcttatggattttgtcttgaaatccattttgtctgatataaatatagctactcatgctacattttggtttccatttgcatggaatatagtttttccatccctttattttcagtctatgtgtatttttataggaaaaatgtatttcttgtaggcagcagatcattgagtcttgtacattttttttcatttggccactctgttttttgattggagagttttgtcaacttacactcaatattattgataaaaaaggatttactcctgctatgttattgttttctgtttgttttggcatcttctcatctttcttttattcctttattgaagatgattttctctggttgtatgatttaattttctgctttttattttgttgtttatctgttgtatgttcattgatttgagttaccgtgaagcttgcaaatactattgtataacccactattttaaattgatgacaacttaacagtgattgcataaacaaacaggcaaaaggaaactactaaaaactctaggttttaatcttgtcctccagcttcttaactttttttgtttctctttaagttttttgtactatctatgtcttcaaaagttattgtagttattatttttgattgggttcatcacttagtctttctacttgataagagtagtttacacaccacaattacagtattataatattctgtatttttctgtgtgctcactattaccagtgagctttacactttcagataatttcttattgctcatgaacaaccttttctttcagattgaacaaatgtttttagcatttcttgtaggacaggtctgttattgatgaaatcattcggcttttctttgactgggaaagtctttttttttcccttcatgtttgatagatattttcactggatatactcttgtaggataaaagttttttctatcaacactttaaatatgtcttgccattccctttttgcctgtaaggtttccactgaaagtctgctgccagacatattggagcttcattgtatgttatttgtttcctttctcttgctgcttttagaatcctttttttattcttgacctttgggagtttgattattaaatggctcagagtagtcttcttttggttaaatctgcttggtgttctatttgtttggtgcaaaagtaatcacggtttttgacattaaaagtaattacttttggcaattaaaagtaattaccacaattacatttgcaccaacgtaatataaccttcttgtacttaaatgttgatatccttctctcagtttggtaagttctctgatattatccctttgaataaacttcctgcctctatctctttctcttcctccactttaaggtcaataactcttagatttgccctttcgaggctattttctaaatcttatatgcgtgcttcattcttgtctgttctttgttcttttgcctcctctgactgtatttttaagtagcctgtcttcaagctcatcaattctttcttctgcttgatcaattatactgttaagaggctctgatgcattctttagtatgtcaattgtaccttccccttccttccttccttcctttctccatccctccctccctccctccctcccttcctcccttccttccttcctctctctctccctttcactttctctttccctttctctttctctcttttttctttttctttttttttttttgacagagtctcagtctatcacccaggctggagtgcagtggtgcaatcttggctcactgcctcaccctgtcacccaggttggagtgcaatggcgcaatcttggctcactgcaacctctgcttcccaggttcaagtgactctcctgcctcagcctcccgagtaactgggattacaggtgcacaccaccacgcctggctaatttttgtattttttagtcaagatggggtttcaccatgttgcccaggctggtcttgaactcctgacctcaggtgatctacctgccttggcctcccaaagtgctgggattacagacatgagccactgcacccaggaatcaaatgtatttttcgactctagaattacttcttgattcttttgattttttcaatctctttattaaatttatctgatagaattctgaattccttctctatgttatcttgaatttctttgagtttcctcaaaacggctattttgaattatctatgtgaaaggtcacatatctctgtttctccaggattgatcctgccttagctcatttggtgaggtcatgttttcctggatggccttgatgttcagagatgtttgtcagtgtctggacgttgaagagttaagtatttattttagtgtttacagtctgggcttgtttgtgcccatatttttggggaaggctgggctactgtcatagtggcagcctttttgctttcttctttggccccctctcagctgctaatgtctatctaactacctaacataaccactacctgcctaccacctatgttcactcaaggccctagggctctacaatcagcaggtggagaaaccagccatgtttgtgtcattcccttcagggggtgagttcccccaggccctggctggacccagagaagctgtctgggatccagggattagagtcaagtatcttagaaatctacctggtactctattttgctgcggctaagctggctgtcaaaccacaagtcagaatccttccctccttttcctcccttttgactgtcagaggagcctctctcagtggccaccatcactactggctcacagggagttcttcaaggccaacgctgatgtccctttaaagcccaagaatcagcttgtgataaatgctgccaggcctgtgactcacccttcaaggcagtgggctcccttctggtccaagacaggtccagaaataatgtccaagagcctaggcttggactctgataccctaagagctcactcaggtaccataagcgctccaccccactatggctgagctggtacataagattcaagacaaagtcatctttcctttgccctctgcccttctcaagcagaaagattattttatcatagccactacagctaggaatgtgctggatctctcctgaagccaacacaactcagtctcatccaaggcccatggcatattacctgggtatcactgccagttattcaggactcaaaagttctttcgtcatcgagtgatgagtcctgccacgactggggccttcctttcaaggcagcgggttcccttctggctgaagttattctagaaatgtcatcccggagcaaaggcctagattggaggcctcatgaatttgcctggtgccctatttgattgtggctgagctgttaaaagtcctgtttattttttctctcctctctaacagaaggaaggagtcactttcattgccaccagctatgctgccttgggttgagggaagggtggtgcaagaacttccttagctgaccccactggtgtctccctaggtcacatgccaccctagtccactggctgtaatcccagcctagaattaggatttgcctgggaattttagtccttgtgttctaggctccctttcaagtttacctaggaccctagagccctttagccagagatggtaaggcttgctgaaactcaggttccaactgctgggatggatgactcccctccagctagggctggtccaaatgctacctccatgtgtgggcactgactgagccctgcatgattttgctctctgctgtgacagggcagcatttagttcagtgccaagtcccccagtcactgtgctcttcctcccccaagtgcacagattccctctccacaccatacagctgctgcaggggtatgggggagggatgtaatcagcgatttatgactgtctctcccaccctcttcagtgcctcttttagtgatatgaagttaaaaccaggtactgtaattgctcacctaatttttggttcttatgatggtgctttttttgtgtgtagttagttgttaaaatttggtgtttctgcaggagggacaatcagtagaggcttccattctaccatcttgttccacctctattgtgatttttgatgagaatatggaataactaaattaagctgattagcatacccattacttcaaatattttaacttttgtgtgataagcatattagacggttactttctagcaatattgaaatgtacagtactcagttattagctgtatttagcatgttgtgcaatagatctcaaaataaaatcagatttatttattctatctaattgagcctttgtatgctttgactattatcttctgattctcttcaccattcagtctttggtaatcatgattctactgtctgtttctgtgatttcagttgttttagattccacatgttagtgacaatatgtggtatttgtttttctgtatttgacttatttcccataacataatgttctctaattctgtccatatcatcacaaatgacataatttcttcctttttaagggctgaatagtattccattgtatgtatatgtatatatatgtatgtatgtatgcatatatattttttctttattcattttctttatttatccatcccttgatggacatgcaggttgattccataacttagctattgtgaatagcgctgcaatgaacatgggactacagctaactcttcaacataatgatttcaaatctttcagttaaatacccagaatcagaattgctgggtcaaataatattatatttttagtttttttgagtgatctttatactttctctttcataatgtttatactaatacactttcctatcaatagcatgtaagggttcccttttctccacatcctcaccaacacttgtcttttctctttttgataacagatttaacaaatgtaaagcgatatctcattgtgtttttaatttgcatctccctaatgattagaaatgttgaacatttcttcatgtatctgttagctattcagatgtcttatttttagaaatgtgtttcttgcccattacttaattagattattggttttctttctgagaaagtttgtttgaatttcttatatattttggatattaatagcttatcagatatatggcttacaaatattttctcccaatccatagattgtctcttcactgctgttttctttgatgtgcagtagctttttattttgatataatcccgtttgtctttgtttctattgcttgagtttttggagtcaagtctaaaaaatcattgcccagaccaaagtcatgtagttttttctcctatgtttttttttcctacgaatgttatagatttgggtcttatgtttcaatctgtaatctattttgaattgagttttggatatcgcataagataagtgtccaatttcattcttttgcaggctgtcttttctgaaagctttctgaataagtgtagaacatgaaaacaggccccgtctcataagcagcccccagtgtttgaggagcaaagtgccctgtcttctggttggaaagcttccttcctctgtgagccggggttcagaggacatatgcatatgtatggggggggaggtggatacaaagtttgcctgccttttttttcttcatatattctctctttatgatttgaatccttattatgatctgagctgcagttgtgatagtttttggttgttttagtgccactcttcacttctgtcttgtaactattaagacaccttctaatgttattattatactgcttttttgtgggctgagtttttaattctatgggcattttagggaaatattagaaatgtcattccttaatgacatctaaggttggaagttagagctttggttttgaataataaatccgataagataaagtgtgaatcaccatgggcaaaaactcttcttttcttcagatatctaggcaagggaccatggggaatgaaacaaagagaagagctgaggagttaaagaagcagaaatgacatatgcaaacatagattgggtaccatagaacctaactcttgaccagggccagtgaaaaaaatagaatcaaatataattctgaagtagagatgtttgagtcaggattttctgaagagtgacatgttaataagcaacagagaacatgaaaaaggaaccactgggggactagatgctgtctttacttttagatgttattattttattttttggtgtttgttacatgttcaaaggtacatatgcatcctgaaactgaaaggcataaagttgtgattttgatataatttgttacctgtgaatacggtagatggttgccaaaattatgtagcataaataatataaacatgtggtatcatcctctgtaatgatactaatatgttgtgatttccaaaaagaatgatgatgccttatagctttgagttattacatatatgtatgtgtgtatatatatatatatgtctgtgtatctacatatatatattatgtgtgtatatatatttatatatatgtcttgtgatattgctttagcatttgcatttggcatgatcatttaaaatatttttaaatatgcaatgcatggccatggtataaatatccaggctataaaaaggtacagtcaaggtgtgtcaaagtcactgaaaggtatagttttccccagtcatgcagcatttctcttcacagatttcttgtttagttttgtgtaccttctatgtgtagatttgtgttacagtgagaaggagttgttcttcagcacattctttccaatttctaaataataattggtcattgtttgctcatctgtgaggtcagtttgggttatttatatttcctgaagaaagagagggttaaaggctagggtggaaaagtattgggtacctagtcggagtagggaaatgtgtcattaaggttctcccttgctcctcccatgatgaggtctcagcagagatgatgaaggactcagataaagagataagaatgaagtcacctgggctagaaatgccaatacatgtaagagcatgcctggccaaaggagcctgagaccttgactgggacttctctcagagacttcagtgtgttggctgtgcaccaagtctcatagaggaagggcaactttcccccatgaggcctgtcaggtacagattttgtaatggcctgtggtcaggcctgaaaagttgcataagtctttaattggaagcaagactcctcaaatccccccaccccaatcatgtttaattatatccgtgtatggtctagcttttgttgtttttgtttactgcttgtgtgtgtgtgtgtgtgtgtgtgtgtgtgtgtgtgtgtgtgtgttttgcatggcctcatctttcttcctataatttggaggatttctagcctgtgtttagcttctgtggtttcctctacaaatataactctatataatgcttggtttcctacttctttacagggactatattaactcttcagtataaacaatagcaaagttatttagtatattcctaactccacatgtcatctcctctctttctttttaaatagatctcctttcatctttttccctctagcttttttcttttgggaaagcatcatggcatgagactagaagtgagacttggacccacagccagaggttctgggtgcaacacatctctcagatctaatctagcacattgatttggtccaatgtaactgtcatatatggtcctgaattctgtcccctttaaatctgtaaaataataataacctcaatttatccatgtctttttttttttgaggtaaaatacattagaatctctgaaagacactgacagatttaaagaatggtataaaactgaggcattatcatcttatggctactggttatcaacagcttattaacaaaaaaatgaagctcttttttctgatagctgtagtttcaactttttttttaataataatgattcttagtgtattttgacacataatatggtaaagtaacctgtgctcacataggaatttgtttttaatatcactttaggaaaataaaaatcttagtaagtttaccttcccttgcttaaatatctaaaaatatcagccaggtagagaatagttgtactaacattctcaatctatcaatatcttgtaaatagtaaagttttggtatttctttatataaaaatttcttatataattaaaaagttaaatagattagaaaatacgttagaaaaatttgaaatactaaagtttaaaaacctccctgacaatatctattatggaattaataatgcatttaaaatttttgaatctacatatatttggaaaataatacaaatatgtgtaagctatattacagacaattgttatgtgaattagtggctctcatatttactatccggaatctgtaaaatttaacagtgacttgcttgatctctaacactaactttgtggaagaattagatttggtaaaggagttctaagaaaactggaactgtattgttttctggatagtttttaaaactgaacctgtgtgtgtcataaattaagacaccaaatgaaagaaacattaaatgaaaagtctgagtgactgcggaaacggtgataaacataagccaccatttgttctttaaaaacatgtctttgatatattagtcttttcctccaataaattattaagtgggaagattggcagctgctatgaacagagcatgtgtgtaatttaatgagcttttttttttttttttttgccagtagtttataacattttcttcatgggcaagaacaaaaaaaaaaaatctcaggagtatgaaaatataattgtgtgttaatttttctgttttgaaaagatgtaacttaatcagatttgtgacgtctccctcagccaagcacaaaggaataaaatgaataaaaatcattactgaagtcccgaaatgaatgactgttttctcttatgttgcaattgtagtgatgtttaaataccaatctgaaatacccgagagaacttcaacttgtattagagggttatataggtgtgtatgtgtgtgtgtacctttaaaccggggggataaacttattctacctttcaaagaagataaggccgggcgtggttgctcatgtgtgtaatcccagcacccagactccatctcaaaacaaaacaaaacaaaacaaaaacaaaaacaaagaagaaggtaaaaacatattcctaatccatatgtaagaaacaaatcagcatgagagcatcgtaatctttctaaaacaatgtcaagctgtcatggagtgtatgctccctgaagctgtctttggattcagtttctttggttttggtcacaggctcagggccttctcctaacaaacacatggcccatgtttaagagctaacaagaccaacagacaggagcctgtgacattcctgttaacacacaaaaacaattcagatattcaggatccagtcacttgatgaaagggcaggtggtaaactgggggttaaccttcctataaagtatggccagtggcagtagagaatccagcagtttggaagcaaatgaatttaaaatactatctggaaagcaaatcaaatcaggaccattgagctgttctttcttgactctcattgacctactttcacggtttacagactgctgataatataaaggaaattaaatgcctgcagtgagaaggttcttgatctggcaaagacccctcagagtgctccaaacattttatttaatttccaaaatttcttgatctgttatgtcattaaataaagggggagaaacagctagtcagcatgcatcatgataaaagccacttgaagctcacttttctgtcccacccaggactaaaaaatgtcttgcctttccaagtggtgctgaagcgtaaagcatacagttatgactttcactgctaggttgagataactgaaatgcaagtgcatggaaaccgtaaaatggatgtgagcattttctaataatatcaatatgattgacagtgattttgattaaggagatgttggttagcatctcacagagatagattagaagatttatatagatgagctcacttcttctaggtcagtcagaatgagctctggtttagataataagctcttgccttgctgaaaggctttattatcatatgacctccttttgtatgcaaatctgcacaaggctgtacccacttagtgcttccatctggattataagaagacaccatggaaaatgggtcctgttcacttaaactgagttgtcaggttggtcttcgtagatccttatttgcccccaaaattcacataaagaaatttagctattcacagagcagcaggtatttaagccaataaaatagagcatgggaaatcacagtacagtttgacttaacatgtctttaaaatgctatttgagtactgacctctactgtggtttagcacactctggatcttctccgcaaacattctaccgaactacttatagtgatagacacatcactgcttaataaaatctaaagaattgatagatatgctgtgtgcaaaagttgagtgaggtgattcccactaactgcaaagcaactgcaaccattttaattgtacggcacacagaagataccctgctctgaaagtggaagtaaaggttcttcatttgttttcattatgaagtcatgcccttagtttaaaaatataatctaagtaattaaaaattaggcagctgtcattgaactggatgacgggttgctttgaaggcagaaagaccttttccattgttgaatccctgtgttcgcagagtgctgtatttcctgttttgaagtagaaagatactgagtagaaaaaaatgagtatgggccttgggcagtgcagaggctgcaagggtgctggggtcattggacaatgcaaagaatatctgaatatgtattccatatctttatatgttttagaacatttaaaatatatattatatggctttacattgttagggagctcattgagattggggagtagttggtaggagaccatccaaacacattctatcagaacttatataaaaccttttttagacatgaacatttgtgctaggtgattaattaatgtgtggagattaccaacaaattttaaaatatcaacttaaacattgagtatataatactcataaatcataaatatatgggttgatgaacttttatagtattagcatacatgtaactatcatcaggagagagacctttggcagacccccaagaaactcctttcatgaccctatctaaaccaaagataaacactgttctggcttttattagcataggttagttttacttgtttgtgaattttatataaatgagatcatacagtttatatttttacatgagcgattttttcctataaaatcatatttgtaaaatgcttccatattgtcacatgttgcaatagttttattgtcattaataatgacagatatttgttaggaacaatccccaatacgtatatgaatgaaattgcctccatagagcatgtgtgtgtttagcttttgtaaatactggtagtgttttggttaactaagacataattcacatactatcaaacttataattttttaaatgcaacaattcagtgatttttaccatattcataaagccatatgatgatttccactaactctagaacactttcattactttgaaaagaaaccctataccaattaacaatcattctccattgcgtccccccattgtcaaccattaatttactttctatctccatggatttgagtatcctggaaattccatataaataggttcatacaataacttccttttatctcaaattcttttcctgttttatcataaaagggtattgaattttgtcaaattctttttctgagtttaatgagatgtgtggtttttgcactttattccattaacatggtatagatgattggtagaatcaacaaataattaattttatatattaaactaactttgcattcctggaataaattacacttgagcatagtgcctacttctctttatatgggctggatttgatttacttgtattctgttgaggatttttaaacatctatttataagaaataatgttatatagttttctgtcatgtctttagttgtggtatcagggtgatactgaccttatgtaattagcttgggaattttttttctcttctactttttgaaatagtctagaagcattagtattaatccatttttaaatatttggtagaactcaccagtgaaaccatttggtagtgggcttttatttatgaaaaggttttttggcattgtttttattgtttttattattattattactaattcagtatctttatttgtggatctgtttagattttctttttctcatttggtcactttcagtattttctgtctttctaggaatttgtccgtgttatctaaatttcttaggattttggcatacgaatatttagactattaaaaaattttccatttctttaagattggtagaaatattttatttcttattttagtaattttaatattcttgttcccttttgttggtcattgtagctatgagtttgtagatttgattgaccttaaagaatcaagatttgattatgattattttctttattatttcttccctattttatttatttctgctcaaatcattatttttttattctgttttctttaggtttagtttgctttagtttttctaatttcttaatgtaaatggctaggttattgttctgacatctacctttttaaaaaataatacagatattacagctgtatcttctctttatgtacctttttagctgaataccatgttttgatatgttgtgtttttgttttcattcatctcaaagtattttttcattttccttttgatttcttctttgacccattggttatgaaatagtatgttgtttaatttctacacatttggaatttcccaaagattgcttctgtattgatttttaattttagtccattgtagtcaaagaacatactttgtatgatttcagtccttttcacttactgagtttttttgtttgcttgtttgtttgtttgttttttgatggagtgttgctctttcacccaggctggagtgcagtggcatgatctcggctcattgcaacccccacctctcacgttctagtgattctcctgcctcagccttccaagtagctgggaatacaggcatctgccaccatggccagctaatttttgcatttttggtagagagtgtttttcatcatatcgggcaggctggtcttgaactcctaacctaaaatggtctgctcaccttggtctcccaaagtgctagaattacaggcttgcgctactgcacccagctaataagtctttttatttgtttgtttgtttttttaatagccaaacacttgttctattctggagaattgcttctatatacatttgagaagaatgttcagtctgctctttttggatggagagttctaagtctctatagtctcttaggtctagttatcttgttgtattgttccaatctcctatatttttgttaatcttctagcatagttattctattaaatattgaatatagtgtattgaacttgttctattgttgaattgtctatttctccctttaatgctgtcagcatttgctttgtgtgttgtgtggctctgttcttaatttcatgtttttatgattagtctgtcttcctaaggaattgacccttctattgttataagatgtttttctttgtttttagtaacaatattttcttcaagtctattttgttatatattagtagagtcacctcagctctcttttggatactgatttcattgtatatctttttgcatcctctttttttttttttttttttttttgagatggagtctcactctgtcgcccaggctggagtgcagtggcgcaatcttggctcactgcaagctctgcctcccaggtttacaccattctcctgcctcagcctcccaagtagctgggactacaggcgcctgccaccacgcctggccaattttttgttttttagtagagacggggtttcaccatgttagccagggtggtcttgatctcctcacctcgtgatccacccgcctcggcctcccaaagtgctggtattacaggtgtgagccaccgcacccagctgcatccttttactttcaaactatttgtgactttgattctaaagtgtatattttatagacagcatacagttggataattaaaaaaaaatccagtctgccaatctatgaatttgttaaatggtagaattaattgataattatgtggtaattacattaaatgtaaatgagctaaataatctaattattgagatggtaaaattggtttccaccattttactatttgttttctatatttcctctatatttttcattcctctgttcttctattactgccatcttttgtgctaaataagtattttctaacataccactttaagtccttattgtgtttttttgctatatatatttttgagttattttcttagcagttttcctggggattgcaactaacatcttgagttaaaattctctaatttagattaataccaacttaatttcaatagtttataaaattgtgtttctacatagctcctctcccatttatgctattattattacaaattacatttttagagattgtgtgctcatcagcattgatttttaaattattctattatggaaatgcatttaactaaaacagaaaaaggaattacaagaaacacgtacatttatcttgtcatttatatttctttatatggtaatcttaaccagtgctttttgttttatttcattatgtggattcatgttactgttagtacttttcatttcagcttaaagacttcatttagtaattttgaggcagttccactgtcaacaaactctctcagtttttgttgagctgtgaatatcttaatctctcattaaattttaaaagatagtcatttcttctttatttcttctttactgtagaattctaggctagctttttttttttcttttaaccttttgacactttgtgtatgccatcctattgtgttctggcctctgtgatgtctgttaagaaagcagctattaaccttcctggagattctttttacactatgagtcacttctctcattgccatcatgattctccctttgtctgaagtctttgacagtttgattatgatttgtctaggtatagattattttgtatatattatacacataaggatctcattcctgaatatatacaacattattattttctttcaatctttataactttctttttcttgccttattgcactggccagcactggcattataatgttgaatagaagaggtggtaatggggaccttacttttgtttttgatatgaaagggaaaactttaaatattttatgattaacataggctgggtgcagtggctcatgtctgtaatcccagcactgtgggaggccgaggtggatggatcacttaaggttaggagttcaacagcagcctgcccaacgtggcaaaaccccatctctactaaaaataccaaaaaattagctgggcctggtggcacacgcatgtaatcccagctacttgggaggctgaggcatgagaatcatttgaatcctggaggcagaatttgcagtgagccgagaccgtgccaatgcattccagcctgggtgatggagtgaaactttgtctcaaataaaataaaatacatattttattattaacagaaatatatagcttttatggacttggcatacattttaaaatcagattaagaaagttcttttatattttcctttctagctcaatttttgacttttatttatttatttttataaagaatatatttagagacagggtcttgctctgtcacccaggctggagtacagcagcatgatcatagctcaccacagcctcaaacatctgggctcacataatctttctgcttcagccttctagtaggtgggactacatgcccagctatttttataagcaataattttaacattttactattttttctcaccttttctttatactcttagtatattatgtgacattaaataatttttaaattttatttaaaaaatattgaattcatggataaagttgacttggtcaaaatttaataccccttttatatatcacttgatttaattgggtaatagttactaaaattttgtggtgattattatatgaaattatcttgtgaattttacttattgtaacacatttgccaggtttaattgtcaaggaataatggcctcagtaagtaacttgaaaattgtttccagcctgttttccagaatagtgtatgatccatgtaatttttacatagatgtttcaaagaatgccctaatgaaagcatttgggtctaaatttatcaaaacaattttaattaatgattcaatttcgttttacatgtagaaatttttaggctttctatttcttccttttcttggtttattatgttttaagggatttttctattccatctaaattattccatttctatgcagaaatttggtgcataatatactaaaattttatttttaatatctatcttaagtgatgttagtattcctgatactggtattttgtatcaaattatattaatgtttctattcattactatgtttaaagtactctgttactgtcttaattttgcttattataactttccagttataaaatttttatttgattttttaaacagatttcaattttctagtataattcacctctttttcctcttttttgttcatttattaattaaactatgttaaagtctatgtctgataactccaatatctatatcacttgtgggtttatttttattttatttgttttttatcttatttatttatttttttaagtggtattcctggtgtattcattttctaggactactgtaaaaatataccactgtctgggtgcagtggctcatgcttgtaatcccagtgctctgggaggttaagatgggaggatcatttgaggctaggagtttgagaccagcctgggcaacatagcgagactccatctccacaaaacagaaacaaaacaaaacaaaacaacaacagcaacaacaaaacatttaattagccaggcctgatggtgcatatatgtagtctgagctacttgggaggctgaggtgggaggattgctggagcccaggagttcgaggctgcagtaagctatgattgtaccactgcactccaagctcagctacagagtgagactccatctcaaagcaacaacaacaagaacaacaacagaacacaaacttagtggcttaaaccaggaaaatttattctctcatggttctagaggcttgaactccgagatcaagctgttgccattagttccttctgattgctgtggggaagggatctgctacagccctgtctccttggcttataaaggaccatcttctctctgtgtgtttatatagtcttccctctatatatgtgtctgtgtccacattttcctttttttaaggacatcagtcataccagattaaagcccaccatagtagcctcatttggatttgattttctctgtgacattttatcttcaaataaggtcatattccaaggcatggggagttaggaccccaatattattattattattactattattttggatgggacacgattcaacccataacaactgataaattttgattaaatgaaaatatttagagtctctggatgattctgttttacttcaaagagaattctctttagctttgatatggaattagaatagataaaattatctcagaaaatgggatgatcttactaaatacgttttttaaagggcttgtctatttttacatttccggaggcttcactgttcaatggccctgactgaaagccacgttcatttgccagagtcccaacacctgaatgtctgcttaatgacagtttctgttatcccagctggttattccaggtttgttataaatttgataggtttagttactttttagattcttagatttgtgtcttgatttccctcttcaattatagacctgcattactcatacattaatgaacatctcaagcatgagacacctagagttacagggtttttcttactttcttccccctgggatattggcctctcaagtcctgtctgctctggtagccctgaatctcaatttttatctcttccaaagactaataacagctttgcttagctcctctgccttttagccatcactttctccacaacatcattacttcttcttcctcattttatatgtgtgactaatatttcgaggaaaaacaaacaaaacacatgtctcctctcagtgagtttcttctttttgggatttgaatctttaattcctagtctttaaatagatttttctgcattttatccagctgttccattgttttatgggctattgaaaacaactcccattttagcatcaattttgataataaagcaaaaggataatatagcacatggatggtatatttgaagccacaggtaatatatacattaacatttataaatattcccctatccagaaaatacttgaaacttgagtttccagtagacattttttttttgcataacacatgtaaacattttatggtacatacttagacttaacatttattcattgtctatctgaactataaacttaagtggatattttgtatttttttctggcaatcttgctctctttagaagaatgcataaacaataatacaccagaataattatggtacaaaagctgattggagcactatggaaagattctaactaaaaattatacatggatatttttattatttaaatataagggaatggttttttaaaagttgatactctaaagacttaaaggttaaaattttatgacataagtgtggaaactttcatgataaatgtgctagctgaatttgaaagataggagaatatggatgtaatagaaactaatgtaaaggaaattaagtacccagtagatcttaaattctgttttctcttatatttatcacatacaacagaattaaaagtgcggaatattaaattagcgctgccagtgataaacttgagaaattgttctactgtgtagattagaagccattgacatgatgagtaagagaatggtatacaatgtagaggatggagagatacatttaaaatttatagcttttcctgtgggtcagagatgtggaacatgaaaaaatgaaacaaaaactctactgaaaaaggtactgagttgtggcttttggtacaacatttaaagagcttgcaagttgtcactttcattttcacaacaggaaaataccttaaaaactaaaaattatcaactcttcttagatccctcagagatttgaggtcagaaagcaaactgctaccccagtactagagagacagtcaggggaccccctacacccatgggttcatatccatggattcaactaactgtgccacaaaatattcagaaaaaaagggatgattctgccggtactgaacatgtacagacttttcctgttgttagtattccctaaaaaatacagcataaccaccgtttatatagcatttacattgcattaggtattataagtcatctagaaatgatttaaagtatttgggaagatgtatgtaggttataagcaaattctacagtattttatataaaggacttgagcatctgtggatttttagtatccaaagggagtcctagacccaccccccatggatatagaaaaacgactgtactagaaggaagcccaggactgtgaatcaggagacccagaagcagaagtcaccatatgaggccaggatcagtaggaacacatccgctataatcaaaaagtgatgtaggctcagtgtggactaacttgaaagtagccttgggggctcctcactgatgagtattacctacaggaaccctaccagattctccatgtgaagacaggggaaaaatcctttcgtgctttcagcaggagttaattatatagaagtatgcccagacctctgtaagcattagaaagaccagcccaaaggggaaactgcttttccagagcctaactgacctgggaaaagggaaatgcccagctcaggctctagaagactgagacatgattgtgggaatatagaactcttcccctcaaccaactcctcaccaccacatcagtggtgctcctgtgtaataaccagggactaagagaactacaagcctcagactctatttaagatggaatctctaggcaaacccaaagacaactgggtataaacagaaggacactagaactaacaccactgagacagccaccagtaagcacaatataacttctagtcagataaactcaaacctcacactaaaagcccaaataacagcttaacaataaagaaatagacatcatccaaactatgctgtcaaaccacaatggaattaaactagaaataaaaaatagaaggatagctttagaaatccccaaatatttggacattaaataacctatttctgggtaacacacacgttaaaggaatcagaaaagaaattacaaaaattaagcttcaatgaaaatgaaatttaaacctatcacagtttgtggaatacagcaaaagttgtgcttaaaggaaaattcatggaatttgatgcatctgttagaaaagattagagacctaaaatagataatctaagcttatatgttactaaactagagggagaggagcaaattaaattgaaagtaagtagaagaaaagaaatgataaaaattagtggagaaatcaataaaattataaaaaggaaaataataaagaaaaatcaatgaaactaaaagctgaaatcaatgaattaaaagatgaaataaataaaattgataaactcctagtgagattatccatgaaaaaaagaaaatacaaattactaatatcaaaaaccaaagatgttatccttactactctcatgaacattaaaatattaataaggaaatattttgagcaactctatgcccacatctttgataacttacttgaaatgggccaattccctgaagacacaatttacccaaacacatacaaggagaaatagacaatccaaataggtatatatcattgaaagaaattgaatcaataactaatgaccataaaagcaaaagcactagacttaggtgatctcactggtgaattctaccatttaagaaagaaatgatatcaatttactgcaatgtcttttagaaaatagatacagaacaattatggttaactgtttttatgaggccagcattatcataatactgaaaccagacaagggcattacaagaaaggaaaactatagcctagtatctcttatgaatatacatgcaaaaattttcaacaaagtatcaaattgagtctaacaatgtacgaaaagaattatatactatgacaaagaaggacttattccagataggcaaggttcgttcaatttttgaaaatcaattaatataatccattacaacaatagaataaaaggaaaagatggtttgatcctattaacagatgcataacaacatttttcacaaaagccaacacttattcatgatactaactctcagcaaactaggaacagaaaggacattcctcaacttgataaagaacactgtaataaaccttcaagtgatatactaaatcatgagaagctagctacctttctcctaagtttgggaacaagatgtcctctctctccattcttacctcaatactctgccagcaagcagtcctacgtaatgcaataagagcagaaaagggagttaaaatcacacagattgtgaaggaataaataaaactgttattgcttatagatgacatgattatatatgtagaaactcccaaagaattgtcaaaaaaatactcctagaactaatagccatttatatcaaggtttcaggatacaacgttaatatagaaaagtcatgtttccctatatatctacaatgaataattggaatttgaaattttaaaaacatatcatttacattaacaatccccaaaatgaaatacttagctataaatctaacaaattatgtgaggaaaactacaaaatcctaatgaaataaatagaaaaagctctaaataaatagatattccatgttttggggtagaaaaacttaacatcaacaagatattggttcttcccaacctgaatgttaggtttaacacaaccccaatcaaaatcccagtgttactttgtggatattaacaaactgattttcaagtttatgtggaaagacaaaagatccatgataggcaacacagtatggaagaacaaagtctgaagactgacattacctgactttaagatttactataaaagcacagtaattcccagagatagccccacatcaatacagtcaactgatatatgacaaaagaacaaaggcaaccatgtgggcaaataatcatctttgcaacaaatggtgccagaacaaatggacatccacatgccagacaatgaatctgggcacttaacttatacctgtgacaaaaattaactccaagtggatctatgacctgattgtaaaatacaaattataaaagttctagaaaataacataggataaaatctaggtgaccttggatgtgacaatgcctttttagagacaatatcaaaagcatgatccataaaagaaaatgttggtaagtttgacttcattaaagtacatttctgctcctgcaaaagacactgttaagacattaaaaagtcaatccatagactgggaaaaaattttgcagacccatgtctcataaaagacttgtatatgaaatacataaagaatccttaaaattaaacaataagaaaacacagagttaaaacatgggtgaaagatatgaacagatgtatcaccaaagaagacagatgcaaataagttcataagatgctcaacatcatatgtcattggaaaattgcaaataaaagcaacaatgcaatgcatctatatagctaatagaatgagtaaaatacaaaacactgacaataccaaatgttgacaacagtgtagagcaataggaactctcatttgctgctgatgggaattcaaaatggtacaaccactttggcagacagtttggcagaatcttataaaactaaatatagtcttcccacctgattcagcaatacatattaataaaaaaacagtttgattatgtatgtagacacaggagtttcacacaaaaaataagactcaaggagctgcccagatgattgaggcttatgtaccatataaggctaaacaaagcaaaagggatttggggattctgggcaggggaggccagctatgggaaggtgaggggaggaaatgtatggtggactagggttgtctcattatgcagataagagtctctccagttcagagttttctgggaaagtagctctctttctggtagggagacatctttacaaatgaaaatttcctttgtaaatgtgaatttccttttcaaaagaagacatttatactgaatttttaggcagttaaggagagataaagagcttttcctttgtcctctggttctcagttgcctttagctcaaaataatccatatgccaaagaggcctattttggggtgacttcttgtattcttcacgtctcatgaaatgaacctattattgtgaaatgaactaattgttttaaataaactgcagtggacttgttattgatgagccacattttaaaaatgggttggtgccagtttgggaaactgctgttctcagcctgtgctgcttctctctgcagagacgccgtggacctgtcttctgctggcacggcaggcgtgctcattggctactgtccccagcaggatgccctggacgagcttctgactggttgggaacatctctattattactgtagcttacgcgggattccaaggcagtgcatccctgaggtaaatctccctggggtcttctagataaagggacccattgaggaatgcttggtgaccacctctggctccaaggcagctctctcaccctatgaggagaaggaactgtagtatcagataaacttacctgcaagagattttctaatatgattatactgaagaaaacattaaatatatttcccttattttacattatatatttaaaaggtatctgtgtgaggcagtcatgtggtcggagttaaagcataaatacatcatttataactttgtatcccccttgctcttttcttcctctctaaatgccttttacatttattgaactacaaacttgtattcaggaagaaatatcacaaactctgtattttcagggcttgtgaaagtgtgggcacaaattatgtgtggaatctgggggactgctggaaggaatgacttcctgatgagtgggcggacagattcctcctgccaggggattccttctgccaggggattcctttctgggtggtcttaggggaatgaaggagtggcagaaactgagacccccacctccatcactgcctgtgacaggagagaggcaggtggagcagtgagagagcaaaagacagctgccacttcttctgtgtgagtagaggtcagcgaagcagagcggacagccttgattgacagctcaggatgttgtaccgtgagccaccaaaattgcagttacttaagcacatttttaccttttctgcacctcattatagaaagtctggggtgcgtgctcctcagatttctggattctgaactagaagcagaaataagtggcttatattatgcgtttgcaattagattctgcgggagagggaaaattctaggactcacaggagacaaaactaatagccttcgccttcactggtccatgaacgttcattctctgttctgtttttataatgcttcagcatttgtttcttatttatgctttctaactttaagtgaaactaaacagaatgtctgcacctcattgtaaggactctggccccttttcccatctcccgtcttaataaagcaaagataactgaccaccccacagagacctgctggttgtagttaaacagttattggcatccgtggctaattgttggatcaatttttaatcggtgtttatctctgtcagctcctctttgttagtttttgatgaaagaggcgggtgcttggcaaaggctttaagctggcacttttgtttttcgagggaaacatgcttatgaaaaagctctcgttaatgtaggtcggtgctttctgtcattcagggcaattgtgtcttgatattcatctgtcttacaactttgtttttctgaattgttctaccaataaaagttatttaaatggtaaccaattaggaactgccttcatttcctttataaaactgtaactgattttgcagacagtattgctacttgctcttgtttctaagatgtctgcacacttttgcatctgtttccaaaggagttagctccttttctggaaacaaattttcttttctatatattttgggaatatttaagttatagaacaggcatatccattttgaggtgcttatcacaagatgtccagaaagaattattataaaataatggaaaataaagttttatctttcagtatttattccacatcaggtactgttctaagtattttacagcaaccatatgaagtagatgcttattcccattttacaaactgagaaattagacacagtttaattgagacacagagacacaggaaaactgagacaccagagaaattaggccacttgcccatgttcacatggctagtatttggcaaggttttactttgaaaccatataaaccagctccagggtacaagttcttgactaagacattactctgacacttagtttattcaggctgttagttgtataagatggaatttctggtggtattaacagttcagtcttatttttataaccctgggatggccaaagaagtggaaactgtgtggggttagtgcatgacttctctaacatggggctcctcctgctgcctggctttccattggtctggagttggactcaacatgtgtgcctcacctccaggctttcagaactcatagatatgggggtaatctttagacacatctgctgctcaccttagttgttttcttcaggctgccatctattttcattgtaacatggagagccaccattgtaagctctatgattctagtgcaagaccctctgtgcttgcggggaggctcctttgttcagccttacagtcccctctcctccctcccggggaccctcagagcccatgccatggctgagccagtccacctgtgctccacttgctggtcatttctaagtatggtcaaattgctcacttcctcaacctttcaaaagtttgatgaggtaagaataagatgccacttcataaagcttgaacttaggtttgacaagttaacaatgatttccaaatttcccatgatttacactgcacaaaactgtgcagtgtacatatttgagcctcaatttaattaaccttgtaaagcatgttatattaagttatatcacttggttattaccaaatgatgcaagagatgagggctacatagtctgggatgctagagaaaatgtgtcagagttcatcatgctaggtagtttcaatgttagtgtcataccataacaaacaaccagtacttctaaatgggaagagatttggcaaattctgtgttttagttttccctggtatagaagaggtatggcccctcatcatcttagttttgttaatacctgcacattcctaccagggactgtccctactgtgtcttgcttccccttatcttctgtaaagacatgacttttatatttaagttttcttccattcacacagtcagtttagctagaaggagctagaatttataagatagtaggaatggggacaggaggtcatcttcagaggaagggccaggataaacatttccatctgaaatccttggttccctttccctactttacgactcattttggtctttaatctcacagaaatgttgacctggccattatgtgtgctagtggaaacactttggctttggagtctgatagatgtatgtgtgaatctcagggcaatttattttggctccagtgatgtttatggaagtcctactatgtgccaaacatgaataaacactggggatttccatcccagtgcatatcccattgagattcatcccaaaaccaatgcatccgcaaacgaaagcatcccaaaacaaatgcatcccagtaacttgcctgaagtatggtacaatttctagagcttcatgagagaaaaataccaaacctcagagagagattctgtgaacttttgacattttgggattttaggcagtattttgccaactgagattgctaaggcattgcttttgccattactttgacagtattgctgagtgcagaaaagactacagcaaaatacttcttattaggctattttcagttattttctgacaacatgacattcagaaaacattggatcaaactaatacatttgttcctgtatactctggaatctttcctatggttaaccaatccagaatttgcaggctgcaatatttaaccttttgtgaaattgggaaaacatgacatatgtttcctaacttcataaaaatatgcaataataatttggcaagtttattcaaaatgtaacttgcattctcaggtgcatttctccagaaccaggtacatatattattatttttatttcatttgtcagtttatcagttttcttttatgtatggctaatctttgaataacatggatgagagtaactaaacatttctttctaatacatgcacacatacacacattttcattctctttttcttgtaatatttatagatctaaaaataaccaaaacaatcattatcacaatttgtcatttttgccagcctcaccactgttagtacagcaggtccccaaataacattgtttagttcaacattgtttcattacaatgatgagaaaagtaaaattgattttctgccaggaccactgtcggagaggagtttgcacgctctctccatggctgcatacattttctccaggtacacttgttttctgtcatgtcccaaagctgtgtacattagtttctttggtgtgtctatattgagcccatgtgggtgagtatatgtgggcgtgtgagtgtaccctcgatggaatggcatgctgtccagggctggttcctgccttgtgcactgagcttccaggatgggctctgaccaccctcaaccctgaactggaataattgggtaaatcatgtttttgttaatctttcacaaatatatgtgtagctcacatttatttcagtgtttgctattagaagtttttttttatttagaagtttggagatgtttttgtgaccagacatatgacataggaacttttatttctaccaatcagcttatggtaaaattggtttcattaaatgttgattcggttaaagcggtctccaagaacatatagatgacattaagtaaggacttttttccgacagataaagctttctaacagggtctatcatgctcttagttttcttctcttttatggggacatctgcctccttttccaggaagcctccctggtttccttccttcatctctcatatgagtgtttatctagcactgatttacacttcttggccattcttctgtgagaaaaatttggacgaagctacatgactacttctgctatctctttaattcctgaaatgccaggcatttatatttcttcatttataagacccttcctttaatatttgtgtttgtttgcttgtgatgaataaaacgttttgttttgatattttaaaattcacttaagtgaatttttattcaacttgtgataattaaaatagttgttctgaatggagccaggaaaaaggatgattcatataaaacattctggggaaaatgactttactttcaataagaccaactactggccttgagaagattttcttaggcagatagcaggagattaaatatttcatctttatatatcttttaggccttgaaatctgcatttcctagaattatactattttaccataagaccagtccttgagcctcttcattcatttgcaacatattttgaagttgcacaagtaaagccatataataatttctgttgaaagattttactggggggcataatgattatcctaatatttgtagaggttcttaatgcttcattatcattattgttattatcctaacttttatgtacttgtcaaaaagagtatacacattagtttatatttattcagttatttgggatgcacaattattaaccaatctttttagtcctatagaatttttccctcttctcctaaatttgaattaaaatatgatcttggtcaatttggctatatgattatatctaaaaaatgaatctatattaatacttctatggtcataagagttaaataaaattgtttggaaaatttttaaattatgctaagttggaaacaaaaaaattgcttaccttggaccccaggaagaattaatccagcataggagatagaactggaaacagaaaatatagtgtggtacaaattacagtgggaaatgctaaataaaagtgttctatagacacatataatacacagaagaggtgacacatatatcacacagaagaagtgacaattattttttctgatgagagatatgggctgggccttctaggatgtgggacaagctggcagggtggaaggcagggaagaagaaagaagctgtgaaccgcaggctcttgggtacagtctgaactctcctgtggctggaggggtgaggtttgacaaatgctgccaccatccttgggtcttggcaaagtggttttcagcagttgcaaataagaaatatttcccattctcctccccatctctagttactttataaaccaaactctgagtttgcaaacattaacagtggcttctcaatgtcaaagggatatttctttccttgtgttaatattgaaaattccctccagccataaaaatgaacaaaatcacatcctttgcagcagcatggatgcagctggaggcatcatcctaagcaaattaacacaggaacacaaaaccaaataccgtgtgttctcgtttataggggggagcttaacattgggtacacatgggcacaaacatggcagcagtagacacgtgggaatccaaaagtgcggagggagggcgtgtgacaaggggtgaagaactacctgttgggttccatgctcactacttgggtgggatcattagaagcccaaacctcagtgtcacacaatatacccatgtagcaaacctgcacatagactccctgaatctaaaataataaagaaaattttctgcttcggttgtcttctccctttaagttttgacaccgctattagtttcattcccatttgtttccttctcagttttctttttggcatacccttctctgctcacctcaacatgcttatttatctggacccccaaccttgagtgtgtttcttgcccacccttctccctgaactctagatgtgattattctgaccatcacttagatgtctccagctgcagaaaactcccacctgttcactctcaattactgcctgtatggtaaagggggatgtttcaggagatgtacttgattgtatgtgtgaaggtcggcagggttagtgggaggtagaagcaggaatgaggactgagaccagctgtctggtgggcactttggtgaatgctggtgtgcacatggacatgcctctcttccaggttgctggagacctcatcaggcgcttacacctcgaagcccacgcggacaaacctgtggccacctacagtgggggaaccaagcggaaactctctacagccctggccctggtggggaaacctgacattcttttattggtgagtagaagaatgtcaatatcttggagtaagatacatattgcatattgatttataaactgattttaagggtttttctgggaagtaacttcagaacttgcaaagctggttctacaaactagtaaactgttttgccataagccagcatttcccaaatgtcatttgtattttacagaaataaaacatttattttttgctagattcacttatatttgtcaagctgaaaattctataaaattttaacattaaaacagtgttttaaaagattattagaattcatctgtaatctgaaaaccaattatgttttcctctagaatattgcttttatgtctttttctgtgtgtagatgtatgtttatcacagcagtagtgacacctgtcatggtgaatcttaaagatgggtgttgagagtgaaggatggatatgatgttgagagtagggaagaaaactccagcaagagggtagagtatatgcaatggtcttgagacagggtggtctataatcaatctgggaactgcagttaatttgatttgaatgaatcaaagcattaattggaggcaacaattgtcaagaaatggagttaattatcttgcatttcataaaacagctataactgttaatacaagtaatgccattgaaagaataaataaaggctattgttacatgccataaattggattctaatcagtagagtgcatctttggacttcacaccagtagagagtctgaggggtgtcaaaaagtgtggaaaacaaaacagattcctttttttctatctttcttcatcaaatgaatacacccttttagtggggtagtaaatggggattgagaaggtctgtgtgggaaaatggtctcatcgtttgctggttgtctcctggaaactcacctgaatattctttttaggtaccataaatttgcttttgcaatgtccaaattcctagactattgtatagtttcatattccagaatctgataataaaaactaccatttgcacaatcctgaagtttacaaattacattttattttcaacatgaggcaggattatgttgagtagttaacaagacgtgggcattcattactttctgtggaatttccctttgcccagcctcttacaatgcatctccttagttgaatgaaggggcctctgctctgtagccatgacctgctcactgcagaccctgacatgcttttctttgatacatccttgctctcagctttccttggatgcccaaacctgtgacagagtggtcaaggtggggactctggagtctgactgacaagctttgaattttgcttctgcagctgcccaacacttggccttgtatgttctatgcctgtttccttctcatctgaaaattttcctgataatagtgtctgtctcatggagtcattgaaagcagtaaataaaataaactacattaagcatatagcccagtgtctagcagatggtaaaccacagtaaatattcgtgactatgatgatggttactgttcagagcaataggttaaagagatttgttgccaggcctttggagttctcaacagagagactagaagtgattctcagagctgacatcaaggagggaatcaggaaaacgtaaattacacatacaactctcataatgagcattgcatgatcacaccttttatttacttatttttataactaatacacatatattgcttgatttgcagaaaagactagatatttattttcctgttcagtgcttctccccctacacttactgcttcccatctgtttctttctttatggaagtttatgaacctaagctcttaagaaatatgtgtttagtactccctggctaataaaagcacagaaatacatcttacagtttggcgagatttctctagaagtggttcatataaggaatactttggtgtctattgaaggagaaagcttcaagttctaagaaatattaatttatttgatgttgctaaataaatgaagcctttttctgctatcatatgtcttcctaggggatatcattccgaaattttatggaggttgaaaattcattttagaaacatcagggttggcttacctagccagatcatggaggagaaccaacctgacatgaaaatatagcccaattcccctcctctcagttttatggaagtataattaactgataaaaatggtatctatttaatgaattcaacatgtgttttgatatacataaatattctgatgtgttgactacaatcaaactaataaacatattgatgacatcacataattgccattttttcccctgtatgtgatgagaacacttaatatctaccctcttagcaaatttcaaatatgtaatacagcatcgttatctacagtccctctcttagttcactgtgctgctataacagactggataatttataaagaacagagaacagaaattcaggttttggagtctgggaagtccaagatcaaggcactgccaggtccaggtgtctgctgagggtgccaaccctgcttcctgaaacctgtgccctccagaggggaggaataggtgtcatcacaaggcaaaagtcagaagggcaaaaagaggtgaatgtccttcatcaggtccttttataaggtcacttaatcttataaactcattcacctcccaaaggtcacacctctcaatactgtttcattagggattgagttttaacatgaattctgtaggggacaaaacatccaaactatagcagccctatatcctgtatattaggtctccagaacttgtttgtcctgtataactgaaattttctgccctttgacaagtatctccccatttccacagcctggcacctttctactctctcttcctatgtgttcaactttttaatatttcactaagaagtagtgtttttccatgcatggcttatttcactttatgcttggcataaagtcctccagattcacttatgttgttgaaaatggaaggatttccttatttttcaggcagaataatatttcattacacacacacacacacacacagtgagagagaggagagagagagagacaaggaaacagggagagagagagaaagagagagagagagacatacacattttcttttcccatttatacacttagggatgcttaggttgtttctatatcttggcttctgtaaataatgttgtcatgaatatagcactgcaaatatcccttccagatattgattttatttcctttggatacacacacagaagtgagattactggatcagtggcagtagtatttttaatttgtagaggaacctccacactgttttccataatatgtgtacatttacatttccaccaattgtgtataagggttcacttttctccgaatccttgccattgctggttatcttctgtccttttaacaatagccattctaacaagtataagatgatatctcattgtggttttcatttgcatttccctgattattaataatgtcgaacatcttttcatatacctattggccatttgcatgtcttcttttgagaaaagtctgttcaagttttttgtctatttttaattattattatttgctatttagttttacgactttcatatataggatgtaaccccttattggatatatggttgcaaatattttatcccccgctgtagtttgtctgctttgttgatattttcctttcttgtgcagaaactcttttcgtttgaaatagtcccactttatgtttgcttctattttatgtgcttttggtgtcatatccaaaaaagaaacaagcaaaacattgccaagaccaatgtcaaggagctcttctttttttttttctacaagtttcatggtttctcatcttatgtttaaatctttaatacatgttcagttgatttttgtgtatggtgtaagataaggaccgagttttaattttttgtatgtagatattcagttttcccaaagccatatattgaagagactgtccttttcccagttttaatttcagtgtatttgtcaaagattaattgactatatgtgtgtgggtttatttctgtactgtctattcttttctatgaatctatacatctgtttttatacaagtaccatactttttaaattataatagcatagtagtatattttgaaaataggaaatgtgaggcctccagcaccattcttcttgcttactttctttagctatttgtggtcttttgggttttttaaatataaatttcagtattttggttttctatttcagtgaaaaaatgacaatggaattgtaggaatagcactgagtctgtagatcgctttgggtaatatggacatttaaaaatattaattctttcaatccatgtacatggatagctctccatttatttgtcttcaatttctttaatcaaaatgttatagttttcagtatacagatctttcacttcctttgttaaaattatgcctaagtattttattcattttgatcttattgtaaatgaaattgtctaaaatttccttttctgataacccattgttattttatggaagcactattgatatttgtatgttgattttgtatcatatgactttattgcatttgtttattaattctaatggattctttggtggagtctatagtgttttctgtatgttagatcatgcttttgaaaagatgattttacttcttttttgatttggatgccttttctttgtcttgactaattgctctggttaggacttctagtattatgttgaatagaagtggctagagtgggcatccttgtcttgttcttcttagatttgaagtttttagcttttcactgttgaatatgatgttagttgtgggcttatgatatatggccttttattcttttctatttctgctaactttgggattagttcatttctttatccagtttcttcaattgcaaaggtaagatatttatttgaaatctttctttttttcttaatgttgatgacttcttcctcaaatctgcttttacttcatcccataagttttgttttgtttccattttcatttgtctcaagatacatgtattttttaaaattttctttttaatttcatttttgacccattggttgttcaggaacatattgttaatttacacatatttgtgaattttacagttttcctccttattaatttctagtatcataccatggtggtctgaaatgatactggatatgatttcaatttttttaaaattgtttagacttgttttgtggcctaatatatggtctctcctggagagtattttatgtgttctggagaagaatgtgtattctgctattgttggatggaatgttctgtgtatggctgttaggtccatttggtctaaagggtagttcaagtacattgtttccttattgattttctgactggttattcaatgtatcattgaaagtggagccttgaactcccctattattattgtacttatgtcttttactcctttcagttttgttaatatttgcattacatatatagtactctaatgtttagtgcatatctatttacaattactcttttatcattttatataaattgaccattttatcattgtatttttctctttttacagtttttgacttaaagcatattttgtgtgacataaatatagataaacatgccctctgggtcatcatttgcttggagtatctttacctattgtttcacactcagtctatgtgtatccaaaaaaactgtactaagtctcttgcaaacagcataagattggatcttggtttttatccattcattcactttatgccttttgattggcaaatgctgtctatttacatttaatgtaattattaataggtaggatcatattcttgacattttgttaattgttttctggctatttttaaagttatttattcttttttttcctctattactgcttttcttttaatttgataatttttttttgtgttggtatgttggtatgctttgattcatttctgtttttttttcttttgtgtgtgtgtgtgtgtgtatgtgtgtgtgtgtgcatcttctataggttttttatttgtggttaccaagaatctatataaaacatcttatagttacaaaagtctatttttaacctgatagtaactgaacttatatcacattaaaaaaaaactacacttttgcttccaaccatctcattttatgttttagatgtcacaatttgcagctctttatattgtatttccattaaaaaattattatagctatagttatttttaatactttgtgttttaatctgaatattaccattataagtgatttatacaccaacattaaagcattaaagtatgctgaatgtggctgtatacttaactttactgtgagttttataatttcatgttgctaattagaatccttttattttgttttgaagaacccctttagcattttttttttataagacaggtattgtgtcaatgaactctttcagcttttgtttgggagcatttttttttttataagacaggtattgtgtcaatgaactctttcagcttttgtttgggaaattctttatctcttttttatctctgaagggcagctttgctgggtaaagtaggtaaagtatttttatttggcaggttttttttctttcataggcccactctttcccagtcctgaagatttcttctgaaaaatccactgatagccttgtggatgtatgtcatgagccttttttttcctcttgttgctgtgaaaattctgtttttcatttttgacagtttgattattgcgtatctcagtgaataatttgttgggttgaagctatttgggaacttttaagcttcatatatcttgatgttcaaatgtctatctctttatccaaatttgggaatgtttcagccattatttatttaataagcattctgctgcccctttttctcaccttttttattttgtaaatctcatattgtaaaagttaggtctctggataatgtgccataaaccctgtcaggctttctttgttcttcttaattcttttttacttttttaaaattttccttgactggataatttcaaataatctgccctcaagttcacagattttttttatctgcttgatcaaatgtgcttttctctattatattttttatttcattttatttttctgcgccagtatttctatttggttctttttttttataattttgatctgttttttgaatttctctggatgaggtgagaaagaagtggggctcctgggtagcatgctgcatggctggaggagtcaggccctcactcattgctctctcacattcccctatcattctggctttgttgagcagagtgcaacaaagccaattggagaggtgtcttttagagccagagcagagatttttctttcacctggggtctggcctcccatgtcattgtgtatatttctatttgtgtttttcaaatgctgattactctgtgttgcctttccttcaggatgagcccagctctgggatggatccctgctctaagcggtacctgtggcaaacaataatgaaggaggttcgggaaggctgtgctgcggtgctgacctcccacaggtgagttccagtttctcttgtagccatttcctgataagactgagtaacaaaggttaagaagtgcatttaggtacctgcacagtgttacacatggacatttcttaatctttacaacacaataatggtgatattattgttagccctcattgtataaattgagactgaagccatgagggattacgttatataaccaagtttacatagcaaataggtggcagagctagaatttgaacctagtgttctgtgtccaaagatgatattcttgcctcatccattgctactgttcaaggatgagtgctagactaccattttcaggtcttcctgagggatctttcagatcctttccatccaaggcctattatttcagcaggtagaattagctgaactaaaatacttaacaggttactgaatctggtttaacattttctttatcacagaattaagtttgtaattagatttcaaaaccattggcttctttttaactttctaatacactgttctagcccacaaagaattacaaatatagatttcataaaacctacttatggggagtgagcaatatgatttaactaatacaaattctaatgatgtaataaagaccaggctttaatgtttagacttgttttgtctttatgtttaagtaaaatatactgtgaataagatgtcaagagctgccaaagatctcacattttgcccttttgcaagctaacaaatttagcttgatacagttttatggatgttgacagaagaaatgagacttctgggtcggagatgaaagactttattgctcacagcaagaacagtagccagagtgtcagcatggtttctcattggttccctaaaccccagtttctattggactaatggatgcctgcacacagaggagaggaatgccaaatctggtgaaattactaccttataacatctgataaggaagccagcccttcgtttgggaggaggtgtcgcttcttccatggttgtttgctactagcataactttgagaaatggcccagttaaagagcagttagggccttatattcttggaattcatggcaagacacgtaggaacacaagggacccatggaaacatgcttcccaacagtctaaatcattcagtctatgcttgagtaccccagctcttgttaccaggagtgaaatataaagctagccctatcatttgaaacgtgagatttctgagaggacctcaggagactttactgattactgcagcattattagtttacgtaaaaatactattaaatgctataactcagcatgcataatcctattacacataaatcttacagccatttcctgtaacaagtgttactggctgcaaagccaatgtattgtgaagaactcagccattcacacatttctcacattgcttcatgtcaaagtagacttttcttaattttctatctctgggctctttcttttttaaaaaaattcattcactgataggtttgtctatactgcttaacattccccaattttcactgccagactaaactttacactgttgtttttttaaatgccattttctgaagtataatttacatttgatataacttaaccactgtaagtatggaattctatgattctttagtaaatttatagacttgtgcaaatattaccataaataagccttagaatatttgggtcacctcccccaaattttctcatgcttactttcagttaaattagcatttgaggctaggtgccgtggctcatgcctgtaatcccagcacgttgggaggccaaggcgggcggatcacgaggtcaggagatcaagaccatggagaaaccacatctctactaaaaatacaaaaaattagccaggcgtggtggcgggcgcctgtagtcccagctactcaagaggctgaggcaggagaatgtcatgagaccgggaggtggagcttgcagtgagccaagatcgggccactgcactccagcctgggcgtcagagcaagactccgtctcaaaaacaacaaccacaacaaaaaaattagcattcaaaacctccacctaggaaaacattgatggctttctgcctctgtaaatttgctttatatggatatttcattaactgaatcatataatcagtagtctgctgcatctcttttttttatttatcataacactttttttttttgagacagagtcttgctcagtcacccaggctggagtgcagtggcacgatcttggctcactgcaagctccgcctcctgggttcacgccattctcctgcctcagcctcccgggtagctgggactacaggcacctgccaccaagcctggctaattttttgtattttagtagagacggggtttcaccgtgttagccaggatggtctcgatctcctgaccttgtgatccgcccgcctgggcctcccaaagtgctgggattacaggcgtgagccaccatgcccggcctatggcaacacttttaaaggctatccattgcgttttatgtcaataggttgctccttttcattccaaacggtatcccattttatagctataccacttttatttatccattcaccagttgataagcatttgggttgtttccagtgttttgctattatgaataatatgttatgaacagtcatataaatgtctttgtatgtatagacatgttttaatttttttagatttttctgagtcaagttgctagattgaatagtaagttgtatttgagactttaagaaactgcagagttatttcccaaattggccttatcagtatatgttcccagcaacaatgatgagtctcctttattccacatccttgtcactactgtctgtcttttttcattataggcatcctagtgaagtggggttttaattcacattttcctaaggactaacgctgttagaatcttttcatgtgcctattggttatttgtattacttctttagtgaaatttttattccaatatctcctccatcctccattttttaaaaatggcttgatactttagaatagttttaggttcactgaaaaattgagaggaaggtacagaaattttttaaatccctccttgccttcacacatgcatatccttccctattatcagcatacattaccagagtgatacatttattaaaattgatgagcctacattgacagcacattaccaccccaatccaatttacatagggttctctcttgatgttggacattttatgggtttggacaaatatctaataagaatccaccattatagtatcagatagaattgtttctctgccctaaaaattttctgtgttccacctattcatctctccctcctgcctaacccctggtaaccactcatctttttactgtctccatagttttaccttttccacaatgccatatagttggaatcatatagtatgtagtcttttcaggttgacttttttcatttagtttctcccatgtcttctcatggcttgatagctcatttcatttcagtcctgagtcatattccactatctggatgtactacagcttatttatccactcatccgctgaaccacatcttggttgcttccaagttttgacaattttgaataaagctgcttaaggatccgtgtgcagttttttgtgtgaacatattttcaactcctttgggtaaataccaaggaatgtgattgctggatcggatggtaagagtatgttaatttttgtaaggatcctttatatttgaattgttttttatctattatttttgaattgtaatagttctttttatgtagcagatattcctatattctgaatagaagtcccttgctggataaatgatttgcaaatatgtatttccagtctatggctgtctttccattttattaataatgtctttcgaagtgcaaacattttaaattttgattacattcagtttatcaatttatttttatatggtttgtgcttttggtgtctcatctaagaactatttgttcaaatgaagtcctaaagattttcttctatcttttttttctaaaaattttagaattttggctcttatatttaagtctttgatctatttcaagctaagttttgtgtatagtatgagaaaaggatataaattcacttttatgcatgttaatatccaattatttcagcactcttccttgaaaagattatcttttatcccactgaattgtcatagcacctttattatattatttattgtatgatttatttttggactctcaattattatccattgatatgtatgcttattttctcacccaataatatcatgttgattatggttgttttctattaagttttgaaaacagtaagtgttattccttcagctttttccttctattataaaatttttcattatcttgaaatatttttcaatttctcttgtgattacttctttgacccttagtttatttagaagtgtcattcaattttcagatactgggagatttttaagagatttttttttctgttattcatctctgatttaatttggttgtcattagataaaataagttgtatgatttccatcattttaaatttgttatgactttttaatggcctaccagaggggttacagttttttttttataaaacaccatattttaattgttttttatctattatttttgaattgtaatagttctttttatgtagcagatattcctatattctgaatagaagtcccttgctggataaatgatttgcaaatatgtatttccagtctatggctgtctttccattttattaataatgtctttggaagtgcaaatattttaaattttgattacattcagtttatcaatttagaactagaaataccatttgaccaagcaatcccattactgagtatttggttttgcaagtcgtatggtgtgtactgcagtatccaactccactgtgtagtgtgaaagcttccaccagtattaggtaaatgcataattgtggttgtattccaataaaattttatttgttcctctcccccatcccccacaaaatggtggcaggctggatttagccaatgggctgcagttttttactccaggcttaacatatggtctatcctagagaattgtctatgcaaaggaatatgtattctgtagtagttggatggaatattgtatatacagcaagtcagcaagttagcttgacagtgttgtttaagtattctgtattcttgggaattttttcctgggtattctatcaattactgaaaataagatattgaaatattcaagtataattgttacatttttcttttccttctttagattctgtcagtttttgcttcatatatttggagtctgtgtagttaggtgaatatgcattcttaattgctatcatactaatattttgactttcttatcattatgaaatgtctctgttttactctagcagtatgttttatcttaaatcctattttgtttcttaaaatagccattgcctctgtcttttggataatgtttgtgtggtatatcttttcatattcttttactttcaaataatttgtgtctttgaataggagtgtttcctatagattgtgtatagttggatattgtttttttttttcccaatctgacaatgtctgccttttgtgggaggtatttaaactgtcccacatttaatgtaattattgatatggctgaagtaacattgactgttttgctattttttacataatgtctcctgtgtttcttgtatctgtttctacttggcagccttatatattaaatgaataatttgaagtatactgtatttaatgttttatctattttttttagttatgttcttactggctagtctaaggatgatagtatacgtcttgatgctaacttaattctagaaaagtgttgtaatcttgccctaatatggctctatttcctccctttttctttgtgctattattaccatatatattgcattttatatgctataaatccaataaggcatattttaagtttcactttatacacttttaaatcttttaaagaagataagaaaatatatcaaaaagacatatccacagtcttaaatagtaatccatacaattgtcatttctgacgcatatctgtccatatgaaaaatgtgagaaaattttggccattatttactcaaatactttttctggtcctatctatctttccttttcttttggtcttccattacgtgtatgttgaaactctgatcttatcgcacaagtctgagttcttgctcattttttttagtcttgtttttttctatttttggattggataatctttattgatctatgtgttcactgactcctctgccattttgaatctggtgttgacccctctagtgaatttttccttaatttcttgtaatctttaactgatttattttttttataatttttatccccttcttcagaatccccacttactaatgtggttgtcagacttttctttaattctttttattttttattattatacttaaagttatggggtatgtgtgcagaacgtgcaggtttgttacataggtatacatgtgccatggtggtttgcagcacccatcaacctgtcatctacattaggtatttctcctaatgctatccgtcacccagcctcccacccccgcaacaggccccggtgtgtgatgctctctgtgtccatgtgtcctcattgttcaactcccacttatgagtgagaacatgtggtgtttggttttctgatttgtgttactttgctgagaatgatgatttccagcttcatccatgtccctgcaagggacatgaactaattcttttttatggctgcataatattccatgatgtatatgtaccacattttctttatccagtctatcattgatgggcatttgggttggttccaagtctttgcttttgtgaacagttcctcagtaaacatatgtgtgcatgtgtcatcatagtagaataatctgtaatcctttgggtatatacccagtaatgggattgctgggtcaaatggtatttctagttctagatccttgaggaattgccacactgtcttccacaattggtgaactaatttacactcccacccacagtgcaaaagtgttcctatttctccacatcctctccagcatctgttgttttctgactttttaatgatcaccattctaactggcctgagatggtatctcattgtggatttgatttgcatttctctaatgaccagtgatgatgagctttttttcatatgtttgttggctgcataaatgttttcttttgagaagtgtctgttcatatcctttgcccactttttgatggggttgtttctttttttcttgtaaatttgtttaagttctttgtagattctggatattagccctttgtcagatagaaagattgcaaaaattttctcccattctgtaggttgcctgttcactctgatggtagtttcgtttgctgtgcagaagctctttagtttaattagataccatttgtcaattttggattttgttgccattgcttttggtgttttagtcatgaagtctttgcccatgcctatgtcgtgaatggtattgcctaggttttcttctagggtttttatggttttaggtcttacatttaagtctttaatccatcttgagttaattttcctataaggtgtaaggaagtgatccagtttcagctttctgcatatagctacccagttttcccgacaccatttattaaatagggaattctttccccattgcttgtttttgccagttttgtcaaagatcagatggttgtagatgtgtggtgttatttctgaggcctctgttctgttcccttggtctatatatctgtattggtaccagtaccatgctgtttctgttaccatagctttgtagtatagtttgaagtcaggtagcgtgatgcccccagctttgttctttttgcttaggattgtcttggttacgcgggctcttttttggttccatatgaaatttaaagtggttttttttttccaattctgtgaagaaagtcagtggtagcttgatggggatagcattgaatctataaattattttggacagtatggccattttcatgatattgattcttcctatccatgagcatggaatgtttttttcacttgattgtgtcctcttttatttccttgagcagtggtttgtagttgtccttgaagaggtacttcacattccttgtaagttgtattcctatgaattttattctctttgtagcaattgtgaatgggagttcattcatgatttgactctctgtttgtctgttattggtatataggaatgtttgtaatttttgcgcattgattttgtatcctgagactttgcttgagttgcctctcagctttaggagatttagggttgagatgatggggtttgctaaatatatagtcatgtcaactgcaagcagaggcaatttgacttcctcttttcctaactgaatatgctttatttctttctcttgcctgatagccctggccagaactttcaacactatgttgaatagtagtggtgagagagggcatcctcatcttgtgctggttttcaaagagaatgcttctaggttttgcgcattcaatatgatagtgcctgtgggtttttcataaataatcttattattttgcagtatgttccatcaatacctagtttattgagagtttttagcatgaagggctgttgaattttgtcgaaggctttttctgcatctattgagataatcatgtggttttcgtcgttgattctgtttatgtgatggattatgtttattgatttgcatattttgaaccagccttgcatcccagggatgaagctgacttgattgtggtggataagctttttgatgtgctgctggattcagtttgtcagtattttattgaggattttcgcatcaatgtttatcagggatattggcctaaaattttctttttttgttctttttctgccaggttttggtatcaggatgatgctggcctcataaaatgagttacagaggattccctctttttctattgattggaatagtttcagaaggaatggtaccagctcctctttgtacctctagtagaatttggctgtgaattcgtctggtcctggactttttttggttggtaggctattaattactgcctcaatttcagaatttgttattggtctattcagggatttgacttctttctggtttagtctttggagggtgtatattatttcagtaatttatccatttctcctagattttctagtttagttgcatagaggtgtttatagtattctctgatggtagtttgtatttctgtgggatcagtggtggtatcccctttatcattttttattgcatctatttgattcttctctcttttcttctttattaatctggctagtagtctgtctattttgttgatcttttcaaaaagcagctcctggattcattgattttttgaaggatttgttgtgtctctatctccttcagttctgctgtgatcttagttatttattgtcttctgctcgcttttgaatttgtttgctcttgcttctctagttctttcaattgtgatgttagggtgtcaattttagatctttccagctttctcttgtgggcatttagtgctataaatttccctctacacacggctttaaatgtgtcccagagattctggtacactgtgcctttgttctcactggtttcaaagaacatctttatttctgccttcattttgttatttacccagtaatcattcaggagcaggttgttcagtttccatgtagttgtgcggttttgagtgagtttcttaatcctgagttctaatttgattgcactgtggtctgagagactgttatgatttccgttcttttgcagttgctgaggagtgttttacttccaattatgtggtcaattttagaataagcatgatgtggtactgagaagaatgtatattctgttgatttggggtggagagttctgtagatgtctgttaggtctgcttggtccagagctgagttcaagtcctggatatccttgttaattttctgtctcagtgatctgtctaatattgacagtagggtgttaaagtctactactattattgtgtgggagtataaatctctttgtaggtctctaagaatttgctttatgaatctgggtgctcctgtgttgggtgaataaatatttaggatagttagctcttcttgttgcattgatccctttaccattatgtaatggccttctttgtctcttttgatctttgttggtttaaagtctgttttatcagagactaggattgcaatctctgctttcttttgctttccatttgcttggtaaatattcctccatccctttattttgagcctattttgtgtctttgtacatgagatgggtctcctgaataaagcacacccatgggtcttgactctttatctaatttgccagtctgtgtcttttaattggggcacgtagcccatttacatttaaggttaatattgttatgtgtgaatttgatcctatcattatgatgctagctggttattttgcctgttagttgatgcagtttcttcatagcatcgatggtctttacaatttggtatgtttttgcagtggctgataccagttgttcctttacatgttcagtgcttccttcaggagctcttgtaaggcagccctggtggtgacaaaatctctcagcatttgcttgtctgtaaaggatttgcttgtctgtaaaggctggatatgaaattctaggttgaaaattctgtacattaagaatgctgaatattgtcccccattctcctctggcttgtagggtttctgcagagagatccactgttagtctgatgggcttccctttttgggtaacccgacttttctctctggctgcccttaacattttttccttcatttccaccttggtgaatctgatgattatgtgtcttggggttgctcttctcaaggaatatctttgtggtgttctctgtatttcctgtattggaatgttgaccttccttcctaggtttgtgaagttctcctggataatatcctgaagagtgttttccaacttggttccattctccccatcactttcaggtacaccaatcaaatgtagatttggtcttttcacatagtcccatatttcttggatgctttcttcatttcttttcactctttttctctaatcatgtcttcttgctttatttcattgaattgatcttcagtctctgatatcctttcttccacttgatcaattcagctagtgatacttgtgcatgcttcacgaagttctcttgctgtgtttttcagctccatcaggtcatttatattcttctctacactgattattttagttagcagttcatctaaccttttttcaaggttcttagcttccttgcattgggttagaacttgctcctttagctcggaggagtttgtgattacccaccttctgaagcctacttctgtccgttcgtcaaacttattctccatccagttttgttcccttgatggcgaggagttgtgatcctttggaggagaagaggtgttctggtttttggaattttcaagcctttttgctctggtttcaccccatcttcatggatttatctacctttggtctttgatgttggtggccttcagatgtggtctctgagtgggcgtcctttttgttgatgttgatactattcctttctgtttgttagtttttcttctaacagtcaggcccctctgctgcaggtctgctggagtttgctggagatccgctccagaccctgtttgggtgtcagtggtggaggctgcagaacagcaaagattgctgcctgttctttcctctggaagcttcatcccagagggtcacctaccaaataccagccagagctttcctgtattaggtgtctgtcagcccctaccgggagctatctcccagtcaggatacacaggggtcagagacccacttgaggaggcagtctgtcccttatcggagctcgaacactgtgctgggagaaccactgctgtcttcagagctgtcagacagggacgtttaagtctgctgaagctgcacccccaaccaccccttcccccaggtgctctgtctcagggagatgggggttttatctataagtccctgactggggctgctgccgtttttccagagatgccctgccgagagaggaggaatctagagagacacttagccttgctgagctgcagtgggctccacccagttcgaacttcctgagggctttgtttacactttgagggtgaaaccgcgtactgaagcctcagcaaggacggatgcccctctcccaaccaagcttgagcatcccaggtccacctcagactgctgtgctagcagcaagaatttcaagcccgtggatcttagtttgctgggctctgtgggggtgggacccgctgagccaggtgccaggcactggaggaaatctcttggcctgctggttgcaaagaccacaggaaaagcgcagtatctgggccggagtgcacgttcctaccagtacggtctctcacagattcctttggctaggaaagggaaatcccctgaccccttgcacttccacggttgaggcaatgccccaccctgcttcagctcaccctccatgggctgcacccactgtccaaccagtctcaatgagatgaaccgggtacctcagttggaaatgcagaatcacccaccttctgcgtcgatctctctgggtgctgcagactggagctgttcctattcggccatcttgccagctctctctttaattctttaaacttggttttcgttagttctttgatgatgtttataatagctgcatttaaattttttcttctaaatctagcatctgagaacacttatgaacaatttcttttgactgctttttcctccccagttatggggagaaactttcttgtttctttgcatgccttaaaaatttatattgagaactgcacattttagataattgtagcaggtctggattctgattctccctcccctgtggtggttattgttgccaatttgtaaaaagtttatttgtttattttgtgtttgtgtcttacttatttgcctgagataaatctgtgaaaactctcctttagtgagtagctacctactcctctactcattttcttattttttatttttatttttggaccgtctcattctgttgcccaggctggagtacagcaatgcaatctctgcttactgcaacgtctgccttgtgggttcaagtgattctcctgccttagcctcccaagtagctgggattacaggcgcctgccaccatgcccagctaaattttgtatttttagtagagacagggtttcaccatgttggtcaggctggtctggaactcctgacctcaggtgatccacccacctcggcttcccaaagtgctgggattacaggcataagccaccatgcccagccagtttgttttttaagactggctcataggagtcactctgtttatgcataggctagttgctagtgagtgactgggcacaagttgtgctcaaccacctgaggccaacaaggtttttgtctttgcaaatgtatctgtgtgtgggtagtgaagaaattagaagttcaggctattttcatgttagcctaactttactggctccttttgtgtctctcctatgtgcatgtggacagcctctgggttcacaaagaacatgtggctggcctgggccctctccaatctcagctgcacatacatgcagccgcagctatatgcatgctacatccacgtaattccagtctagtagaggccagatactggaggaattggctttttctgtttgtttggctcccaaataatcaggtatatcaacagtgtcactggacctgggcattacccaatggtccaaattgtttgcatcctcttcagctggggcagagaagctgctgatcctcatggtctgcccttcctgccagtagttgcatgttttcgaaactagggagagtggggagcagcctatggctggaatgccactgattatcagtcttcttatcctaagtttagcaatttgtcagctaaaagtgcttcttagattgtggtatgctttttgttcaattttcagaattttgaaatggctatttttgttaattttgtccagattcatcattgctttttgagaaaacaatttaccagtttcttcatttgaccctagttggaagtcctaccctgggatttgttgttgttgttgttgtttttcttgtattttacttcagaaaataaaattttacattgaaatgaattaaatttgataaaccttctactttatcataatgcatacatgtgtttacttaaaacgatcattttgctttgccagttctagaaactctctacattcttgtatttattttgctggagtttgctggcatgagaacatgagccttcatgttcatgcagaggttctaagattggataaactggtgtcatgacaaaaatttcatttatttctcatataattattagattgttctcagaaagactgcatatcattgcaatttctcttttaaatcctcctattcatttggtttcacattaaatatatatatattcatttccataaatctgtccatatccatgcagtacaaaggtcaaaattactcactgtcgatgaagagtggggaagcttatgatttatcctgtgattctaaaatggcagactttgttgaaaaaaagtctcgtattggacattttcccctgaattttgagtttatttatcattgcctcttctggttccttaccccagggaatcttggtaaagcatggagcaggaaactgaggataagaaccttgcgtactacttttcttactaagggagttgaaatcagtataatcaagaatgaccaacactacttttttctcacacatccaacatcatgaattccaatataactcctgaaatatctgcattgcctagccatatttctgtactaattagattatccagccatacaggaaattttgtgtttattttttgaagctagcacatcttacgtggccagagaaggagaaagagtgtcaaggggaaggtgctacacatttgttaacaaccagatctcatgagaactcactcactatcacaagaatagcaacagggaaacctgccccatgatcaaatcatctccggccaggcccttccaccaacattggggattacaatttgacatgatatttgggcagggacacaaatctaaatcatattatttcataactggcctctcccatatctcatgtttttctcacactgcaaaacacaatcatcccttctcaagattcccccatgtcttaactcatttcagcatgaactcaaaagtccacagtccagagtttcatctgagaaaagtcaaggcccttctgcatgagcctgtaaaataaaaaacaaattagttacttccaagatacaatgagagtacagacattgggcaaatacacctgaacaaaaaggaagaaatcagctaaaagaaagaggctacaggccctgagcaagcccaaaacccagcagagtagtcattaaattttaaagctccaaaataatctcctttgattccatgtcccacattcaggccacactgaagcaaggggtagattgcaaggccttgagcagctccgcccctgtggttctgtggggctcggctcccaaggctgctttcaagggctggcattgagtgcctgtggcttttccaggagcgcagtgcaagctgtcagtggatgtaccattctgtggtttggagggtggtagccctcttctcacagttctactaggcactgccccagtggggactctgtgtgggtgctcaaatcccacatttctcttctacactgccctagtagaggttttccacgagagccacgtccatgcagcagacttctgtttggacagccaggtgtttccatacatcctctgaaatctaggtggaggctcctaagcctcaactcttgccctctgtgcatccgcaggcttactgccatgtggaagccaccaaggcttactgcttgcactctctggaccagtagcctgggatttatctgggacaatttaaccatggctggagctggagcagctgcaacacagtgagcagtgtcctgaggttatgcagggcagtggggccctgggcctagcccacaaaatcattcttccctcctaggcttccaggcctatgatgcgaggggggctgcctagaaggtctctgaaatgcttttgaggcattttccccattgtcttggctattaacattcagctcttctttacttatgcaaatttcttcagccattcctcctcagaaaatgtgtttttcttttctaccatgatgtcaggctgcaaattttccaaacttctatgctctgtttcccttttaaataaaaattttaatttcagatcatgtcttcgctcatgcataacaaaactgaactatgctccagtttccaataagtttctcatctctatctgagatctcctcacccttgacttattgtctgtatcactatcagcattttggtcacagcaatttaacaagcctctaggaagttccaaactcccttattttcccatcttctcctgagccctccaaactgttccaacctctgcccattatccagttccaaagctgctttcacattttcaggtatctttattgcaatgcccctctgtctgtaccaattttctgtattagtttcttttcacactgccatagagaaaagaagtttaacaggctcacggttccacaggctgtacaggaagcatggctagggaggtttcaggaaacttacaatcatggcagaaggcaaaggggcagtgggcacgtcttacatggccagagcaggaggaagagagtgaaaggggaagtgctacacacttttaaacaaacagatctcacaagaactcactatcatgagaaaagcaagggggaaatcggtcaccatgatccagttacctcccaccaggcccctcctccaacacaggtgatcacaatttgatatgagattttggtggggacaccaacacaaaccatatcagacctccacttgtctgaactatgtttaagaaactaatatataagtgacttaacattctacctctttaattagagtacctacagtgcacccataagatgattacttttaaattgaaattaattaaagaaatatgtgtttgtacaggaaaatatataaagcatatttggaaaatttatgacatgtatctcttggacttcatgctaagcaactataacaaagaaacctcaacttacagtggcccagacaagacacattttttcctctcgctaaattcatgtcagtgggctgtgcatcatcaggccaaccaaggccttgggttctttccaccgtgccaccatcaccatcatcatggttgatgttgactcatcagcaccgtatctacatcctagctcaagggaagtggagaaaaacaaaatccaggtcaagtggcttgctgtatttcaacatgacccagaaattgtgcattccattgagctgagtttgttgcatgtccacattgaggtgcatggaaggctgagaaatatcttgatctgaatgcccattaacccacctaggagactgctttatgactgttctccaataatataaataacacatgcttcctgtagagcatttggttatgcaaaatggtaaaataagtaaagaaaatccatcattaatttcatttttgagatattgacagtcatacttttttgtgtgtttttcttactaggtagttttttaacatacctgtgcaattctctgaatacacattgtcattttaccattgctatactatgaacttttctccatgtgattaattgactttagtgaacctcattttaatagctaacacatggatgaactcttacttaaatgagtgatatattctcctactgtgaaacattaacctgtttccagatgcttactattataaataagttgttacatgcatttatattttcagtgttttctagggtaagttcttaggaaagtaattactgccaaattggtgttcaaaaagttatgccaatttttactcccaccagcaatatatgagatgacatattgagaattactgagaaaatggccttaactttctgggtatttttttttttatttgagaactcattgtttttgaagtgacgattggaaataaaaacccctcgtttttctctacaatacacaaaagtacacatgaacacttttccagcaagaaaatagttttaaaatcaatttgatttaatggtttatattttataatttgttggcatgtttattacccacgagcagttctttgaatggtctctacatgttatttacccttttttctctattatatttttattattttgttttaaactaacatatattagttctttatagtaagtatatcaacctctacccagtaggtctattggaatttttttctttcttttttttttgagatggagtcttactcttctcacccaggctggagtgcagtggcaaaatctcggctcactgcaacctccgcctcccgggttcaagtgattctcctgcctcagcctcttgagtagctgggattacaggtgccccccaccacacctggctaaatttttgtacttttagaagagacagggtttcatcatgttggctaggctggtctcgaactcctgacctcaggtgatccacccacctcggcctcccaaagtgctgggattacaggcatgagccaccacgcctggctggaattttttaatgctagtttgctgtgttaagacacaacgactacaaatcccttaatagcttcttccattgcttttctgcttagaaaatatcttcccatattcaaatcattatgtatataagatagtaacatcttgttccttgtaattctttagtgtattactgaattgcaattattttagttgtatagaaaatatttatgttttctggagcaagtcttctttcatgattcctctttcattttttttcttcctttcactaagtaattttaaaggtatactttataattattttaaaattttctcatgggagtgataaatgtaaaattttgattagatttactatatctgtattataatatattttcattattataataatataattatagattaccaattttgtaacatatttcaaattgaaatgtcaaaatataatttaaattataattacacattaaaatgttatttatggtattatattttatattatgcaccatattaaaatacaacttatttatattttacatataattaatttacttatgttttatgtttacacttaaggtaatatttaatatttatactaacatattaatattattttatattacactaattttcatattataacagtttttccattttcaaaatatccattcttttcttttcttccatgcctccttccattgattcaatatttcatttgtgcctattagtaaggcttccttgtttcttttcataaaacattcacattgctttgttaagattattcttattttgtatttttgtactattgctaaatgcttctctcctatatattttatagctggtcttcctggtataagaaaatactgatttttgttagaatggcaatcattaaaaagtcaggaaacaacaggtgctggagaggatgtggagaaataggaacacttttacactgttggtgggactgtaaactagttcaaccattgtggaagtcagtgtagcgattcttcagggatctagaactagaaataccatttgacccagccatcccattactgggtatatacccaaaggactataaatcatgctgctataaagacacatgcacacgtatgtttattgtggcactgttcacaatagcaaagacttggaaccaacccaaatgtccaacaatgatagactggattaagaaaatgtggcacatatacaccatggaatactatgcagccataaaaaatgatgagttcatgtcctttgtagggacatggatgaaattggaaatcatcattctgagtaaactatcgcaagaacaaaaaaccaaacaccgcatgttctcactcataggtgggaattgaacaatgagaacacatggacacaggaaagggaacatcacattctggggactgttgtggggtggggggaggggggagggataacattaggagatatacctaatgctaagtgacgagttaatgggtgcagcacaccagcatggcacatgtatacatatgtaacaaacctgcacattgtgcacatgtaccctaaaacttaaagtataataataataaaataaaaaaataaataaataaaaaagaaaatactgattttttgttaattgtaaaattggctgtctaaataaaaccttattgttttcaaaagcttttgatttggttaccatgagatttctgtgtaaaaaaattaagtaatttgccctaatggtatcttgtctcctttttgttttgaaaagtttgactcaaccctcccctcttcaggaaatggctcatttttgtctcttttccttctttacagcatggaggagtgtgaggctctttgcacaagactggccataatggttaacggcagcttcaaatgtcttggttctcctcagcacatcaaaaataggtgcgttgaagttctccttttgcttagatatttactatgaaatcaatagcatgatgcagggttatgactggagatgctttagaggcaagtatgttccaattacctgctggcataaaataggagatgaaggctctgaggggataaaatactgtggctagtaagtcaaacacatagcaactcccaaacacagtctagtgttctccctgtaagggagacattttgcttttctcttgccaggtagacattgctccctccttgtagtgacattggtaggggtgagaataagattgcagagtcaagatgatgacaggacacaaaatgtcctctttacacacaaaatgccttatgaaaaggctgtgctgatatgtccctcatctgcagtgaatcaaagttcccattttatcctaccaaacactatccttttgaaaaagaccatcaatttataagggtaggagagggttgttatggttgctttccatttggattatgaaagactaaagacttctttcctgtgctcattgatcctttatatttcttcctggttaattctcttcatgtattttctttatttcctttttggaatcttaataattttgttatcaatttgtgtgagcattgttacatcctggtataacattaaaaaaattaaagttgcctaaatacacgtccaattttcctttgatttgtttaacctgtcattctatgtagaataatttattcatttatgttgataaatctcttattttcatttattcagtgtttttaaggttaggattctcaagcagagatttggtaaatagtcatatgtaaattttaaatacttttaatttatggagaaaatagctgatgctcaggattgagatgacatagtagggagtgagtgtccatttttagagttaggcactgctgggatggtcagcctcacagttgcttgctgcttcgggtcaaccactggtcagatgcacctactggaaactattctcggtatgtactctgcccatctttaataagtatcatcaaaagaaaaataatatttcatggtctccaacctttatgaatgcctacataaagttttataacccattcttgattgttgggtgatttatgtctgatttatgtttacaaaagtttcccacaagagccagcaggacgaagcacatggggataggttttctctagctgttgcattctacatactggaaaatctgtgcctacttcggagtttgggttcccataatgtgatatatgggttgagcatgaattgttagtggatatgaactgtaggactatattaaacaagaaatggcttgtgggttattcactgaaacatcaaacttaataaaatttaaaaaataatttgtggccgggtatggtggctcacacctgtaattctaacactttgggaggatgaagtgggaggatcacttgaggcccagagtttgagaccagcctgagcaacatagtgagacctcattcctacaaaacattttttaaaaattaattttaaaaaattatatccaggtgtggtggggtgcatctgtagtgctagctacttaggaggtaggagaatcagttgtgtccaagagatcgaggctgcagtaagccatgattgtgccactacactccagcctgcgtgacagagtcagaaaacaattaaaaagtaaaataaaataatttgtaaaatgcttattctcctataactataaacctataataaacaaacacatgatgatgcctgtttctataatattgagataaagaataaaggattgatcatgacatagatggtaacaataactagatttttcataaacttcggcatccatacctgggagttagcaacatcagaacccatttctctgacgtggaggtgttgagatggatgagagaacttgtagtgggtctccttcctcctcctctccatccctttctttccatgaacatgaattgttaggaacgtgaataaggaagagtagggtctgggtgagggaagaggttctgaggagataactcaggagaaggcgagggttttggagggaagattatggctgaatttgggcagggatctgggtgtcaggatttccccgtggagaggcaggaggctggtgaggagggtcccaggcttgggctgggagacatctgcccagagggagaacggaagagaggagctacagaaatcccacagaggggggacccagagggcagggcttgggcttcagagaccagctccccttgggaggggcaggtgcaacaagagcctgcaatgagagcctagtggagtgaagccaggagagcacgagggtttagtcacctttagcttctgaattgcagtgctgaccttgacctcatgaacagtcgggaacccttcagtgcaggtctcagcaaattcgcccgtgacaggaagctgaggcttgcacctgctacgtcagttcactcggacaaagcagccatttttcagggtgaagtggggaaagtggaaaaggaatgtaaggatcagaaaaatgaggagccacagaaatatagagggaagaatgtccgtggcaagtagggacagatacataagaggaaaaaacaaaatagaaagtgaagtgaaatttcccaaaccaaagaacttttcctacctcactctctgccccaggcacagccctcagagaaatggggcctcagatgagaaacagctcttccatgggacttcagaccccacctgggctccctgagttcatcccaccttcctgagcctggggagtaagacccaagcacagggatcactttctaccccaatctgcaggtggcactgtctttccttcccaccctctgtcggttcagtcagccccgtaaacccatgcctgactctgctctgattctcttccttcctgctgtgctcatttgagttgctttcttgggtcttaagcaaaaccttggtacatgcacttcaccatctgagaagggtttccgcagaggacaccaaatcccattcccatgctcctaacagagcattaacaccccagcatcctgcttcattcctggactgacctcatccttagcccactgttttaaaatatagtgtgttaatagaaaaattgaagtacaataaggccaatagatcaggaaacgactgcctttgaaaataccatgtattacagtttccaataataggggcatggcacacagggtcccatgagggagcatcaggtcagccaggaggcagagggcagctggaaggaaacctgagcaagggattttattgtgatttctattggaaggaaggggtgaaatagggcaagcaggcctaggatctgctactttgaataactttagtgggctgtgcagcataggggttgtccctagttgtctagtacctgtgcctggggtgactgggggaggtggattgtggcttaacatgtgagagccccttagaggaggtgtttgagatgatgtgtgctctgggtcagctggtttgtatttgaaaaagtgaatttatttgcaagttgtttactatctttaggaattggctagctctgggaggggcagttcttccagagtcagcaagtccccactttttcaaagtattagaatacagaagataataggcatggttaatacacacactccaggactcactgaggctgagtggagccataagggcagggccaatcacattctgcctgcctggaggaagccaggcttgcccactttgcagaggaaggcagggagctctggctgtgccaagggttctgaagtcccccttctcttccttggtacagacttttgttcttcctgggaatctttaatagcttgtttcagagctattatctacatagtgaatttccaaacactttgagattatagagttgtattaaaaagcaagttccttggacccctgatctatggataacctaaagctctctgtgaccggtctgtaccaatcatccatggagaagggcctctgagaaaaaaaaatgcaataggccactatctagtgtgtatgtctatccattgatatcaagttgttatgttaactgtgatgttgtttcttacctgagtcacaatttaagaaaagtcaatcaatattagatcttttgctcgtaaaactgaggctgtttgcttctgacatttaatatttctttaacaaatgtttattgaaacccagcaagggcatgcagaggtaggtctgatgcagtttatgcctgctttggtactcacaagtgcagagagtgagtccggcacatgcccggtgacatcacaaggcctaacagggcaggcaacatagaaaaggtatcaactagagtgttccgtgaaagtgtcatatatgccaagtggcctccaaacccaggaaaagccgagaaatcaaagaaggaggaagacacatccagtttgttggtaaagggcgatttcctggggtcacttatgaatggaagtgtggtcttgggaagcagcaagacaggtagacctctgcaacattactccccagacccagggctcttatatcacagggaaagggcacctaccctagagagacaattgaagacacccctccataacaggcaagagtttttcatgcgttatgggctatcatttgtgcaataacttaagggttgccttgatctaaaggcaggagcacttgttcttacaggaaggacaggaagtgaagtaggaatcaggaggcatttgcgggcctaggctaaccagaagtcaatgtggtagattagcatccatgatgcagtcacttttgtctccacatggagctctgaggaggaggaggaggaggccttttttagtttgaggaaatagcgaaatatcttagacctggagtacaggtaaaatttggttaaaaggggatttaattctggattgtatttagtaacaaaaaatcactacagaattggaatttgagagcaagtaagagggacagataccagtcaaagcaaagtttagatttcaatatgaaaaataaagaaaatcctcaggctaagtaaaagcagcatgaccattttaaatgttccttgagcaaccctcggcttcatggtcttaacttcgtttctgcagctcagcactgtttcgttttgggttggataattcttggttgtgggaggttgtcctgggcatgtaagatgtttagcaccatccctggcctgtgcagcaccctcaccccaattgtgacaactaaaaatatctcttgacattggcaaatgtcttttgggcagcaaattgtcctgggtgagaaccactgtctcagctgttactttgttctatgtccccagagacatggaacacactaggaaacctagttacaataatagttagaccagattccaaaaacattaggcagtcaaccctgtctttcctatggccagatctgaaacgtgtcctgctcagtggctaagaggaggcaggtgtatgaagtaggaggatgtcagcaaatgggcacaaggatgggtagagggcgttgcacacagggcattgtcttaccagaggcaaacactctgggctgtggagtgatctcattttgcagaagtccaagatccatgagaaaggagtgccctcttctcctttcagtcttagtacagccctagtatgagatgtatgaagtcatagtggaaagccagaggtcctgagaggagctgcaactctgcaggccagcatcactcaggtgctttctcatgcttctctaaatacatccctaccccacctcagtgcctgttctcacttgaacaccttgcttggaccactccccatcactgattacacaatactcccacccacagacaccgaggatgattcttcctttttccttgagacttctctggctttttcattgcttggcattttcttccctttgcttgtgtttttttctttatagcaataatcttttcctcttctttggcataagtttgcatcctgcctgccaaaagatctgttcgtagagtgtttaatatccacaatcttacctcgttccaattcagtgttctgctcctagagagcacagactttgtcttttatcagtcctacttttgcgatatgctcaagtatccatgtgatttaggagataaaatatgagggcaatgacaaccagtccagtcctggaggtcttggtgtctgaaaacccaggggtaccacaataaagaggatatgtgtggtcctgaaatgtttaggttttagttcaccaggaggtttaatactgccaaattctacattcattatttactaagttggtgtcctatgctcttctcaagctctagatcttcttgttatagttccttaaattatttttttgatacttctaagtagttaaacaatgattttaactttagattggtattccaatgtatttctaaactgctgtatgtgttcataagttaagaactaaccaaattaaagtttaaagaatcatgtctatggtttatcacttcaacaaaataagccaacaatggatttctattagtgggatttagctaaaagcattttcctgatgctggtttgggacctcatcatgcttttcctggcttcagccaacaccaactgccccaatcctgagtctggtgcaggtggaaatatttgttcaaaattggtaattgatttcccagaaggacagacagcatctagagtatagaatttcggggacccaacctcatagggaaaagtgtatttgctccctccctggtcatcttgacctcattccagcgcttcccttcttctctcccacccttatgaccctctggcctatttcaactggagaaatcatcaagtccctccttgtcccctctccagcctgcaggactcttgctaagcctgcaaggttgtcacagagtgctcctcagatgcattcttcagctgtccttcctgtggcattaccaaaacacaccctcaaaggattattattatttgttctttctgccgaaccttctctctcctaatccattctctacttctcagtttctctagcctggacccagtttacacctgggctacacctgtgccattttcctcttggagcagaaggggttagaatgctgctggatgtcctccctttgggctcaataaactcctggaaaattctcttctccccttttactccctggcaaaggaaaatttaccccttataaaatctgtagagtgtgtcctaacgcgcaatactggaccatctcttagtgatgttatgtccccttgtcttgcatcactatattcccttcttcttgcctttctagcctatagatattccccctttcctaattgtcctcatcctcatcttttatctcttttgtcttcaccatttattatagtctgttacctactgctctgagcaagatatatagattatctagcaatctggataataatattgagaactaattcttatatagtgcttactgtatgccagctgtaagtgctttatacacatgaatcaatttattcctcatgacaatcctacaaagtagctgttattattacccttcatcttataggcataaaaaagtagtcatagaaaggttgagtgacttttccaggattaccatctagtaagtagagggactgacatttgaaccccagcattctggtgctactttgctctatgatgcatcatctcatgattgtccacatttaacaaatgaaagaagtgagcctcctacctgtggtggagctgcctttcaactgcagccagtctgactccaagcttgcaggcctggtcaccatttccgcttccttcctgctggagcacttcccagagccgtaagcatgaacatgcaaactctcgctgcatcttcaatggtgtctgcaccagcaactctctcttgttgacatgtcttttggcaaaattttaatatcttttccattcctattgagacctcatcatcctactcatttaacaagtaatttctaatttcctgagagacacctcttgtcagctagctttttgatgggctctcacaaagtttttatttcttcgttatccttttctttctttgtatctatgtctgagaaagaaatctgcttaattattgagtgtttttattctgtttgatgataacataatcgatttcccttgggatgccttctgtcagtggttttattctgctttacatccttgatcttttcacagtcaagagcagttaataacagaacatcaaccacattgacttaaccatattcatcgttatttgtagtaagaatccagaggtaactggttattggcattccttaagaggtcctaggcctgacagtgtgggtgttcccaaagtggctgctgtagctccacccaatatatatatgttctaggcaacaactaagaaaagcagagaaaagcaaaaagagcacatgccaactgtctgttccctcttaaagtagctttctgtcagagtcccacccagcaacttgtacttaggtttatttgtcacctggctacaaagaagtctaagaaatgtagactctagctgggcactttgctacttaaataaggttaggtttctgttcccaaggaagatagggatcatggttgtggagtgggaagcctgcagcctcacttattcacctgactggattcttttcctccattgagggtaggtcgttaggttgagcagctgagctgaacggactcttgggctttcaatttaagattgtcatatgctatgaaagagccctatatggtatagagattcatgagtttacgtgtgagcacatgatagagtgtgtgtgtgtgtgtgtgtgtgtgtgtgtgtgtgtgtgtggctcagttaataacagaggagagctggagtggagtggcactcacctaatagccacaggtggctaaaactatccttttgggcactgatgttttgtcccaggcaattagggatgcatcctcaaatcctctgcatgtcataaattgagcacataatggtgccctggtagctagctgcctttgtacttgcagacactgagcatattcccaacttacctggagggaaccattaacagctgcatgcggcatctatttgcttttctcctcccttgaacctgattgacataggaggcttaagtctgacttggtaaaaacactcctgtcatggaaaggaaataaaacatgcttctgaagcacagagtttacaatgtgaaatactccaggccaatttatgattttggggtgagggaggataaaggctgtgtattttgttgtcgttgttgttgttttcttttttctttttttttttttagacagagttttgctcttgttgcccaggctggtgtgcgagtgcaatgacacgatctcggctcactgcaacctctctgtcccaggttcaagcgattctcctgccttagcctcccaagtagctgggattacaggcatgcaccaccatgcccagctaattttgtatttttagtagagatgaggtttcaccatgttggtcaggcaggtcttgaactcctgacctcaggtgatctgcccgcctcagtctcccaaagtgctgggattacaggtgtgactcaaggcacccagcctgtttgtttgtttttctttctttctttcttttttattttttataaagaaaacacagcttcaaatgatttaaagaaaattgttaagattatgagaatttacatttccttgagttatcaactgtaaactttgagaaccaagaataaaagtagaataaagttcaaaggatcccatcatagatgtgttatatagccatctaagttaaaatataaagaatagtgtagaagggtttgtttgtggatttttttcctaaaaaaaatgaaaggaggcagaatcttgtttgagctctcaagctaccactgtctgagtagctgcaaattaatgtatcaccttatgtgacaccatatgctttagtgtggcaactttgacttaatatatctataaaccattactataatcataacatctcggattaagattgcatcaccacataatgaagtggatcatttaaaagtgaaatagataattcagtatgtttatgtcactttcacaaatggggaaggaagtttgcacatgagcacaaaaataatttctgccatgatgtggaactatggaatgatgtgctactgagttatatttttctatattttactttagtttaaagcatcatataattcacctgctgctactaaccactgaattaattctctttactagaaatgattttaagagagatagtgcacctccatatcctcagcgtgtttcacctcacctgctatgtgtaatttgtcatctcatttgttgtcacaacatcatgttgtatgaacacagcattgctctgacataattagctgggaagactttctgattctcatgccattctcatgctggacattttggttagctgcctctggtcttggaaattcaggtcatgaacagtatcacccagagctgtcactttatcaaaagtaaacattcggcattcattttttaatattttctgtaagaataaacagaatgcttttcactcacaatgaagatggaaaatagaagtgttggagatatttttagatgggtgaagttgttggggactcagactcacatcatgagtcctgttcattcatacacatttattgagtaaccacttaattagagatgatgaaaatgtgattcctaatctcaataaactcggcatagtgtacaggcagaaacataacaatgaatacaacacaatatgataattgttctaagagactggtgaacgaaatgctgtgttgtgcatctcagtttaaacctgcaaacattactgaatgtttacatagtgccagggtcttgggattgagtgggtaataaggcatgagccctgtaagaactgggctagacactcaaataaaaaaattatgtaagaaagaccattagcacgacaagaaggtttcaaagcccatgaggtaggagttaggaggaggaagaatgcacacacattgttttaggggaaggattggcacaggtagttttatgggtgaggaggaatttaaatcacgtgtatgcttagccagctaatcaactatgaatgcattagaggtagtggcacagagatgaacaatgtaaaccatgtttgaaatagcttgatggcaagtggaatacaggtggaatcatgcggcataaacttgaagggaatctttgggaccaaattatgggaaatattaattctaaggtaaaaaaaaggcaaaataatggaggaacaaagggaagcaaaaagaaacaggagaataactggcctattaaacagaaatttttgttctctagtaggaagttaaataagacaaactgaagtcaactggtgaccaagcacatggagaaggcagcatgggtgcaggagacgctgaagaacacgataatagaactttacagccggctgatctgagcttgagaaaaggaggtgcctttgggtttgggacatggaaagatagtgatgtctttagagaaacagaagttgggtgggctgtgagggtgaggaggattctgggtgttgagtatgttcctagggacactgatgggctgtttggagaattcctacgaggaagggctgttgatattcatgttctctttgctatggcaagaagcaggagagaaaacttaaagttgggggtgattattgcgtatggttgagacggaggaataagtagctgaactcatcacaactttgaagcaatatttataaactctgaagtagagtgagctgagctcagattcatgttgctgcatttattttaattattactaaatataggcaatttgccaaatgctttctgtgcatggtcttatttaatctttattacgtaatggctattattgtacccacttcacaataaagaaactgagacctaaagaatttaagcagttggccccaaaacagagtcagtattgagaaaagcagttttcaaactcaatttcttgactctaagtttcttattctttctataccacttcaatagtctcaaccaaccttatgtataactgactaaagaacaaagctttgcttcaagtacatgtcgtgggcacctgcgtgatgaaacctacacactttactctttgttgaatttacttcctgtgtatttaccgagaaaacagactatcttcttttaaaaagatgcacagactctgctttgaaagcctggtttgatgaaataaaagatatttagagtaagactcttactcacttactacgtatgtaacttggaaaaagttaacatctctggaggtagtctttttcttcagtggagataataatacgtattttatagtattttgaaaagaaatggaggaatataccaatcattttctcacctgcgttaatccatttgctgttactataacagaataccagagactgggtagtttataaaggaaagaggttcatttagtttagaattctggaggctaggaagtcctagatttggtggctgcctctggtcggcttctggtgagggcctagtgctgctggatagcctggcagaagcacagacatatgagtgcaagctaaaagagacaagcacaaggggtcaagcttgctatgtaacaacccactttaatgagaactagccaagttccctgagaactaacccagtctctaaagaatagcattaatccattcatgggggaagagtctccatgacccaaacacttcccacttagtcctatgtcccagtgctaccacattgaggaattgaggttctgatacctgaacttcggggggacacgctcaaaccgtagcaccacttgagcatgctatgctttctctttcccccgctgtaaagttctttcccaagaaaaacacatgactagttccttcagttctctgctctactgtcccctcttcagagaggtctccagcatcgattgtaattattcatagaagaagaagaacacctggatgttagctgacaacatgcctacataggaataagactgttttccagctttccctacagctacatgtggccgaagagttatagtaagaagagatgtccacaatgtcagggatatgaatttgcaaggagggacatccctgattcttccctttctttcttccttttactttatacagagctgatggctagagatggctagagatgaagcagccatcttgagccacgaggaaatcttagcaatggagacctgtgaagcggagcaataacacagaatgagccaaatgaatgctttttctactctggctgcctgacttcagactttaaacattaacatccttactatttggggctttctgtcactgtacatgaatctgaacagactaatattccctgtgacatattaaatatagcattaatttatgtacttagaggttattgtctatctctgcccagtagcatgtaaactttctgagggtaaaaccttttcttctgtttacttctgtatccttaccatttgaaatagtgccaggtacataaatgtgctcaacgtatttgttgaacaaatgaatgaatgtattaataatgaatgtaaaattcctagtacatggcagctttttgcttaacgggaattcctttcagaatgctgcaactagactgtaaaagacgaatcagatgaggccactcaagcattcagcttctgcctagcttaatgaacaacaaccactaacaagaacaataactgacccctttgatggagacttttactctgatgccatttatctttagacagggtgaagcctgctttctctcaaaacagtctgcattattcatgactagtttgctgcttttcgaaactggactctgtctgcctttggcatctccactaacagaaactatcaggtgtacgattcagtcctaattgctgccatggccttggcaatattgtgctgtcaccttctctgctggacagccagacttagtgctggtgtacaccggcttgccaagaattaatgtgcattgcagacagcaaaaatatgccattccagaatccaactgtacactatgggattatgatttcctattgtaaatatagcctaggcacaagaaaacatagcctaaccaaggaaatggatttctttattccaggtttaaaatgtatcaggattgggatttgggagaagcttttcttactctgagttcaaactatgagcataaaatgcgtgtgtgagtgtgtatttttaaatgcaccagcccacaacatttgtttcatagttatcttacaaattttattttttcattccatttttataaaagaacaaaaaaaattcctaaagcatcagttacattttggcaaaaaaaaaaaaaaaaaaaaaagctgcaaagtccaaaaaaactcagtggcttaaaaaatcatttgccctcaagagcctgcaggttttatggagatgggctggcctgggctggatttgtgcacctgtcccttgtcatcctgggattggtgtctggaatgttgaggcaccagaatggacaggccaaactgcacaaggatgaaccaagcctctggtcacatcaccactactaatgtccttttagccaaatcaagtcacgtggctagcccaaagtaaaagggtaggaaggtagtcccacccatagtggaagaacaccacgtatagctacatggcaaaggacacagatgtaggaatgagaagaattggggcaatatttacaatctgctacaacctccaaacattttcaccaatttttaaaattattattatctatttcttggtctattttgttctacttttccttttaggagagtttcctagatttaaaatttttatgtgttttgaaaatcttttttgtttttggattactactctaaatattttatataatatcctgtcagtatttcaaggataaaatgtcttttattaatttttaaaaaattttagttttaggggtataggtgtggatttcttatataggtaaatttcatgtcatgggggtttggtgtacacgttatttcatcacccaggcaatgcaaatagcatcctataggtagtttctcaatcctcactctcctcccatcctccaccctcaagtaggctccagtgtctattgttcctttctttgttttcatgcatactcgttgtttaactcccacatataagtgtgaacatgtggtatgtggttttctgtttctgcattagttcagttaggttaatgggccccagctccatccatgttgctgcagaagacacgatcttgttcttttttacgactgcacagtattccatggtatatatgtaccacattttctttatttagctgatggtcatttaggttgattccatgtctttgctaccatgaataccttctgcaaaaaacatatacatgcatgtgtctttatggtgaaatgatttgtattcctttgggtatatacccaataatgggattactaggttgaatggtagctctgttttaagtttttgagaagtcaccaaactgctttccacagtggctgaactaatttacattcccaccaacagtggataggcattcccatttctccacagccttgccagcatctgttttttttttttctttttaataatagccatcctgactcgtgtgaaatagtatttcactgtgggtttgatttgcacttctctgttgattagtgatgatgagtatttttttcatatgtttgttggctgcttatagatcttcttttgagaagtgtctcttcttgtcttttgcccatttttttaatggggttatttgttttttgcttgttaagttccttatagattctgtatattagacctttgttgggtgcatagtttggaaatattttctctcattctgtgggttgtctttttatttttaactctgttgatagtttcttttgctttgcaaaagcccttcagtttacttaggtctcacttgtcagtttttatttttgttggaattgcttttgaggacttagtcataaattctttgtcaaggctgatgtccagaatgatatttcctagattttcttctatgatttttttagtttgtagtgttatatttaagtctttaatccattttaatttttatacatggtgaaagatgggggtccagtttcattcttttgcatgtggctagcctcttatcccagcactatttattaaataggtagtcctttccccattgtttatttttgtcagctttgctaaagattagatagttgtaggtgtacaattttatttctggattctgtattcttttccattggtctatgtgtctgtttttgtaccagtaccatgatgttttggttattgtagccttatagcatagtttgaattcagataatgtaatggctccagctttgttcttttttattaagattgctttaactattggagctttttctttctttttgtttttttggttccatatgagttttagaatagtttttttttaattctatgaataatgatattggaattttgataggaattacattgaatctgtagattgcttttagaaatgtggtcatttttatggtgttgattcttctaatccataagcatgggatgtatttccatttatttgtgccatatatgatttctttcattagcatttgtaattttctttgtagagatccttcacttccctggctaagtatattcctaggtattttgtgtttttgcagctttgtgaagggaattgagttcttgatttgattctcagcttggttgttgttagtgtatagcagtgctactgatttgtgcacattgattttgtaaactgagactttactgaattcatttatcaagtccaggagtcttctggaggagtctttagtgttttctagttacacattcatatcattggcaaacagagatagatttacttcctcttttctgatttgaatgctctttacttttttctcttgcctgattgctttggctaggacttctggctgcctaagtctctgtaggtctagaagtacttgttttatgagtctgggtgctctttggccatttttatattggtttatttgtctttattattgagttgagatctatatctatatctatcttctggatgccaatttcttatcagttgaatttttcccattttatgggctgtcttttcacactttgggtattgcccttgaaagcacaaacatgtttaattttgatgatacttaattaatctttttttcttttgttgtttgtggttttcgtgtcatatccaaggattcattgccaaatccgaggtcatgaagatttacccccagatttttttctaaatgttttatagttttagcacttacatttaagtcttcgattcatctttagtaattcttttttgtattaactgtgtgtgaggtagggtcccaacttcatttatttgcatgtggtactcacaataggatatacctgtagatcagtgaaatagaattaagagtccaggagtaaaccctgggctttatggtcaactgatttttgcaagggtgctaagaacatttgatgttgaaaagactattcagacatttggtgtatgtgcttggctgaggagccaatggggtggataggattttcaaatcgtgttttcaataagtagtgctaggagaactggacagtcacatgcaaaagtatgaagctgggcccctacctctcacacagttaatacaaaaaaattactgaaggtgaatgaatgacttaaatgtaaatgctaaaactgtaaaactcttagaagaaaacatagggataaatcttcatgaccttgaaactgtcagtggattctcagatatgacaccaaaaacacaacaaacaacaaaagacaaaaagtaaattaattgtcatcaacattaaacatgtttatgctttaaatgacactatcaaaagtgtgaaaagataacagaataggaaaaatttacctgataagaaattggcatccagaagatagatagctgtagatatatatctcaactcaataataaaaagataaataaacaaatatggaatgaccaaaggcactcaaattcataaaacaagtacttctagaactatgaaaagacttaggcagccacataataatactgggggacttcaacaccccactgacagcattagacagataattgaggcagaaagctaacaaagaaattctagacttaactttgacacttgacaaattggacctaataggcatccacagactactttacccatcaaccacagaatgtacattattctcatctgctcatgaaacatactctcaaatcaaccacatgctcagccataaagccagtctcaataaattcaaaaaattgaaatcttgaaccacaatggaatataaaaaataaaaattaggctgggtgcggtagctcacccctgtaatcccagcattttcggaggccaaggtggatggatctcttgaggcaaggagtttgagaccagcctggccaacgtggtgaaactctttctctactaaaaaaaaaaaaaaaaatacaaaaattagctaggtgtggtggcacgcacctataatcccagctacttgggaggttgaggcaggagaatcaccttaacctgggagacagaaattgcagtgagccaagattgcactgctgcactccactctgggtgacagagtgagtgagacacttctctttcatagataggtagatagatacatagatagatagatacatagatagatagatagatagatagatagatagatagatagatagatagatgacagagagatgtaaataaaataaaaatcaataccaagatttctcaaaaccacacaattacatggaaattaaacaacttgctcctgaatgacttctgggtaaacaaaaaaattaatgacttttgaatgataaacaaactgcatttctagaataaatctcacttgatcatgatgtataatttttttcaatattattggatttaattttctagtattgtgttgaggatttttgtgttcatattcttaagagacattggtctgtaatgttcctttcttttgagattgcgtgtgtgtgatgtctttggttttggtattgtggtaacactggcctcaaagagtgaggtggaaagtgttcctccacttctattttttaaacacgtttgtgaaaaattggtattatttcttaaaacatttggtttaccagtaaaaccatcaaggatggcttgtttttgtaaggtcagcagtaatgctttctctttcatttctgatactagtaatttgaatcatctctctttttttcttggtcaattatgctaaatatttatcacatttgttgattttttttcatagccatattccatatggcattccaaacttccacaatcaactttagtttcatttttctctattgtttttatattcttgattttatcaatgtccactccaactttattatttcctgtcttcttgctttaggtttagtttgcttttctttttccagtttcttaaggtatacagttgagtattattttgtaatttttcttacatgttaatggaagtattattactataaatgtttctccaagcactgctttagctacgtctcataagctttggaatgttgtcccttcattttcattcatctcaaagtattttataaagtaacttgggattgcttctgcctcgttgttttacccacacgcagctggtaagattcactcattgctgtattgttttcaacaatatcatgggcataaattgttctacatataaatctcataaaatttaggctgtgttaaaggactccttcctgagatcagtgtttgagatttgttttaatcacaaatttgccactgggagggctccttccagtggtctccctggttctctctggtaaattagacagcctgtagtttagcctgtatctccgatgaatctatcaatctcccaattgcctttcaccacaggttccagttattaagaacacccttatggttgaacttctccacattttgttgccaaaaaaaaaaaaaaaaaacctaaaaactaaaacaacaaaacagtccctttggggatagattagcagttatctgtttatggcttgcttctttagaggcaaggaaacatatatgagccacatttctggagctagaaatgggagcaacatcatgtttctttctgaatgaccctcccactttaggagctgaacactcatgggagagggaggacagtgacctcagattctctcagcttgcttctcccatgtggaaaccccacaccatgatatgaggcaagaacaagggggaccccaatattctcggcaatgctgttcttaatttaaagcctctgtctaatgagcctttgtctaatgaggtagagctgggtaaaaaaagggcaccatcacctctcatctgtactcactggcagcttaacctcatgaacatgtagctggggccagaatgagaggggaagacagctcacttacagagagctaaggtgggagagagccctgtgttcttggatgcagcaggctggagtggagtttccatttccctgagctgggaggtagcagaagagtagatcttgttttaaatgccacagactattactgttcttactcagttttagtagactttcttgaataactatattttttatcttgctgtatacagaaaaatagcattttggagactttactgttttttaaaaaatagttttcagcagtcttactgggaaatgagtctgcagaactcctcatactgtcctgatggaagccttggctaaatgctttcaaagacatctatttatatctatttcatgctggtattgtacctgcacctaaagtgactgtgcccgtaaaatagggagtctagttctattgtttttgagtccaattttaacatccatattgactttttacagcccctgctttcttctcattattgtaaatatttatagtattaattttattgtgtacagaggcatatttgaatgattaaaaggcaagcaccagccttttgagaagactttatcaatcactctagcacaactgttcacaaagcaaggagtcagccgcctcccatataggcatcccccaaccataacgtggagaagcagatcccagttagtactttctatgttatagctcctctagtttgtaattagtgtttgaaaggatccagagtaacatggaaaagattcactgtcttgattcactttcataactcagctgtcacttgggtctttcctgcccatgggagatttaggaaaatgtgcctgatttcatgccagggagtccaggacccttgtctcaagggttctatgaactcctggtgagtcagaggcctgtgtgccctgccctgtttttgagcctgtgcagtcctgcctgggcatgtgctccagtgcctggggagccagccacattatcacccccgccaccatacacccaaatgtatcaataattccatgaatttagtaattttccaacatttttgaatgtgggcctgaagagagaagtaattgtgaatccctgggctgtccgtccacctggcccctccctgcatcctcagctgtttcccctcttgtgcccctggctgccagggtgctgtcattactcaggcatccagttggaaagttccaggcacatttcggcccagagtcacttacccagagcctggcttatcaaagccttttcttaacaatgggagggaggttgaatcttaaagcaattcttctctgttaaggcaattatgcattttttcttattattacattatttatttaagggctgtattacatgggatctgactggagacgatagaggttatttgcaaagcctttgaaaatgaactcagaagaagtttaatccactctcccaagggaaccatgtccctacaaaaacttaaaactgcagcaaaacagaatagagagggtttgcttgtgtgcctgcagcagagcacccccttccttatgtaaacacttacaaagctgccatctttgcacagatggtggctgagtggggtgctggctttgaaggctccctgttttaatactggtgttttcctcctcaggtctcacgcacgaagtactgtaagcttctctatgggcagcactcatcaagccagaaagtagcttgccatggcttcttctatggggtgttttctttattatgttcataaagcaaaaaaaaaaaaaaaaaaaaaaaaacagagagagaaagaaaagaaaatcagaagacaatgactactttagctctcttggcctctcaaggtgactggtgtgagaatagcttggtggctaaggacagaaaaaaaaatcttttgtttatctagactctagggtatttctgaaatgaagggaaatgttcagagaccattaaaaatgcaagaggccacataaggggctgagtcatatagctgtcacctcaccaccttggaaacaaaacgctctatcatgtttgtttagctggtgacaatgatataatgctggagatgaggctatgtatttttttttatcccactgacttggctattgttccttactttaaaatgatcccctttggttactctaaagaacaaaggaaaaaaacaatagatatgcattttgctgtttagttaagaaggaaatattgttttcattacaccaaagtctgacaaggaatttaattcactcattactccattaaatatgaactgggcatctgcaggggtgttagagtcagtggcagaagggtttatgtgtcctgtattcttggagctctactgtaacaactgatggcattgaaggatgcaccatacacctgcatgtacacaggaagggctttcacagccagaatagggccttgcacaagtgagcactgaattagtactgaatggatggaggaaaggagatctggttgtgggtagcatgaaggatactcttagatgcgaagtcagagaggaaggcactcgttacatcatggagagcctcatggacaagctgaagagtttgatattgagtcagagtctttcagacatgaagctgacatggcctccggagttctgagacagttctgttggcctttcctggaggtgacgttgacccaaccactttaatttggatctatgaatggtggagtcatttaagaaagtgacacatccagccacagagagcagtgtttatggagtgatgtgtattaacatgaatcaagcttcttttttattgtgaagctgtcatgtccctatacgatctcgtctttaaactcagaagtgtattgaggctgttttcaaagaggttttcttctccaggaggaatgtgagtgccagctgccaaacactgttttgttgttgttgttatttgtcaaaggctctctttatgttaataccttgggtctgtaatcctcacagccattctgatttgcatatgcaatgattggaaaatgatccaaatcaaacttaactgaagttgaaataataaaggtgcttgcagtgaagggacatggttgtgaggtaagccccatggtctcagctctgctagttaataagctgagtgacaaagaaaaaatctcctgatctctttgggcctcaaatttttgcattttatagagaggaattggtatccattctagtccatgtacaggtgtgataagagtaaaatgaaattattgatgtgaaagtattaatataaaggatataagagcattaacgattagatgagatcctgcttcaggctggagttttgaggttaattactcagctggaactgtaactccctccattcccttggagttgtgtgacccaaacaagttatgtagcttctctgagatccacctcgcttctgtaaatcagaggcagagatagcagcatcagtattttgtggggattaattgggataatgtgtttggtgcctcactcacagaggatacaggacagagctcatgtcctcagtcttctcttttggtttccttttctttccagtgggtaatcatgaggactgagattacaatgaggaagtttctattaataatacagagatgccagctacacatcaagtgctcacataaatgtttgcatcccgctgtttgctcagccacccttcctcagtgccatcctctcctcctcttcatgcatccaaaggaaacctattacaattcagtagctgaggacagatcactggaatttggtactttgttgaggcaccaacccatgaggagtggggtgtggtgtggtaaggcaggaagatgagaattagggaccaatgtagtctgaggcagcggggaccccatattccacagtcagtgctgtaacacttgtgctggatgagagcttaacgtgagaccacgggaggcctggtccccctccgctctctgctcttgccctgtggtggatgagggagaagtcatctttaaaggtatttcctactcagatatgtgtagggaatagcacatgtatggggttgtggatgtgagtgtgaatagactcctcgtggggcagatgatggaaatcagtgggcatatatctataaacacataatacaaatattacatattttacaaatcctgttattttctaaagtctaagattagtttctataccaagaagaattttatgcgtttaatttttagaggcaatgtgacaaaaagttcctaaataaatgatttttaaaatcagaaactgaaatacagtcgtagagtatgagacattagtatgttcctttaattctcttagaagccatgtatattttttctttctaatgataaagttttatgtgctcattattttagaattcaaaatagtataaagaataaaacctaatggttatgcgattatttcttgtccggataacattccagaatttatttcagtctgactgtaaatatgtgcaaacatacttacatcattaatgtaatactgagtctatgattttctattttgcacttaatattatataatagccattttctcttcattaaatattatttgtagagatttttaatagttgaggctgaaatcaatgtatttgttataaattatgacttttaatttggggggaaggacttttataaggggagccttaagctcaggaatgcaaagcttcataggcacttggtataacttgacaagtgatttttcagaaatgtctctgcaggtgcattgccacctcttttgttctgctcttgaagtgtctgactttcaaaatatatgtgtgtatgttttttcttcctctcatgtattattcctgcttctgttttagcattaattaatatattacatttaatgtttgtggttccaaaatgttgtacctcaaaaaattgtagaatatttcttgtaagcacctttacctacagataatgccatttatttatctctatttaatcaccgattatacaaataatgtggacataacgtattatctagaaatgttagatcaatgagtgaacatagaaataaatgactccttggctattttgcaacattttattctgtggaagtatgaaaatcaaataaatccttcagggaatttagattattgacataactgtgtatgttatagatagaaatgaaaaagtcaagctaatattaattagatatttacatcataatgaatttaataatcttcgaagagtgtctaaattgttgaaggtgccatgcttttataattttacgtttagaagtcttcttaactattaactgttctagagagatcctgagtaacctatttcaacctatctcctatctgtttcaggcatattttctctagagtgtttctattttggaagactggtagaatttactttttgtttaatttctgtgtaatttttcttttttcgtaattcatgttcttcacagtaaagttggaattcttttagttcaaacgaaattttaatttgaaagaattttaattattaatgtgcatatgtgcttatagagaatttattagataattactggaatttagcatgaatttttcaaaagtcattagcaaaatatacttaaagggctgcagtttctactaatggtaaaaatggatcctaatatgcataagaacatacagccatctctgtgccactgtctcctcataccattgtatttttatataatgcttcctattcatgtttgaattgttttatctgcttttatctaagttctccaaataaatagtggccttcttcactccaagaagaacattcttctgttctggtcatattctgaatagatcctaaatttcactgcttatttatctacttagttacacagtgccagacattgttccaagtaatttgcaaggattaattcagtcagtcctctcacaaccttattaggcagatactataattaatctatttgctagatgaggcaactgaggttagaaaatttaccagactttccagggtcaaacaactggtacgtggaggagctggattcagtagtgcaaacactacattttgtcatgccatcagaatcattaataaacatgagaccagaaacacatctccatgcaacacatcccctctgccctggaacataatgttatgcccagacacagctgagagctctcccaggagcatttacaaagctccagtgacatggtgcttcaccttgggaagccccttcaaccacctaggcctcaatcccttcttttcatgaaacgtggacatatagacccactttgggggatttggtgaagacacaatgggttgatcgtgttattcagcagcatagcttgtaacatactgctgagaagggggatggccacagaatatatacctcttgtaccaacccaatgtgttggcctttaacaattctgagagatagccaaatagaaatgttagagaggtgcatgtccgtatgcttttatgtatattttgtcagtgtcctcaccaacctctcagccatgtgaagattagaaaccattaactcgaatgatgggaggctactgtggccatgcacagacctcagagggaagtgacatctgacagcctgaaattaagacaagaggacagaaaaacagaacaccagggcaaagagctccatgggtgctcacaagggtgatctatgtcactgaaacaaggtcacattgtcttgggtcccctgtctttaccagacagacttgaaaaataatttgaccataaatctgttagggatcagcctcatttaggggaaatttacttaagtgtaacacattttcccccagcaatgctttgtaaatgagatgagtatgattgctaagactgggcatgccatttcattcattaaactaatatttaccagtgctaggtactaggtactcatactgtgcttggtacttagaaaagatgcttcagtgaacaaaatggacagagattttagtcatcagagtatattcatgtatttctgattttttttgggatgctatgatgtgcccaacaccacctgagataagggagtagaataattcatatagtttttggaggacccctacattcctggagattgctatttgaggttaccttagggtatgagtatgagctcatgtcttgctgatgggacaccagtggaactactgtctataactctacaatgtgaggaacagagccccttaggcaggagacttcctttgcagtcatagggcctgtccacctaggctgggttgaagtacaattgggataacttttttatataacaaacaaacaagtgcctggtaattacatatgcaatccctttcatcttttcccagccaaattttaatcagtacagaccttgaagcaataaggccagcaatcatgcttcccagggccagtttccagcccagcttcccacttccactagctcaggactttgctttcaccgtttgcattttcaccttccctcttttattgactgggtgttgattctgggacttgctgataatttttttaaggtaattcagtgtctgtgtcaatataaatggaaaacaactaactgtataattgacttacaattaatttctgtgtcttatattgagaatccaaactcccaacaatttggagtaattacttcctttttctccctctgtgtgaaaatggacttagaatttactcatcttaggtcaatatgataataatcatgtttctattttatttaactctcaggtttggtgatggttatacagtcaaagtttggctctgtaaggaagcaaatcaacattgcactgtttctgaccacttgaagctttattttccaggaattcagttcaaggtagtgctaatatcttgtattatttctttgttttcagctaaaaaaaaataataaatgtacctgtctttttttgtttttattctatgctgttataagatactacttgttaccttagccacattgcaaagtataggccctgcctccctaccaaaaatagcatggatagctgatattgcttgaccactctgaagagtgacaagcctgcttaattgcttcctggattggccagagcagcctgtgattacatatcacgcctcttatctgtgggcacaggtccattgcataactcatcttgttcagcatagaagattgcaaaagctaatctcttccatatatttgctgtagggtttataggcttgatggtttcagcattgcttcacagaaatagccctatgcttgagatcacaatcctctataaacttgctgtcatcaagtatggtcactgaaccagcagcatcttcattgcctgggacctgttagacatgcagaatcacaggccccaacctattgaatgggaatctgcattttaacaaggtgacccggagattcctatgaacactgaagtttgagaagcactgtctaaaaatctcttggataactgtgggatgctagtttattataacttctaggaggctgtagtccataaagtagttatgttctatttatttcaacaactgtcatttagtgaaatcctactatgcaagaagcatgctgtgtgagactgtcattcatgctcaattatgactctgagtcaccctataaaacagacataattatctccattggcatacatgaagacaaggatcagaggtttaaatatcttcccaagtgttgctcagctaatgatgagaatagtgagagataagcccaagtcccagtgtaaaactcagggcccttccatccgtctctgttaggccatgttaaattcctacatttcaaatatctttgggcatcttatgattccttaaacagggcttccccatgctgttgcaaggttagagcatatcagggggcagaacagcaatgccactcagttgaacgttgtttgtcaaatataccccatgaaaaattgtcatcaataagcattcattggagactcacaaaattaagtgtaggttgagaaaacgtaactgaatttttttgccaattaaatgtagtatgatcaattttgtttaataatgctagttatatgatactttttttttttttttttttgcttttagggacagcacctgaatttattagaatatcatgtgccaaaaagatggggatgcctagctgacttgttcaaagttatagagaacaataaaaccttcttgaatattaagcattattccattaaccaaaccactttggagcaggtatagtatcttgaatgattcaggaggttgaattttggtctgttcatcagacctaatgtagccaattttaaaattaatcgaattgcttcaattcaccactttattcaattcatcttgttaaattttataaaattatgataaggatggtgagtgtcagaaagtttgtttactgtatacccttctacttaagatagatattcagtagagtttcaatttgttcatattattttgggcatttaactaattaaatcatgtcacgttaaccttcctatctccaccttactcagccccacaagacttttcgggggggcttcactgtaatcaaatgatagctaacttctggggaaacaaaaagcgtttcatttactaagagtaccaggaatataaaaatacatcacgacatatttctaaaaccaggcttaaggtattgagaacttctaggtgatttattattataattgtctagaaatatgaatgttcttagagttgtgtcctcaatggatttatatatttatgtgatttgggagggaatggtatgaattaatgatctgtggtttttagggcaagttggccagtgttctgagacaatgtctcctttctaataagtgagaccaaagggttgtattcttataagtaaacaacatttttatggtttttttcaggtatttattaattttgcttctgagcagcagcaaactctacaatctactcttgatccatccactgacagtcaccacacacatcacttgcccatctgagcactaaagaagtttccataaggaataaaaccttgtcttccattacaattaacagtcaaggataaaacaagcacgcgcacaatcaaggagctggaacacactctccaggccgtcaaattattctcttgttcattttctattttgaatctccttgttagttaataaccaccaaatggaaaggtcattctttctgcagacttttggggagctcctccaaaacatttgttctctttaccatgccagatggacaccagcttctttgtgacaaaggcatgaatgatttgacagtgtccaaactgagacattctggagctggaaagcctgtcacactagagtgtgtgtgacatgtccactctaaacatgtcacttttctgttaagaaaactgagccccctccccacaggttaaaaaactttagtaacttgtttgtatagaaaatagtaacaaggactattttctattgttgtcatctatttactagatacatgtttttaatgattttaatgtaagcttttattaatactgatgacattatatggtatgatatgaaaaaatcaccaattttttacatataaaagatacctttttaaaaaaataggttttaagagctcttttagtatacactttagcaaaattaattaaattgaactagttactctgtatcaattacagtagttctaccagaatctcccaggttataatttatgagggtagagaaataaaatgtagatgcattttctttttcttcatttggatgaataattactgttttttgttattctaagtcagtgtttttcaaagcgtagtggtccccatattagctgcattgccatcttctgggagcttgcaagaaatgtacattctcaggatccactccagacctattgaatctcaaattctggggcttaaacaagcacattccaagttaagaaccaatgacctaagggaatgtctggttacctcctagttatacaagcaaaatctgcatagtatgtagtcttttttatttatttattttttttttttgaggcggagtctcgctctgtcacccaggctggagtgcagtggcgcgatgtcggctcactgcaagctccgcctcctgggttcacgccattctcctgcctcagcctccccagcagctgggactacaggcacacatcgccacacccggctaatttttagtatttttagtagagacggggtttcaccgtgttagccaggatggtctctatctcctgaccttgtgatccgcccccctccacctcccaaagtgctgggattacaggcgtgagccaccgtgtccggccgtagtttattttaaaatatatttttaaaagctttgtaaaaattatgtcattctcagaattgttgtcttcaaagcattgtcagatgtagagtgctcagatgtggctcttaaagactatatacatctgaatttttcatcctatagttagtaagatgcataaaatcaatccactactgaaatagtttccagtcagacatttctgagttcagacatttctcaacattcttttaacaacatttttctgaatcctcaatagaaaatcacattaatcttattttaaaatttggcctttttcaacactaacgttgagtaccggtagcttgtgatcaaaggcatatacttccttatgagatttctttactaaagcaagatttcattaaatctctatttcctaaatatcattctatacaaaagatattttttaaacggtaaggattaagacaatcactgatagctttgttgtgagcaattttgattcccatgtatcacatgaattacacttccttaaataaattacagtttatggctgtatgatttattctctaattctaacatagtctagttgtcaaaaggaaatatgtaatctttttatgattgttgaatcaataaataccaatttgtgaaacatgaatgtgtttaaactgcagtgaataaatgagatgtgctttaatttaacccga

SEQ ID NO: 15 - DNA, 66034 bp, Homo sapiens
gggcggggcgaggcggggagggggccggccggaggcagaggctggagggaggcggcggggacagtttgttgtgctcggaacatggcgggcgtcggcgacgcggccgctccgggagaaggcggcggtggcggcgtggacggcccgcagcgggacggccgcggcgaggcggagcagccgggcggcagcggcggacaggggcccccgccggcgcctcagctcacagagacgctgggcttctacgagagcgaccggcggcgggagaggcgccggggccgcacaggtgaggcgggcggcgctaggccgtggcgggctccgaggggcggactggggaccgagggcggcgggggcgccttggaaccccggcccccgagccgcgcggctgccgttgcctcccggggctccccaggctgtgggcgcgcggagccgccgaggctgccgaggctccgcggccgttgacagttcctcgggcgggttgcgcgcgcagccccgaggcccccgcggccgcgccaggccaggtgtgccctagaaggggtctgcggccgggaaagttctgtccgggtccttgcatcgccctcggaaggtcttaggttagcgggcatctcccacgtctcggagcccaaacgtgagaagcacacggctgatttcttaattatattcatgccaaggtgactttttttgttctgtattttaagcaaacttgagccatagaaacctgttaacttgccctgcaagtagatttttcacagacagctgacggtgtggtagtgaccatgaagttcagtagttttgcccagtacagaaatatttaacactccataaaatgttgcatctgaacttttcctgaactgaaacttatgccaaaaaaattactagatgagaaaatgtgtacttatgaatcctacattcaatgaccagttttaaacgtattgttacaatgttacagtttctataagctgtaggtttttattctcattttaaaagaatttttaaaacttgcatttgtattcatattgcagttacagattagttttaaatgaaaaaaggttttgagatggatgtcttcttgaatatagagtgaacccaacgttttaattctcaagctgtaaacagcaactgaaccataactccattaaatttcttccaactaaaaaattacttctgttgtccaaaaggggctgtgttagccgttatttcctgaagttcatgcaaataactaagttgtgaggctgattacatcattgattgtacttgagtactgaaattttaaaactacttaaggggcataaagttgatcagatgcgattctaattgatttgctgattcccagaactggacgtaggttctatttgaagcagtctatatttttggaaaattacagacggtcttgtttggtctttttcaattaaccacttaaaaattctcaaccatactttatttggtttagttctcagttaaacatttgctttcaagagtatttactttcttcattggcaggatctcagtaagacaaaatagcaaatctctcaactgtctgtttacttacttagacttgaatattaaaagcactctgttgtaaatagagatagatgtagccaggcttcactatactttctttaaaacatttctcagttgcaggaaagccaccattttaaaagcctttttttgttgtttgcgtggagaggaaatgaagttgtttgaagcctattgatgagcacagatcttgagcttgcagtatcacttaacacttcttccctggctttttctgggactggatacctggacttccatggacttcattataccacgtatccattcttcaccaacatggttcaccatgtttaaggctggattttttttaacccatagttgcaggaagtcattatcagggagatgcctccaggtttagctgttggggtagtccttgttctttccccagttccattgattttgtgtgaggagatgtcagtggccactcctgctttaccaagtcacactagccttggcgatcaggatttaggtgagaattccaaattccaggagtatttcagctggagccactggccagtgttctctctgagcctccacataagcccctccttcttttcccctggtgtccctgctctgctagtcacatagctcctgccactgctagcacccagtctgtagctccgataaccatatttgttagaggtttccccactagaaacaattattttagtccttcttcaatgcccaggctgctaagtctagcgctgccctcttcccctgctctgtaatccttccttcccctccttttaagaatttttaaaaacgattccctaggagctggcctgggtcagagggcctttgagtggcagcacctggagtcatttggatagcatttctccctgaatcaaactagtcctccacggctagatgctcggacttaaggtattacttgttgatttttttatattcttgtgtgcctctgagagtctagcaccactgcccttgagatctagatccccctgcaagttaaggcaacctttggcttttctttttgaaagtcataatcttagtgtcttggtggctgaaccatcagtcagttccaaagttccctttatcatttctcacaaggaatttagggctcctacaggtaagacatttgttgatcagtcccaacagcctagaattccctaaatgaatgtacatattaggtacttatccaaactctttccatctgaataaaataaaacgtggtgtctgaggttcattttttgttttatatctctccttgttgatttatatgtttagaaactagatatgtatatttgtctgtatgaatagctgtatatgctctatattgtattatactaaacatgtgtctccattaagtctaagctttcttttcctcatcacttcgttctcagaactcccgttctgacttatatttagcctggcaataggctgacgcatgtctcagatgcgagtacttacaccttttaacatagttagaattgggaatcccactcatcattcctgtttttatttgctctctcagaatggtcattgtgtatttccttgttgcatatgtggttactggccttgaactctggatgtagtggttatcaagaactgcagattgatctcttctgtattttcttcctgtccttgaaaatactaccaacttctgttgttccttttgacataaaaccaaataatcaatgttatgtttttgtgcttgttccccacttgattcatctgcagaagtcctaggtaggagagtttctgtatagccatatttttatttaggaatctaagtacagcaaatcaactttggactaagcattaggaaatctgtgtttttggcttggttgggttgttgaattgctttgtaaactctgtgcttgcttagactgcttgcctaatcagtttggttctgtttcataatgccactactagatagttcagtatctgaagcatctaggttgcttctagtcaccatggagacttaacagaaggcttggtgtaaataagggtagcacctgtgagggtagcacaggtgaaacagtacctgtgtaatgcaggtgttggagatgcatggggataggtattgcttgtaaaacaagaaagcctgaagtcgggtataggtgaacatattgtttctactggtaacagtgccatggacccatttctttcttctttaacagtgactctggacttctaaaacttcaacttattatccatctcttttgcctctctcctctccctttaaccatggttagacctcttcttgcttcacctctgttagagattgagcagaggcaggaagaatgaaacccagaaaagtcaactgaatttttagcaatacccttaaaagatttcgagtgggacgaaggttttaactattcatattacctatgtcttattctttgtgtaactgaaaatttgtcagtttcttcttacaaatacatttttattaaaatatgttttcatttaaccagtcttcacctatatcacatagttatcccagtggccccaaacttaaccaaatggatgattaaagggtgactgattctaaaattatgatctagagccaattaatttgttcacaaagaaaaataaaaataataaaaccgggaaattacttggagtaaccacaaaccagatacaaagtaaaattagctacttctgacaaactattgctttgcttttaaaattctcacttgctttacttaattagtatatatagaccaaacgaacaatgaaaagttacttattttggtttttgatcagttcagtgtcttggcttttgacagtttttaactttaacttagtttacgctctgaaattcaatcctagcagctcatttgtgctccaatttggggactacttgcataaaagaagtctctggaaagcctatatagcattgactgtcaaattaatgatattctattctcatttgtaatcctttgctttataaccttatgaccttggaaaaagtcactcctttgtttatacctgttttccatctatacatgtgtaaatattctactctttactcctctaaatgagactataaacattttttcaaacatcttaaaaacttgaatatactgtgtgaaatggttctttacttaatgtttgacttaggaaggcagaattgctgttgtatgattgagtcccagaaaagctgattactaattggcctggtacaagagtgtgtctctgttcaataagcttatttaatattttagtgtaaccttaataaagtttactaaagttttatgttatttaagactatggagatatgcatgtttcatattttcctaacagttaaccagtattactttccaaatttttaaatgctcaatgctattttaagaaagatatatttagacatattactgaacatataaatatatttatgattactcattacttttaattaatactttttaatctttggttcttatttctaaaataagctttcttagaagataattaaacattgtgttttttcttttaggggtgaagaaaaagcaatttatactatgctttttctgaatttaagttctggatcacagagcaattctgtggtaggagatgatatcatgtaaaaatatgctggaggggctgggcgcggtggctcactcctgtaatcccagcactttgggaggctgaggcgggtggattgcctgagctcagtagttcgagaccagtatgggcaacacggtgaaaccctgtctctactaaaatacaaaaaattagctgggcgtggaggtgtgcgcctgtaatcccagctacttggaggctgagccaggggaattgctggaacccaggaggtggaggtggaggttgcagtgagacgagatcgtgccactgcactcacgcctgggcaacaggtgacagagcaagactgtgtctccaaaaaaaaagtatatatatatgtacgtatgtgctggaggaattgatttggatttatgattggtattattttcctcatattacatattcacagttgacggctgggcacggtagctcacacctataatcgtagcacttggagaggccaaggcgggtggattgcttgagcctaggagttcaagaccagcctaggcaacatagtgaaaccctgtctctataaaaaatacagtgagccaagattgtgccactgggctgcagcctgggcaacagagtgagaccctgtctcaaaaaaaaaagaaaattcacagttgtcaaaacatagttcttctaatgttaagcacttgtttatgctataatagtaaaatgtttctttttttttttttttgagatagagtctcgctctgtcaccaggctggagtacagtggtgcgatcttggctcactgcaacctccgcctcctgggttcaagcaattctcctacttcagcctcccaagtagctgggactgcaggcgtgcaccaccatgcccagcaaattttggtatttttagtagagacggggtttcaccatgttggccaggatggtctccatctcttgacattgggatccacccgccttggcctcccaaagtgtctatttttaaaaaacttttactgaatgatatttcttcctggtaagattgggataaatgaactaagattaattgacatcttaaaaactgaaatcagtgttcagaaagtaaatatttggattattggaaaaatacttatttttaaaacgtagaggtagatgtttggcataacaaatgagagtgactgttttgcttagaaggaatgaaatactgcaaaagtctgacagaagttaagatgtacttagctgtcagagttcttggtgatacccataggtaaagaacagtggctttgctaaataattaaccagtcaactgtagccaaaattataggacagataagttcagataggtctatagaattctagagagcaatgtttaacaaaataaaaacaagcgaaacactgaaacgcaggtatacctcggcactggagattgagtggcgctctgggaaatgcagccttctccaggaaaaggtgggaatggtcctggcagagcagaagcagcgaggctaactcgatggctctggcagtgaggcactgtaccctcctacctccttcaccatgaatcacagccaaattataattgtcagagagatggttgatcattttgatgtaggggagagagcacgctggactaggtactattcccaatttgtcacttagcttttcaatgactttggacaagtctctcaacttctgtgaacctcagttttttcataatatgaaaatggacaaaatatggacaccattaattgctctgtttaactctcatgattgttgcaagaattgtatgaagtaatgtgtgcaagacctttgtaaactgccttatactataaagtagaaggatcctaatccctaaaataaagccacttacgcaggagtaggtgagaaggaggtaagacaaagctttcaagatatttaccttatgaaactttgttgttgtggttagtatttctttagtgtatcatttaaaaccattccccagcctattagcatcgcgctaattgtacgcaaagtttacccttacattcagaactcaccggcagggctggacttcgagaatatagggatacatggggcctgctcttagaaagttcatggtcttgtaagggagcaactagtaaagagtgtagcttcacagaagtcagcccaagctgcagtgggagcacaggtaaaggggagggacagagggctcctaattttccagaagtaacacagtggcctgtttacaaaggcacttgaggcaataataggcaaagctatctaatggtgaaaagcacactctctagccatagactgcttgactttgaattctggcttttctgcttgcttcctgtgtgaccttggagatctccttagcctctctgggccttggtttcttcatctgcaaaatgggcataacagtagaacctgtttcatagttgtgagagctgtacactcaaaataggttatgtttttatttgactttttatattctccattgtagaatctaaactagtgtttataattaaaattcttggatatctagaggtagaatccagacattgtattgttttgtacttgtaattaaaacactcagtatttatgttgtatgataacatgtttacagaaaattacttagatgatatatgttgttaaatatacttatttgtcatattaccttttaatgatagagctaggattgcagaaataaacattagataaccaccaaaccagaactgattaatactacagtacttgtgaagttaatatgaagtagttgaagacactgcgtcatgctttgcagtttttatatactttcatacaaatactgtcttagtcctttgatgattctgtggataaggcaaacagctgacaggtattaaaaaactgctctaagcttccattttcttttcggtgaaattgacatctgtgactggagcagggtcacaggactaatgtttaagacagctggtaccaggacagccttcctctggttgctaatcccatgctcttctgtggatcataacacaactctcattatggtcaaagctgtcatctccagtcaccagagaagacaccattgtggagaataattttccaaataaacctctttttcttgagatggagtttcactcttgtcacccaggctggagtacagtacacgatctcggctcactgcagcctctgcctctgggtttcaagtgattctcctgcctcagcctcccaagtagctgggattacaggcacctgccaccacacctggctaattttttgtatttttagtagagacggggtttcgccattttggacaggctggtctcaaactcctgacctcaggtgatcctcccaccttggcctcccaaaattgatgggattacgggcgtgagccactatgcccggccccaaataaacctttttatttaatttgctttttaaaattgaaaatgattgtgcagtaatgtgtttctgtatctctttaacccagatggcattcttgtgggctgcgtaatttctttccttgcacttagtgtggacaatgaggatctccttattcccaaacccagggcactcactggctgtgactgcatcatggtaccctgttccctcagggggtttgaggttcaggtacccgttgggttacctttacagtcacttagctacacatacagagtagaggctcctgaatcagcagcagctgctaccttgagtgaagcttttcactccttccctgctaactccccaagtctcagaacaattctgtcacaatcacaagttcttttctcaagtatctggaatgctcttcttttgtcatgtctgatttttgttttatattggtacgttgttatttattaagcaattccattactattgaacattttgattaattccagttttgttttcatatagatcatctttcaatagagaaattcagcggtaaagaaaaatgagaaaataccagaaattatcatatcagaagggacaaatcacccacatgaaagtttagctcagtttgctgttcacatcacttcctcaattctttgtcggttctgttctttgctgcctgactcctaaagagactaatttggccactccgttttatgtctaattctttcttttcttagtcacttccctttccatttcatttttagcttctcactgtctgattctgtttttgttctctatgatttttcttcttctcctctgacctgtatattgttttagcaaagatttgttgagtacctgttatgtgctgggtcccagtgatgcaaaggtgaatgagaaaaccagacaagaaaatgaatgtagtatactgcagaaaatcataggcaggtgcaggtactgtggaagccgagtaggggaaaggacagactctgcctgagaaacttagggaagtcttcacagagagggtaccgtctgggcatgttcactcctggaaaattggtaggggattctcagaccaaggagcagtgtgaacccattgacgtgtttgggagaaatgaaaagtagtataaaaagaaaattgtgacctagagattcaggggaggcaggtgtgaagcatgactaaagagatggcctgtgtccagttgtagaggttctgggatggcccgcactgagaaggtaggactttattctggaggtaatgaagaaccactgaagggtttcagcagaaccatatctgatctgtgtgagctgctgactggctgccaggtggagttagcattgaagggaggaaagatgggaagaatggtactcaatcaagaagcttttgcaataacctggagagagatggagaggactaaaccagggtggagtataggaaaaaggggaaaaaagttaatgttttaaaggaagaattggtagaccttggtaagaagagagaggggattgtcaagattggccctgggcttctagggcagcaagtatgtcactggtaatgccaggaactgaagtcaggactccaggagaggtgctgaatcagtgggcaagatactggtttcgttttttaggtaatttccgtgtctatgggatgtccaggtagaggaggctgttggaaatatgactcaatagccagagctgaagatgtgattttaggattttgatgatggttttaattttagttaggaatctataggaaacaaagcatgtgtaggaaacagagtaggtatagggaataaatacaagaaagaatgatgaggacatattggagaataccatcattaaaggatggctgacatgttactgtagtgaatagagcactgaaccagcaaacacttaaggatcgggtacaggaggaagggctaccaaagagactcagatgagaaaaatcagccattcaagacagaagagcaccactgaatcaggtttaggtgacatggagggacagggaagctgctgtccggagagtgtggtgaagtggcctctggggttcaaaattcagagttcactaaggtcagtgaaaaattatatatgtggaatctcctctgctttctgaaagtcctgttgcttctcgatttttacatgaaagaactgatacttgtagatactaactaatcaaaacatactttttttcctgattggaaaactgactgaactgagtatgatttgtttatctttcattagtcttggctgtttttgtttgcaactcaaaaggttttctttttctcaccttgaaagagcagatcttgttctggttctagccagcgtagaacatattagaaagttcctaaccagaagttctactctatgtggatttggttagactaagtcctttaaatccaaacatctgttaatttatacaatagagtttacatattgcgtgcacttaacccatgtgacttcaactgtaaatgtattgaaaagagaaagtacgacacatgtagatagattccgcctcctgttgcgtgaggctggcaaaggtggaaagaagtctgctttcttcttctgtttcaactccaggtatctctcatggtaacactgactccccagacagattatgaatctggtatttaaagaagtgtgtatgtgtatgtgtgtacatacacatatatatggaataaaccctaacataagcaagccacttgacataatactcaaagaaccaggaatccgttttaatgctggaggaagtaagctgttgtagacctattgtttaaaaccatagtcaagttggcttctaagtctttccaagggcttttaaggagatatatatatatattttgttgttgttgttttgagacacagtcctgctgtgtcacctacgctggagtgcagtggcgtgatctcggcttactgcaacctctgcctcctgggttcaagcgattctcttgcctcagcctcccaagcagctgggactacaggcgcccaccggcacgcccggctaatttttttttgtacttttagtagataggtttcactatgttggccaggctggtcttgaactcctgacctcgtgatctgcccacctcggcctcccaaagtgttgggattacaggcgtgagccaccgtgcctggccaaggatattttttactataaacgcttcccccctcacatgtaggctttagatcatagtactcctagaaggtgcaactccttaagtagatctgcataaatgaaatcaaccttcctcccttgtcattttttggagggaacattaagaccacatttggtagaaaggaccacaaggccagctcagagcaaagagaacagtggacagttggaaaccttttggtaacctgcgttctggaagagagtttacctcctgcagagtaaaagtaggaagctgtagatgaagtaaggggtgctgagggtcattgaggggatgggctatcagggaagtgtaatgcactgggaagaggtggggtcgagcatccagagccttcgcttctcacctcaagcttccagttgtagtgagtggaaagtatataaataacttcctttgaccttgtttttctcacctgagatgagataactatggagtaatttgctttagaggaacagaggaaaaacacgggtgaatggaaagatccaaggaaagggaggtttttctgatccggttgaggttgcacttcgcgtaataactattgtgagtatcatgttggtaagtcttcatgtagggaaatggcattatttagatgtttgtgcaggatctctgaggctaaactaagaagggagctggggcaccagtatccatgtagttcatccaggatggttcttggactaaagtggtgcccgttgtgtgactttgctcccttttgactctatatattgctctattttatatattcttgacacctactgattttccttccatgtctgtcagtccaggtactgtatcacctgtaagaaccaagactgagctcttgaaaaatacttttctgactattctagcccttaataattattcctttccatattcctgtggcattttcaggttataccacaaagaagaatacttttctcaaaaatacttgctgatcattgtgtgcagttctaggcatagaattatagataacatttattttggtctctttgttttatatgtatattacctgtggccccagctagcgtggaagttccttgataaatactgttctttttgttttctgtcattttcttttctgtagagctttcattgttgaggttcctcagtgctgaactaacaagagggtacttccttgaacataatgaggccaagtatacagaaagaagagaaagagtatacacttgtttgcgaataccaagagaattggaaaaggtactattttttcttcattaccagacatcattttgaaagttatgtcaaagtattaattatgcaaaaaaatggtcaacagctagagttgagttttttaaataattgaaataatgttattgggggagtagaaatttccttacaggaagaagctttaaagttacattttttagtgtaagacccagtgataggatattaatagatctatcaaaatctgaacttttctgcctatcattatcattgtgtgctacatcaaaataacttttgtaaggaattaatctctacttctgtacccttttagttcccttcagttctcttttactagaaacaggttttttttcccccattcagcatgataaattatttaatttcagcctttttaaaggtttcagtttctcagaaagcccacatgtttataaacatacaggacagtctcttcaaagaaaaagatggtttgtttaatctttatcacaggaagcatcacattacagggtgagtgtagtaacagcagcactacatcttcacgtgtcttattccttggctgtgccttatcctatcaagaccaataaaataggctgggaaagcagccccttctcccctaggcgatgctagagttggtgagtctaagcaattccaaaatttcttgctaaaagaaaagaagaaataattcagcttcagctatattgaaacatgttttcatacttctgtagtaacgtaaatcttgtaatagtccagtcgtcttcttagaatcatactttctgttggagtggctatcagaagagtttggttggctggatttattggtacattgtagtaacaagaggtactgcaggcaatgaggagtaaggacccagctggtttggctgatgttctatttctgatagtctatcagtttaatagaagaaaaagagcgaaatgtagagtgacagtttcagaaatgttgctttatgtaggttcttggtgaagcgtcacttgctgaagttttagggagttctgtattagggtgggatttagagagctggtgagcaagcaaagattagagaacaaatatggcagtggtttgattgcctttggcaaggatcattaaatatgctcaactattactgtattcctgcatttctagaggactagagttccctgggggggcctgagggacttacagataaggagggaggaggagtgggcagggctctccacagcactcctctccagcgcagcaacagctctgtcttatacattgagatttatcgaagattttgtttggggaaaggagtagggtaggcggatgtttcttttacttggaaaaaaataaaagattaaaccagttcttgtgtcttaaaagactgttagcttgctttgcagctttcttccagcaataagccatgagatggaagtgtgaggacacagtgcaggggaagtgggaaggacagcctgccagggcctgtatttggacaggatagtgccagccacaatcagcttttgcccacctggcctcagccctctacaggggaatttgtttcctgtctttctgagtagttatgaactcccatttttctctggggagaacacagagggatttgcctgcaactcccaccaaactttatgaacacaaccaggggactgcttcaaagtgggttggtatctgtctcaccccttttattacccctcctgtggcaaaactaatgagcagtggcaacatccactcctgattttgttacctcagcagagacaggctggtttcacgcttccttctttctttctcttaaggcaacactgaaatagcaagcaatgttttggggtagatttctcacagaaactaataagcatttcatggttgtaattatgagtataaattgttttctggagaaaatagcttatacttatgtcttgatgagactaaagtataaaccagtgattctaaattgtggtccactatagaaccactaatgggtcaagtaatcagtataagttgccatcagaattttttttttaagaaaatagaagaagtattagagaacattgcctatactaagaataagtattgtttcatgaaactttggttccatttgtatgaatgtaaatgtataatgtcagaaaagttgcatcaacactgctcatacacaattgtaataattttctaatgatttttgttttccctgagagaggctttaggcctgtttgggaaaatttgatgtagtctcttagaacaatacttaagaagctttgtagcctaaatgtacaaaagaacatcatgattttctgtttggagcattttttcttaacttctaaaaccaagtgggatgtagaggaaagccaatttaggtttcagtttaattccaggcttaaatatctctcataactgcatgaattcactctgctatctttaaggcctttattttttataagtaggatttcacttaaagtttttattatgagttgagagcctatctagacatgcaagataacctaaataattttttattggctttttttgtttacattgtctattctaatatataatatcttactcattttttttcttttttcgatgaatgctatgatattttcacctaaccttttcaggaagagaaacttgaaaattaaagcgcactttgcttctacaaaggttgcaaacaccataaaacatgtaattaatttttatattttaagataaaggtcaacttaatatgtcttatcaaacctgtttactaatgtgaaaaaaaaaacaccccaatttttgtgttgtattgtcattggataaataccttatacttgacatttagtaaaaatgaattgcttatatattttacatagtatttccaattattagcacattattttcactcttaaacttcttattttaagctaagggtatataattttggagtgttttattggcttttgagagacatttcttctcttccaccataaatgtcctcccctgaccctacaaccccttgggttctatgtaccagatcttctgctgtttatgtagtccactttgggaactttatttttcttttttatacaaccaaggagattaaactatactttctctgccttctaaattgagaggcaagatagcaaagtgtttaaggggatcatctctaaagccgaactgtctaactctgagtcttggcttcacagttgattggctgtgagtccttgagcaattcacttaatcattctctgcctaagttgtctcatctatatattaattatatggtaagcatgtaaaatttttcacaaccttcacatcagcaactcagggggaatgcactactctgctagagtgagaggaatttaaaggttgcttgtccccgattacattctggtggatgtaatatttttctttgcagtagggatagctttcatctttgggatgtgcacagcaggaggtgattgggagaggtgtggtttttaggatttccctgtgtcccagttttatctcacattatacttttaatctccctgctttgcttgccactaaattcgactttgctaaccctgcaaggggcatgattttctggctcttggccctcttgggttgctgaccataggcagaaaaaacctctagggaaagctgtcttctttcctctttccttttacctaggctgtctgggggtaaagctgatctctttcatgaagaacataaccaatggccatgagagatgataacacaccctgacattttctgccaagccctatagagtctggcctcaatgggcacatgcctgaagcctacagttataacagaaacagggtgctttaaccagaggcttggtgaaatcaagggcagggagcaccagtttcctaaagaggaaattcctggtgagtgagttctcactgtcccataccccaccttgacttggacacttacatcccacctcttgtatccatttctgtgtgaataataaataatgtttgttatgtaaggattaggtgtcagatactgtcctaggcattttacatgtgtttgcgttcaatccattcaacagcctcacaagatatatatactattaaagctccaattcctttgtccaccccacggtggcagttcttcattgacttccagacagatctctccttccaccattgtttggtggaggtatgtgctagtagtatatgctctccatttaggtcccctaggaacagtttaccatgcatcaggtacaaaattgtcccttgtctaaggactaattttgtcatctttgtgaatctaaagctacagtaaatagtaaagaaatacacattataggatcttctaaaatttcctgttatgtttaaattcaaatttagaaagataaagatcacttacacacttaattattaatttgctccatctatattttgagtactttctatgttccaagaaggcacttttgcagtgcaaaatacagagataagactcacacctagcttaggagatatcagatccataagttattataatacaggatacaacgtgacaagtgcttttaaatagtacaaataaaatatgaagaatttagagaaggggaagtgtgcctagacaacagacctgggacgaggatccaggaaggaaaaagagagagattttgtcgtatatgctttgtaggatggggtggctatgctaggaagatccagaggtggaaaattgttaggtgtgaacaggaaaccaccgacacatgctggaaagaaagatagactggccaacctaggcaatgtggcaaaacgctgtctctacaaaaaatacaaaaattagccaggagtggtagtgcacgcctgtagtcctagctactcgagagactgaggcagaaggattgcttgagccccagaggcagaggttgctctgagctaagatcatgcaactgtactccagcctgggcaacagagtgagaccctatctcaaaaaaagagataggctagatccagttatgttgaatggtcaggctggagagtttagagttgagtctatggaaggagactattaaatatatatttcttaggaatgcttttagctgtatagaatggaaaagctggctaacagtcatttaaacaagtaggaaattatttttttcaacaaatctagaagaaaagaggtctcagttgttgcagcagattaatgaagctgtcacggacccaagtccttttcatctttctattttgccatccttggcaaattggctttgggtcctcttgcttgttgtcttctagtagaaagatgacggctgcaacctcggcattacatctgcattataaacaaagaaatggggtgggcattgccacttttttgactatgccttttataaagattgaaagatttcccagacgtggcctggaatacttccacttctgtcttattgtccaaactgagctacatagccattcccagctgcaaaggaggctaggacagtgaatgttaggcttttccaacaaacagaaaagaactgagaatggttattgggttagccatccgtcagagctttctttctggaaaattagtatagtcatattcaacatggactggaaatgagacaagcagggagagctcaagatccttccatgaatatagttaatatataatttaattctacaattaaaattctaatttaattctacaattacataatttaattctacaaattaaaatcttcatttgatttacttattcccctctcatggtatttatttcttgggttaaatatgtcagatgtatgttgtggattatcatgaagccttttagcaatattcttttccgtgtttatatatgttcatgtaagcttgcatatctggttaaactaaaatgaaaatattctgttgacttttctttaccttgtaattctgtgctttttggcaattcattatttcattgttaccatgccttgtacattatagctatttaatacatttttctaaaaattaaattcaactgcttaaatagaatgacttagttttcttaccaatgtagcaaatttttataagccttaaatttgtcagattgaaggtgtaagtattgatatattgttattactaggcatagactattattgttgaaagggggaagggttactgtcatacaggggaattatttgtaatcaagcatcaacaaccttagcttcttgagtctgtttgtaatagctgaggcctgatcaaggcatcagatctctcttgggttttactttcttctatgattagaaggttgtacctaggtcatctcaagaggtctaatagtgcatgattcattgaatgagtttgcctgtgaggaatggtgagggtagatggaaagatttaaatgtctagtggagtaacttaattttgcctttttgaaggtcgtggtggggttaacatttaggaaaaaataatccaaaagttcatttcaaacgaacggacttcaaatgtcatataaagcctttttgttttatgtcagtgtgaggatatgttaagaaaacgtaatgactattgtttcccctttatttcagtaaaacagtcctgggatttcattgtgaaactaatagagagtatttactcagacccatatttatggcagtgttttcttgggcatcctagtcagtttctgatttcataaaaacatgttcagagaatcatccctctaaattcttctcataatgcagctcttgctggtgacacacccttgtgcagatgttccccctccttgtcccccagcccctgctgtgtggctgctgagaagcaggaaagccagtagggatccacatgtctcagaatctcagcagccttggctggtgcttctccccttctctccgaggcttgtcacaccctgcttgtggtggtagtgaccacagcttccacgttctttctgcaactgtcttaccattcttaattttctcaggggaggttgggcatatgagactcatcagatagttctaagacaagccagcaaagcctttaggcctctagcacatttattaatgtatttaaaagataatttttgaacttggcaccatggggccatgtttatctttgtgaatcaatcacttatttctctcatttcagctttggaaacagtcttaaatttctcttctctgtctttccattgtcctatgtcaggctgctgtgatcattcacactgatggctcttctccttccgtactgtcctctctgctcactgcagcctgctgtggtgcttcgtgctgaccactccctagaaagtcgatctcatcctagatagaaggtgtaggatcagagcctagagccgcagctaagacctctgttccttaggtgacactcagtcttgccctgggaccctgagggcactcctgccttgctgcatcattccagcctctcagcaggagcaccacagccctgtctaagccctgtctgtagcaagcaaaataccaagtaatagttcctgcctggtgggttgttgtgaggatcaagttaatgtgggtcacgtgcttaaaatataacagtattcaacatggattggaagtaagagaagcaagaaagtctcaggatcattctatgtgcatagtcctacaaattaaaatcaattgacttgttttccatggctgcatatgcttacatagcttgcctatcgtaagagaacttggctcatgataatccctttgttggccatctcctagagtatagactttctggggcatgaattttttaattcggatgattaaaatgattttattgtagggatgaccttgaatctgcagtaattgctttcaaagtcagtcatttatagttttcttattgatatcctgttccccttaacattctgctgattgttgatccctatatgtgagtttattgagaacatcttcattctcagcagagatttatcaaaatgtacatgtttcaaaataacctaatcatcttcaggtacctctttaaaataaaagagctataagtgaaaacagtcaaaagacaaggataccttggaacctaagaatgaaaatttgagctccttagcaatgaactgaacgtgatttttatgcctcttgcataatgattatatcctaacctcaccactaggaggctactcacattgtacctgtgcatgctctttccttggtttgaaattcggtcctctttactgcctggcaaaatctagtgcctgtcttctctcctctgtgggacatctctgctatctcttgcacctccttccctgtggtgtgcatgccactctcacctgcccccaaatacacacgctttacagacccaggctcttcacctgtgtttccagagcacatcattcatctggcacttagcatgcggtttgtgtcaagctcactgggttgtgaattccctggagaggatgtctttcctcccagtgcagtattaagcaagatatggtctctgcttttacaggagtagacccagagctttagcacaagctttataaaagtgagactaagcctctttactcctactttctaacaccctagaccagcgatcctcgactagcaggtggtatttggtggttgtggtggaggagatggtattcagaatttccagaagatggttagtgtaattcaaggagatatattgcaaaatcattatgcttctttcattttagccataacattttgtttattttgaaatttcaaatggtgctaaaagaagggcaggagatttttgtcataaagggacacgtagattttttaaaaggtgaagaaaccctgcttcattccccacagaaagaggctggcgtttttacttgtttatttctcttgaggcaggtatttttcagatgctaagtgcagtactattaggttcaaaataaatatgataagagcaggttgtagaaattttcacaagtgaatattttgtttacttacaatgtcacaggataattttcattttgtaatttccttagcattaaagttcagatgttaaaaacttatgttaaactttattttaaaatgtgtataatggtaaatccagtggtgagtgaggccagaaggatgagtgaaagtgtcattagtagaaatagtgcttcagttttctgcagactgagtgaagtcctggctctgcctccaccactcaagaacccaggccaactccttgtctcactgcagagtgtgggtggtactagactgcggccatgcacaggcagggcccaagcccagcacctggccagtgcccggttgcgttgcccagaacctgtagaaggcttctgaagtccttccagaaaagatctctcagagacagagagcctggtgaacatttctgtccttttattgttttcacttataactctttttattttaaagaagtacctgaagatattaattaagcaaaagattattttgaaacatgtacattttgataaatcgctgctgagaatgaattttagaaaatattttaaaattatatgtctgcagtttgtaactcagtacttttaattcagttttgcacaaagaacttcccagtgtgttcccactcgtatactcttctgcaaagctttctgtagtcagtttgagctgaactgtcttcagtgctttggaagctgcctaggaaggaactaaatttcagcctggctgcctatccgggacctgattttcagactgagttgcaactttttagtggatcacaaacgctcctgggaacatcaggtttctggcagtttctgccctcagtactgaaccagcagtccactcgcaaggacggaaaggcttctcagtgataggagagtaatagaaaaggaccatgaactctatctatatggaccttgctcagcctcctgctgtactgctttgtgtgtaagacaagaaaacatgcaacactgggactctacgctaatctaccacacgtgactctatgctaatctagcatcgtattttcactgctgttcataatgagtctaaattgttaaaaacaaaaaaagggcctatatattcagattaagaaatctggcaaatattatgtgtagcatatttttgagatatttttatcaaaaattaataaagtgtattctttcatttaaagacatgtgaatttgtttgctagggctgccataacaaagtaccatagactgggtggtttaaacaacagacatttattatcttgcagttctggaagctggaagtgtgcaatcgagtgtcagtggggtagtttcttctgaggcctcttcttggcttgcagatggctgccttcctcttcggtcttcatattatctctcctctgtctgtgcctgtgtccaaatttcctcttttataaggactccagtcacactggattagggcccaccctaatgacctaaacttaaattacctctttaaagaccctatgtccaagcacggttacattctaaggtaccaacataggaacttaaattacctctttaaagaccctatgtccaagcacggttacattctgaggttccaacataggaacttgatagagaggacacagttcagcctgtaactatgaattttaatctgtggaggcagggcaatttattgactaaagatacatggatgctgtggtgagggcatatgtatcataccataattgtgtgtcagacatacagaaagttgccactcttaaaatgagtagctgagtttgttagcctagtggtggctacttggccaagtcctcgaaagacttcaccctctttctgtgaaatatagtcctaaacttaacaagtaagagtgtctaatgataccacaaaaagaaagggtatggcaagtactcaagaaaggaggagaaatataaacactaggaggctggtcctggaattaagaataaggccttctgagtgcagcaagtttcagtgcacatgaaattgtgttaaagttagtgatcagtttgcatatttttaacataaacaatattgtaactcaatatatattccagtctttcccatcaatgaagcattctaataaacaggaatagcaaaattatgaggaataaagattttccataatatctagagcttgaggaagtactcagaaagccgcatcagatgatgtgccattaactatggtcaagggcaacttgtttttgagtaatttcttttgtgagtcgtaaaccaaaggctctgaggaagcacagactcactctttgaagagaagaactgttaatttgttattcccagggctaagttttaagaaattaattttttataatgtttagaaattctggttgtttggaattttcatctacaagtatttttaaaatactttttttttttcttctctccttgttaaaattcagctgatggtttttggaatctttctgtgcctggatgcgtttttgtatgtgttcaccctgcttcctttaagagttttcctggcactattcaggctcctcactttgccttgctatggcttaaggtaagtttaagatcgttaactattgtaaatgtatagtatttcattatttttaatacttgtagtggttgcagagtaaggataattcatacagtttcatccacactttggcccttcatgcataaactgtttacctttttaatggatattatataatatgtttatataatattaagctttttatatgcttatttttttccagaattgttttgaaccgaaactttgctttagccggtaaaataatgttaatgctggaggctttgtagcagtgtagaaaggacccgggtctgaaagtcaaagacctacttatcacgttcttaactcacctgggcctttatttccccaaagtccttgggcctcgtaggcatcatctgtggaaaggacagggttctaggctggagtggaaaaggaatctcctcaggagctcttactgcaagtgttcctcctccatttcatttgagaatcattgtaatgatctgtggagccttagttactggttatggacgagactgatttgtgagagtggaaaaactctggaagaccattgtccccacggggaagatcagagagcccgacccgacattgattagcttgtgagctgtgcacaacagcctgacttctctaagtgtgcttccccatcagcaaaaagggggtattgagagctcagcatcttttaccacaaagattggaagatgtaaaaaaaatacccagcatagtacctggctcatagtagaccagaacagataatctgttttcttctttttcttctctaccaaaactcagaatagtaaggtgaagatgttaagcttacatgaagcttaatgctttattggtcttgaggttaaaagcgagtttggcttttacggttttctttctttgtacaattatgccggtgtgtctccactctgtatatagtcactcttcacagcatttttattgagttcttagcatagatgtcgaggttacatttctgacatgcatcacttttctacatacatttcatgctggaaaagttctaaaatgctaaaatggacaataatttgtgagacttcattgaactatggtgactgttccgtggtgtataaaatatataattaataaaataatttaaccatagcagttgagttaaaaattagtggtcgatatacacatttatatggtttgtttttttaaaagactgaagccatgaaaggttcttttttaaagtagtaaatgagcgtatacttgatatttagtaacacatacagtctttttaaaaataagacaatcagttttgatagaaattcctcccagtataaattggaataattattatgatgatcacattataaaaggatttaaaatgcttgttttgcaagattacatggagtaaaacaattataaaaattcagctcctgtcattgttatatgctatattctgtaacttacttgccttccaggataacagtgaattagtgttacatattttattaatcacaagttaatcaaatgggaaggtagttttagaaatttagttatttgctttaaggcatttctagtacatccttttttcttttgggagaagttttaagaaggccttattattaacaagcctttttaaaggcatttgtagcgtggtgcattaatactaacaaaacctaaccacaataaactattttcttttatcactcctgggagcttcatgatatcatggcattttagttcattttcagaagacccaaatacaatctaatagaacattaccaaatatacatctttatttggaacgggataaagcgaatagaaacatggaaatttagataaagtcaggtgaaacacatgacataaaattactaatattgctggatgtggtggctcatgcctgtaatctcagcactttgggaggccaaggtaggaggatcgctagaggccaggagttcaagaccagcctgggcaacatagtaagaacttgtctctacaaaaaatttaaaaaattagccagacatggtggcacatgtctgtggtcccagctacaccagaggctgagaggttggaaaatcacttgaccctgagaagtcaaggctgcagtgagccatgattatgccactgcactccagcctgggtgatgagtgagaccctgtctcaagtaaagaaagaaaataactaatactatgtagggcttttcacatctacattatgagctacattactttttagttattctttgatcaacagtgtgcgtcaagttcatgttctagccatctttatgtggacggcttttaaagacatgtcatgttcttagtggctgttggcacaatgtggtaaaacattaaaatgatagataagctaatgactgtattccttctggagtggtcccttccttgggcattggttagcacacgtatgaggtatactaagtaacagtggtgatttgccagtgatcccaagggtctctcttcggggacagttgtttgaagttccaccttgttatattgtacaggcatctaaaactgtgttgcactcaagttcatttctgtgtagcccctgttacgtgggggtacagggcacataaaatagcattagaagagtcttttctagaccagcacggtggtacacacctgtcatcttagaactttgggaggccaaggtgggagggtagcttgaggccaggagttaagactagcctgggcaacatagcgagaccctgtctctacaaaaaataaaaaattagccagttgtggtggcacatacatgtagtcccagctacttgggaggctgaggtaggaggattccttgagcccaggaattcgaggctgcagtaagctgtgattgcaccactgcattccatcctggttgacagagcaagactgtctctttaaaaaaaaaaaattcttaaagtgtttgttctaaaaactaaaagatgttacagggaactgggaaatcttaaatcctctgccagtatttacttttactagtggttaatgatccctacctctaaccttttttagatattttaagattttttgtagtgcataagatgattgctttcttacattagtttgaaatactttgaatctaaattaatttgagtatcatttgaaaataagatgttttcttttttcaaagttttatagctaaaatgacactagagggcagcctgttacacatgacatttaagactccattgaggatttcccctgcaaacacttcttactatttctgctttggattaactgaaaaattaatttcatgctatcactaataaatacttatatgtataaaaacatgaaatgcagttaaaattatataactgtttcagcaattttaaatgataggagtttaaatgaaacttaaattttcatttaaattttaaatgaaacggagttcaggcaattataaatgctttgaggataggccaggttacacagaatatgaaaatcctgcctaatgtcttagtgccttaagtatggtttatcaaaattgagtaatttgtgcttacagtaatataggctgcaatttttgtttctttgagcaatttagaaaatatctctttgagcattatttttaaagtcacgaaacttgaaatatttgataaggtaaaagttacataaacaaagctattgttaatattaagtctaagacctttcaaatattttggaatataaaaatactttttaggtttaccaaatgattatttagaaatagccagattttgccttctgatagcttttattcctgtgttttctacttccattaaagattattcgatttgtcttgcctgtagtgatgtcatgttccatccttttcagcaagcaaaaagtgctctttccttcagtctgactttatttttttcaaagaaataagaagaagtgaaatagactggcaaagaagttgattgcaattttttaaataatttttttttttcactctcctgtatttcaatcttctttctgtaaaaacttactgtcttcctagtctctttgttctttgaaattgttttcacaaaagggaggaaacagtccatttgtcaaattaatcacaatgctgacgtgaaaacagtaactctttgcagactctagaactgtttggttcagtatcacatcaataatgtaaattattgccttctttttatatttgagatcagtgttctcacctcatctgtttgcagatttacatcttgtacagcatttgtgagaagctttttaaagcacatagacccccgtgttctctgcttcataacttaatatttgaacctatttctagttcttctgcaaacttgccatggtttttgacttaagtaaaataaagaccctgtcccttcactaaggctgaggacaagggtggttctacagtgccttaagtaaacccagccttcatcatgatggctcatccagcagggtgttttgctggctttgaccctgttgtttaagtactgttcattatgagatgttggcagggtaattatctgcagtcatatttgtgtgtggtgtttgccaaggatgcactccctccctaaaagttaatgtctgtcctcagtgatctcaagaatacttcactgaaatagtttctgatgaattaacaaccttgaaaaatctttgcccacaaatattttgttgtagacttaaaaaaaaaattagaaaatgcatctaaattctttaaaagcagattcacttatgtatatcttccctctttcccagataagagtagtgtcattttagaaatcatttgagaaacttcttgaacgaggataatctttttaatgattcatgacatataaaacagaactaagttttgatttattatatgaagtgtctattccttggaagaatgatagaattttttgtttttcagaaaagcagactgctctatattatgttagaggtacgaaacatcctttttccaaatttgcttgtagaattgaatgaaaaatagctaattatgtacatttgatttacctggcatttttgtcagccctctattctcctgaaatttgtgacttcgttttgtgctttagaattctcagtcacgtaagttaaaagttaaagaagattgtagagaaaaatgatatagcctggtaccaagaattgagttattgttgaaaaaactttactgaaacattttagaaagtgatacatgagttgaacaggcttaagtaataaatgccggagtgttttttggtttttgttttttactattagagcaactaaaatatgtgtgagcaaatgttctgtcccctggcccggctttaggcataactctcacatgaggcttcacaggcttttatttttcttggttgaagaggcaatagtatcattttcttttgagagtttatcccatgggagagctcttgtctcccagaattatgaatttcagatgcttgagagtttcctaaccttttgagtttccttcgtatgccttacctctttcgaaatagttctgcccaagattaacctcacctatatgttataatagatttttctctttttagacaaaattaagccttgattttggcctaagtgattgatgccaccactgtagcacaagtagggagagctcttggtaactttctctggggaaacaaatatgccttttacttccttttaccagggctgatctatgtggcttatttgttgagagcaatatatttgttattagaaagtcttcgtaacaccaggttttattgtcccgtttcctcaccatggagctctaagtagcgtagcaacattacaatcttctctctttctttctctctcgtaaatcagaccgaagggaggagcactttcacttcctttatagaatggaatgtggtggcacagggactccttgtggtgagtaaaccctgatttttccttctatactcttggccaaattgacattcattaaatgcaaaagtaaacaggataggcagacatagccattagggggtagaaacatactgaagaaaatgtggatccctgtcctttttaaaatagcatctttacttggtcttaaagctttgtccacatttctttgtgaaggatttgactgtgatttcacctaacatgaaaatccgctcaaaagtcatctttacacatgttagcttagacttagcaaatacttcatccccaaagccacagaaattggctgagcttaattccttccatataagcagtttttattttgcattactaaaattgtgaacatagctttataaataagttatttttttcagtatagtttgaaattaaagtttaagaaatggtttgaatcattccgtttaagtatttatttttctgttacatatgagtcaaactgaagatttaagatacttaattttctaattcaggaaaacatcttgatttcactactttattccagtttacttaaattataaaaggatttcactttcaaaaataaaaacatattattttgcatttttatttcagtagtgcttgtgtttcttcactcttccaattataccacaaatggctgaaaatattgagagagagcgagagatctagtctatgtattttgtaatgaaataactcatgctaatactctggcatgtttcaacactgatttgaaataactatgcagggattctcccatttttctcgctcatttttggtgccacatcttccttcttgatctttctgtccactactagatgttactttaatcatagttagcatattatcttcccctaaagaggaaaaggaaacagcttacccttgatcgtctttctctactgtataattcagtttctgtaagtctatgagccctttgaaacaactagagatgctctaactggtaaattgtacaatgtaaaattgtacagttaccagaaatacaatggaaatggaaatgtttgtaagaataaaaagtaaaattttggaaatttagctaatttggtttctgtaagggtggttttactagaaatttttaaaagaattctgtttaaatgtcttatgttgaaaaatgtttaagttttgttaaatacctgatgtaatattacttgtgtgatgacatacacccaaacctgcaaattagattagtgggtttttcactttgcccaacagtatgtttcacttgtttatgctttcatatggggttttcatcatttgcaaggtgaattgccagtaaccaccacttagccatttataagaactgtagcatgaaagtatttttcaaaagccagttcggggttgaatggcagggccttggataagcttcttagggagtttgaagtgcttatcagatagtcatctaaaaatatcctggcagagaaggaacaaataaactgattggttcaagttgttttaaccaggtaaacttatttgtgaggttaggtcttttcttagaaagaggctgtggtacatacagctgtcttttaagatgccaccttagaaacaattttttattttggcagcctttcttttttattaacaaggacatttatatgaaaacaagacccttatcgggcacggtggctcaagcctgtaatcccagccctttgggaggccgaggccggtggatcacctgaggtcaggagttcaagaccatcctggccaacatggtgaaaccctgtctgtactaaaaatacaaaaaataagaagaagaagaagaagaagaagaagaagaagaagacagaaatcaagacccttgttttttaaaggttctgcttcttgtattctttatatgaataatattcctcctgaaaatcacagtcattcctgcagcaaccaattatgatgttagcaatggatggaacgcttccaccagagcagggggtgcacagaaagcagtgaattcaatatgtgtatatcgtatatatatcataatagtccagtttttttttgcgttcatttttagaaataccaaatgatagataggtttgtttttttgtacagcaatttattgagatgagattgcggtacagtgataaagtatccagtgtaaaattttacagaaagatagtaggttctgagttgttgattcctgcaagtttagaagttctgttttaaaaagtctagagtgcagatgtttctgaagagcatgccttctggagccaggttgccaagtttccatccctgctgcaccgtgtgggaacttaatcactgtacaaccacaggcatgttcctgactgtcccttggctcatttgtaaaaccaagatgattaaataaataggattattgtgaacactgaaaggaatatatgtggagtgtctagaacagtgcttgccacgtagtaactgaattgtagcattaggtgtttctacaacttttctttgttaatttatcagcttggttcaaaaagtgtggtattatatcattttgggatatgtgtttccaatgtttggtagatctaatttctaactatggcttgtattaaatatactattccttcattgatatactaacacgttgttctttgattcaaaatatgtatataaagaaacacaattggatatatacttaaaagccctttgtctcaaataaaattgctctgactgagatcactcaactaagtagatgccatctaatacgaaaagctctaagtatagttttctactttaattagttatcaaaattattttcataattaacacaaattaatactaccctacttttagctcgtatcattttctttaatttataaacatgacttacagtctttaaacacaaaagcccatgactgttgatgatgtgtgactttcagtatatgctgagctgtgctactcttctgagtgggggctggtggctcacgtttgttccctgctgcccaagtggagacagtcacaccaaggccaggagctcacaagtgttcaaaacgtctcctcttctcagtgtttgaatgagaaatatgtttaagtgatcaagatccaattcttggcagatataataggtcttccattttcagtcttgtagggataagggcaggaaattatcttgatattcaggtagcccttggcagagatctgtgctctgggctggttggttgggagtcaggagatgaaggacattctttgttccctgaggagaaaaaggtctctctttctctctgtgggagaaagaggaacatcattggataaaagaaagtcatggtgaaaaagaaataatgacagagattgatcaactttggccgtgatgcaatctttcctgaagccttaacttcaactgctaagagtagttttacttggcttttcatacccatcttaagtcatgtgatctgacttagacacattctgacctctctcttatttaggctcattggtccagcccagtgtatttccagccacctttagcccttcgtgaacagtcttcacagaatttgtctgctttcagaatttctgcaatatcttagattctgtctgtaaatagatcagccaaattaatatctaactgaaaacatcatacagtgcacattgtagaaaacaagaatgagtttctgtaacaactgctcacagaattggtagagcatcattgtgaccttataaagcaatgtttcaagtaacagtttggaagatttacaaattccttcttaaactccacaaagatctttggaggaaaagcattaggaaagagctctggagaatatgtagccaaggaatatcaaatacataggtgactcagatggccaatggccatttagaaaatgagcccacccctgtattgttgcttagaacattgtcacaattggtggaaatgaagagattctgcagctcctaaaaaaaagtactcgggccgttttattgattgcactatgcataaaagctgacaaaacaagagacagcattttctgtcctgaggaatcagcctgcaacaggcaaagagaacgtatctttcccattcttatcacaagaattttaaatccagtggaagaaatcttaaatttcttcttttctaatgtattttttgctctgtcttgttaagatggttcctttcacaatttaggtttagctccttttactctaacctcagaagtaaggagtgattcttctgctcatattaattatgaaaaaaatatttcaactgaagtcacagaggtctaacatttgtaatacaaaagctgtcctataaaccagtacaagaaagatagggagtgttcatatgaaatataaataactgttaaatatgtggaaagatgtttagtttcctaatgatagaaattaacggtgaaactacactgtgtacgattttccatcagtgagactggcaaagatccaaaagttgatcaaacactgtatcagtgccctgggctacaggctttctcatgacattgctagttgaggtataaactgtacccagtacagtgggcagttcagctgtttctatcaaaatttcaagtgaatataaccttggaattccaatttcaggaatttatcctacagatacactttcatatatgtgacatggcatgtagattgcatcatggctcataattgcaaaagactagaaatctgtcagttatacgttaaataaattatggttcatccacatagtggaacactatgctgccaaaaaagtatgaactcctgatgaacttatatggaatatcatgccgttaaataaagtacaaaatgcagagcagtatgcatagaatgtagcattgtgtgaaaagggctgatccagcaggctatgtgcagggattcatgattaggttaaaagcttatgccataatggtggaaatctgttgctggaaagcaccctatcagtagatacctgccctctgtgttcatttgttaagattgccaacatctaatagtaattcttacttaaaatctttatattctatacttggacagaaaattttacactgtcgagtagtcatttagtttaacctcccttgtttgaagtttttaaaagatcaacataattcttatttttacctttgtatgccagtgtatatcgagtaaagattattgtttttgtgagaacatacagagtaaaaattatatttttattacttcttgtatgtttcagggacagacgtttgcttcagcctgcccaggtgtgtgacattttgaagggtgtcattttggtaatctgctattttatgatgcactatgttgactactccatgatgtaccacctgataagggggcagtccgtcatcaagctctacatcatctacaacatgctggaggtaagggccttgcttaccccgcacaggcctggccagggcactcagcttcaagtcttcagttctgaaggtacctgagagtcaagaatgctctaccgactctagttatggtgcttctggcctttactgtgctgtcatcacttgggggctcttcttaaacatggattctgatttaggagatctaggctgggtctggagaatctgcatttccagggcggtggggctcatgctgctggtctgggacacacctctggtggcaagcctgcaggcatggcatgtcctcatgtaggctgggaagattcttgctgcccagacattttagaaccagtacccccttgagtatccaaattgtcaagtgctagggaaattagtttcacaacttcattagaaacccatgctagaactttaaattatgaagtaaatgttatgattatgtatatgtttgctgtaagaaatacacattttaagttgcacatttaaattcagatctttacatagggtaaataaatataagttcccaatttttgtaagtaatgtttttagtacaatatgtctcacttcaaagcattcagcgtatgaaaatctgcatttatataaaaaataagttgagctgatatacattcactttacaaaaaaatgcttcgctttataagccagatattcacaagttttttaaatagtaagctaccctaagttatataataaactttgaaattcaaattgcaggccggcacggtggctcacacctgtaatcccagcacttggggaggctgaggcggggcggatgacctgaggtcaggagtccaagaccagactggccaacatggtgaaaccccgtctctactaaaaatacaaaaattagccgtgcctggtggcgcgtgcctgtaatcccagctacttgggaggctgaggtaggagaatcacatgaaccctagaggtggaggttgtagtgagctgaaatcgtcccactgcaccccagcctgggtaacacagcgagactccatctcggggaaaaaaaaaaagaaattcaaattgcgtttttatattttatttttggggggatacaataaggtctatttatctttctaattagccatgaagagatttttcctagtgagaggacagatggggtgggggctgctggcctttctgctctgaagctgcatcgctgtggtagacaaggactctccatctcttcacagaagccatggagctctagccttcctggtacctcctaaattcaagaccaagatgttttaaaaccataccccagctacctgattctaggcttgctgcgcgtacactttgccccaccaagtaggttgcctaggggtggatggggacaaagtttgtgaaacagaatagctcatcttgttctcccttccttctcatagaaagagcctaggcctcattccctgttcccctctgctctctgccttgctcttttcactgctgccctactagtctctccttcgtaggctttccatcttaggacactggaaagtgcgagggtttctccctgtcccctgacttacaaagccctctcaaggtagtattattattgttactagaaaataggccgagaaaaaggatccatgaattgctgactaaaatgatttatatacgtattcacattgcagactataattgatgaggtggcttaaacacagtggatgagagtccatgctctggaagaggcaaaccacctctgaccaaatcctagtccttcctttattacctgttatcctggacatagttactgttgctgaatatctctaatcctcagtttctcatctgtaaagtggagatactagggagattatgaggattaaatagacttcacatagaaagggtttagcacaatatcaggcccatggtaggagctccctaaatggtagctgttattcattcagcacatctttagttggcacttgctgcatgccaagcatcttagaccctgaagactcacaggtgaaccagcctattctcatggagcttatattctacaggtgagagatagacaataaacaaggagacattaggaaatgatatatcttatgatgaaaaagaacagactaaggcagtagagaccataggagccacaagagattggatggtctggaaaaggcctctgttaggatgtggcattcagactgaatcctgaatatcatgccctccttttctctcttttatgtgtcaatttttacctgttatactgtattcaaggagattgatacctgaaaatgtggttaggaagtaaatctgcatattttattccatataataaacctcaaaaaaatagttaccattatttacaaatattagatatgagtaggtcaaatgatatatttgtcctaaatttgaatcctgagtttgaatttaaagtgctaaaaccagaggaaccatgattttgatgtgcccaccccctttttttctttttttggttgagtcagagtcgcgctgtcacccaggctggagtgtagtggcgcaatctcggctcactgcaagctccacctctcgggttcacgtcattctcctgcctcagcctcccgagtagctgggactacaggcgcctgccaccacgcccggctaattttttgtatttttagtagagacggcgtttcactgtgttagccaggatggtctcaatctcctgacctcgtgatccgcccacctcggcctcccaaagtgctgggattacaggcatgagccaccgtgcccggccagatgtgcccaccccttttatttttgccactatttaagactttctttgttacaaacatagctaattagtctaactgaaattctatacatattttagccgttactatttgttaaagaataaagaaatgtgagtgaataagtaaacaaagatcctcactcctctttagcttgccttctactaggatttaaaacacagatctccaggatttgagctatatctcaattttagttatatatttaaatggaatattaagaaacatcttacaaataatttttttttttaggtagctgatcgtctgttttcatcttttggacaagacatattagatgctctctattggacagcaacagagcctaaagaaagaaaaagagcccacattggggtgattcctcactttttcatggctgttctctatgtctgtatccttatagacctactggaaatttccgacagttaatgcatagtctaccttattttatttggttagccattttatagatttaaagatatatagataatgtatgtatcctgaagattaatgtgaaatatttgtgttctgttgagaaattgattgtcataataactaactaatttaagagcctcatgtaggcattactctttgagctgctggaaaacagttctgtttgcagtgtaactgattataaggaagacttttataataaaaaggcagtgtatctttatacatacctgatatagatctatataatttttcgtacttatgttagaatttttcttgaagttatctttaaatccaggaattcttttttatgggcttaaaatgcatggaatttatctaaaagtgtaatgtgaaattggttgggaggagttttggtggttttatgtgtttgtgtattcttccctggctttaagcttttctattggagagtaagtgctttactgtataagcagtgtacatgtttgtgtgtacccctacatatttatacacacattcctgctcttaagttccatgtgaagtcaggactcattcacaagaatgagtcacttttttttttttctatctctgtaacagtgacacttgaaagaaattgggttaatgcttggaaagttaaagaaccaagttggaagatacctgtgagggtaaaatcttgttccagttttaatggagtaaagcagttaccactcttagatataaattaactattctgtatgtaatacaaatataattctgcagtttatggatatcttcaaaatgacatatgaagaagaatcttaattatcagatatttcctactgccttacattccacatttcctgaagactcagggaagaaaatcacttccagaattatattttgtgctttcttttttagaatgcaaattattttaattcagaatgtgtatttcttagtctcttctttcagtatttaccataatttattccatttacttaacaaacttttttgagggcctatttcctgagcactgtgccaagtgccagagatacagaaagaacaaaacaaccctgttgcaaaggattcatggtctaaataaatgaatgcatagaggtacatttccacttttgttcgtttcatgtggattgcacatatcctgtcaaacttatatcaactatagctaatagggaaattatgaagataatacaatacttattaagacaatttagaaaagaaagtcatctttattattcactttcaaaattttatagtattatcagtaataatatgaaagcaaatttaagttttttccttgaccttctattagttttgcatgcaattcttataatggttcaagcaacaactctcaatgtagcttttaactcacacaacaagtctttgcttactatcatgatgtctaataatgtaagtatgagatttatcttacatttttgaagttatacaggcatttcagctgcaatactctgggtgggataaaattctttgttctatatgttgttctcccggaagttttataagtagcaagtccagtttttaaactgttataatcataaagatggtatttctgtttactatttcagtttgttgaaattaaaggaagtgttttcaagaagtttgaaaagaacaatctctttcaaatgtcaaatagcggtatgtacaattagattctacttgaagttctgtgcagtattattttgcagttcattctgaaatcctaatggcacattttctctgggccactcttcagcttaaactgtaccttctcttatgctatcaacatctttactaggttttcttatttttggttcctgtaatcacaagatgtttgagataaaaaaattagaaacatttgtgtagcaccatacgctactttgagaagcttcttaatagtctagaaatttctctgaagtgggtggtatttttccattttatagatgtgaaaactgaaacacagaaaataatttgacttctccacagtcacatagcttctaggagaactatgtctataaatctcagattgtctctaagtccttagcttttttagttattatttagttattatttactgccttcgttctaatcctaaaaagtgtgaaggcacaaaatttttgtgcctggagtcattgtcttacatagtttttgaaagccagagccacattgcgtggtggatcatggagcccccaagaacagtcccaggggctctgccagggagtatgctcagagtcaaaagtgttttcacaagaatatgaagacattattcatctcttctgccatggtgacatttgcacaagtcatgaagaaatggtggtgttttagcatgaatccagacagatgtacaatagagaggacccctaaaggaacctggcttgatgatgtccttgaggaaggaggggtgtgttatggggaggcctgcagtcctgtcgtagataagagcacacatggctcatccaaagcagcgcttgtcagactttttggtcctgagaacccttttacacactttaaaaagtatgatgatcagccaggcgcagtggctaacgcctgtaatcccagcacgttgggaggccgaggctggtggatcacctgaggtcaggagttcaagaccagcccggccaacatggtaaaaccccgtctctactaaaaataccaaaattagctgggtgtggtggcgggtacctgtaatcctagctactggggagactgaggcaggagaattgcttgaacctgggaggcggaggttgcagtgagccaagattgtactagagcactccagcctgggtgactagagtgaaacgctgtctcaaaaaaaaaaaaaaattacgatgattccaaaggacttttatttatatggattatgtctctccctattcaccatattcgaaatgaaaactgagaaattttaataaaaatattacatgcttacaaaaataacatttcaataaaaaagatattttataaaacaaaatttagtgagaagagtttctcaacaagtaatgctggaacagttggataaaggttaaaaaaaaaagaactttggccccttccctgcccaagaaaattaattcatagtggttcataaccctaaacataaatgctaaagttataaaacttctagaacaaaatataggagaaaacattcacaaccttggtctaggcaaacatttttggagaccacacaaaaagtactaaatgtaaaacaaaagagagaaactggacttcttcaaaattaaaatatgtgatcataaaacttaaaaagtgaaaaggccagccacagtactaagagaaaagatttgagatgcatatatctgacgatagattttgtttgtttgttttctgaatatataacaaactataccaatcaataatgaaaggacaatctagttttaaaatggggaaaaggcttgaacagacatttcacaaaagaaaatctataaatgtccaataaggtcatgaaaagctgctcggcattattagggaaaatgtcactggagaaagacaaagccataatgagatagcactgcacaccctccagagtgactgctcttgtagcctgacagtgccacaagttaggatatggattaactggcactcaggcatcgatggcgtgagtgtaaagtattacaactgctgtttttggccatttcttttacagttaaatgttcacctgccctgtaattcaggaaatatatttcctcagtaggacttgttgcaagaattattatggcagctttgttcatactagccaaaaactggaaacaacccaaatagctatcagtaggaaaataaacaaactgtatatccataccatagaatactacttagcaattaaagataaaagaatgaactcctaatattgtcagctatgtaggtctcagaagcattatgttgagcagaaaagccagacacaaaagtgtacatgatgtattatttcatttatatgaagtttatgatcagacaaaattcgtttatgatgataggaataagaggttgtttgttgggcatttggattgactaaggggactcaaaggagctttctggatgatggaacttctttctgtattaagggcttggtgtctcaagttatgcattgatcagaactcatcacataatgtacttaagatctgtgcatttcactgtatgtaaattttacctgtatattagacaaggaaaataatggcatatgaatatgttaaacaagttataggagatttgaaaactaagcaaggaacaaaaagaacaaatggaaaacttgaacataaagcctagatgattctatgaggccatgctggacctgactctcaaggctctgagaagcagttcatattcttgctgcttattaatgttgctcacctttcaagtgcagactgccaagtgtcatgaattagaaatgaaagaggaaggagggaaggtactaaattatagaatactttgcttcagtagttaaccatagagtaaattgattcaactgtaagaatttcgtttgttgtggaaaccatgttttttttaaattaattcatattagtaacctcctttgggtaagtgctctttatagagccttaaactagacacgcagatcttaagttttaaaggttttcaatccttgtgtataaaagcttcaaaattatgagggggaaattgtgaatgtttttaaccttatggccagcatgttgatgtaattaataccccttttcatttttataaacgggttccccagaattccaacctcttagcttagaaagattaggtattcaatatttgagttttaagaaaactctgggaaaaaaaatgatataatgatcaggtatgcatatcagtctacaagaaatttggactttattttggcttaaaatggttactacttagcaccaaaaaaaaaattactttttgctgtaagcaaagtagctcatgttacaatgcaaggtggtccgcattgtaccctttaagagttttataagaaattaactttaccctaaggcagattttaagacccttctcaagtaagaaaaaaaatattctaggcaacgttcagctattaaaatggaaagatcaggagtcaccaagaggtgctttttactctttatatgaatatgttgccttcttcatatgcttcagtagtagctacttaatgagagccagtcaggagggatactcatatcggctatttttttcttatgaattttcctatgaattttttctccatcagaatttgagttgccagatacgtagtgtaaggttcagtccttcatgctggtttaatatagaagacttcatggagaaatctgagagtaactttacccctttcagtggtagctcactgtatattttctttggaggaattgcctgaggacatgtgaaaagtagtttagttaccaaaaccagatttttaacaaattatccttttcttcacttcattttaacataagcgttagctgaatgtggaaccccagcctttctggtttgcattcttgagatgaagaattttaggtagttttttacgcattggtaatgtgaactgtgcatttagaaaggtccttcaggagttaggttgtctggagtaagcttatagctcacttagcactcttagaagcctgcatatctgcaataaatgtggatgtttgttggaaatagtcactcattttatatttaaaatgtgactgcaagtatgttaaagtatatccctgttagtggtaatatagcaaggaaaaagcttaataacctgaatgtcagaaatattttaaaagcattaataccaatgtttttaagcttcttaataaaggttaggagaaaacattcctagaaattttaatttttaatcaatgtaagagttcagttctaatccgaaccctgactattctgaagatgagatggtataaatatgttgctgattgcattatttatctaatatatgtttgattatcagtatcagactctgttattctcataaaaattttatttctttttatatcttactttggagaaacttaaaatttgggtattttttaactcaaattttaaaagtcaaatcttgattttataatgtctatgtaaaacatttaaatgtaaaagttgtgaaagtgtaagaataaaacttccaaaaaatcttcacataacagcctcatttttatagttagatatagttttgtatctttatcttatcaaataaagatagagttaatttttatggtgtcactttttaatctttaagcttgccatccttcacatccttcatcttataaaatcgcattcatttaccaaatttatccatttttattaatctctatcatattttgaaatagtctgcttttctaaaatttgttttgggccaggcacagtggctcacgcctgtaatcccaacactttgggaggccaagatgggcggatcacctgagatcaggagttggagaccagcttggccaacatggtgaaaccctgtctctgctaaaaatataaaaattagccgggcatggtggcacatgcctgtaatcccagctactccggaggctgagacaggagaattgcttgaacccgggaggtggaggctgcatccagcctgggagacaaagcaagactcttgtctcaaaaaaataaaaaaatcttaaaaaataaaatctgttttgccttaaatacacctttaatgagataagtttttccccctttcatcagtatccttagaaatgaaattattgcagattttctctatacttgcagctgccatatgtccaaaaatcaaatacaattaatttaaattcgatggtagttttgctttgttagagtttacaaaagttactttggctcatttcagatagtgttttaaatttctcaaggccatttattttcagataattctgtaatgaagcaagtctatattatacatgtttgggaagtatcaaaaataaatacatttcattgttaaattcatttatggaaattagaaaggacttagcacacatataggtacagcttggtgaataattctacagaattccaattaaagatacattggtaaatttaaccccatgaattaagatccacagttagctgtagtaacaaagaatatattttgtgtcagactttgatggaacttattctagggcagacttttcttagtttcctttaacctgtatcctcttttgaagtcacagaataaattaaacatgtgatctagacaaatcaaaacaggtgcacctgaaaatccacatggccttgctccggaggtgccctgcctcctaaagaggcatctcagtgcttggtaccttgagactcactgtgccctgagctcacactcataataaatagtgcttcagctttggaaataggaagtgagtagtgcccactgggctttgagggagtgaaggcacagctcagacccatcactaataaggaggtgagctaccctgaaaaagaaggtaccagcaactgactggaagagcttaaggatgtagggaaggtacagagaataaaggccaactcgcttacagagaataaggttttgctgtggaataaaagtttgtatcatgttgctagagaataatggggaaaggtggaagtaaaaaaagagaagcaaagacagtcccatgaagtacatcaggatgaaattgaaattcagagcgcttacaggaggtgcgccatggctgaatgatatgggtgaggcttgcatttactgaggcagtgggaaagtagggaaatgacagcagactgtaaaaaagcttttgagatgggttgttatatgagtgattgtttctagtcacagcccccactattgcatcggcacacatacatgggtgtgccactcttaactgcagacaaatttattttgtcccatttcttggttacacggtatcttagactatgagaaagttaacagcttaaaaagtgaaatgtgtacactggcctttagcaagaattcagtgatttgcttttattaaattccttccacctaatctcagcacacagttattagtttatggtaaatattatgaagcccaatttggggttattttacctcaagttctacatacacccccggaaatgctattgtagtagcaggattctctcagctaaaggactcatcagttcagtaattgtgtactatttaccagattggaaatagtctgggattttatacaaggattttgttacccaaagtctttcattttactctttgcttctattttttcttccgtaaaatggaaacagttgtcatatgtccccaaagcccattggaggaacctaatgacctcatctgagcagtttgatggtttgaatactttttgaagtttatagaaaactggaatttccatactagaattatgttggcaaaagaagtcaatggcttaccatggtagcaccagcctatatatacacacacacacacacacacacacatatatatatatataaagttgtatatttatagacatttatacatcgtctaataatttcatcatgttctggctaaaataattatatatgtactttattatgttgtttatatacactacagtacttatgttgattttttttcttttagatattaaggaacgattcacaaattatgtgcttttactgatagtgtgtctaagaaacatggaacagttttcttggaatccaggtaactcactcttaacaaaacagtgtcttataattttacttctaagccaaaatcattcttttacatggaataaaatgaatattgcagaaaactccaaaagactttggctgttttactgtttgggtattggtgaaacaatcatctgtcacttaatgaccttcagtcaacaatagaccacatatacgatggtggtcccataagattctaatggacctgaaaaattcctgtcacctggtctcctagtgtccttttctgtgtttagacatgtttagatacacttaccattgtgtcacagtttgcctgcagtattcagtatggtaacgtgctgtacaggttttgtagcctaggagcaataggttataccatatagtctgggtgtgtggttataccatctaggtttgtgtaagtaccctctatgatgttaacacagtgacaaaattggctagcaacacatttctcagaatgtatccctgttgctgagcgacacatgactgtacctgtttcagtagaatggattgggtatgttttctgtggtgtagtgggatgctgtcattttccataaactcctcagtgtctctggagctgtacactcagtaggtgagtgcgccctgttatgcctggcagctctgagcctttcggtttttaactgtagtgtactttagttacctaaatccagaaagattgttttcatcttaggggttaaccaggagaacctttgctcttccctaacattatcttttacccattgattagcattttaaatagggataaattaaatataaagtaaggtggaaattttgctacttaggtgcgtctctgaattcaggctgacaggaaattgtcaagactccatgaattttcattatccattcagttagcagacattcactgagcatatgctagtttctaggcacaaggacaggcactgtggcaatgtaaaaaatactacgacatttgtaggacttaacaggctaattaaggggaagtgggtaattataatgctaagtgagctaagtgggaaatgatcaatttctcaggtatctcaagtaatttagagtttttgtttgaatgtctgacgtttttgttggaatctcattcttaaaggatgcaaccatgttttggatttcatttattactcccagtattatatatgttataggcatttattaacttcttaatttattttaattcattggtaattttcaagtaactgtgaaaaatcaaaaacatataaaatgagagatacggtcttggagatacattttcagaagtttttttcatagagaaaccataagattaaatgacatctcacagcagctcgagcaggctacctggcttgtggtggaaaagcctcttcctccacacacacagctagattctttgtgtacccaaatttgttttagtgaatggtggtatatttctttataactaagtcacctaacagggtgtccatgaagggcagagggggtatgtgtcactggttccggtagagtacatgtaagatcagcaattcccaaagctgagtggttaaaccaaaagacaaatagtctttatgcctcctagacagctggatatttgaagtcatattctcatttatactgtgacttttaataaattatcttgcctcctttgttagtactatggcagataatatgataaatggagcacttgcttttattgatgaattcaccattttcactcttgttttaggttttcactctttttttaggtttattaaaatttcttaaaaaaaaaaaccaacaaagtgccatttatggaaggttgctctaagttctcagggtcatgaggaacataaaaacagcactagccattttgtatgccaggcacattgctgtgcaccattatctcatttagttctcataataattaagtgtagacacttactatccttaaccttgtggttgaggaagctggaatttagctcattaagaaacttgccctttgctagtgatgtggattaaaaaaaaaacttgtccaaggtcatatagcagttagtagcagagcttatcggcgaaagaggtcccttgatttccaaaacctgatgtgatgccagactcacagaagctgtctacactgtcagccgggatagcccagctgtgtcatctccatcccaccttccggctacctgagtcttgagttgctgtgggtccttgtcagcatttctccctatctttttcttgctgtgtcccactcttacattcttttccaagttcttaggaggttgtctgtaggtgtgtttcatcaggtacctggtactgaattggcattaaaaaaatttttttattgatgcataatttgcatagtttgggtgtgcaagtgataatttaatgtattcatataatttgtgaagatcaaatcagtgtacttgggatatccattaccttaaatatttgtctttttgttagaaccagtcaaattcttctcttctacctattttgaaatacacagtagattattgtaaactatggttaccctacttatctatctatcactaggtcttatttgaatagacatttaaatgtcataatggtgagcaaatatatcaggctaacatctgtatgacagtgaaacaaaggattgattaatatctttacattgtagtgatcaaagaaggagaagactgctcatctacaaagactacagcacatctcttctagctatttactgtcacattgaggcagctatggaattaaaggattttctaaggaacctgcttaatctagtcatcccatcagcatgtcagcacgtaggcttcgtgaaggcagaggctctctgctaaaccactggagcccacatgtaaagcagttcttggcacttagaaagtactgaataaatatttgggtttttgttgttgttgtttgagacggagtcttgctctttcgcccaggctgcagtgcagtggcgcgatctcagctcactgcaacctccacctcctggattcaagcaattctcctacctcagcctcccaggtagccgggaatacaggtgcacgccactatgcctggctaatttttgtatttttagtagagacagggtttcaccattttggccaggctggtctcaaactcctgatctcaggtgatccaaaatgctgggattacaggcgtgagccactgcgccgggcctgagtaaacgtttgttgaatgaagtatcctttaacttgatacagtatagctcttttgataaaggttataattgaatgctagttcatcatttactgaaaatactacagttttgttctagagatttcatatttctctggtagcctgtgatatggattctgttcatattaagatatttcgttgtttttcttttttctatttacagatcatctctgggtgttgtttccagatgtctgtatggtaattgcatcagaaattgccgtggatattgtaaaacatgcctttattactaaattcaatgacattactgcagatgtatgtattttgatatgcacttcaatgtttaaagtttacttctgttgcttaatttttaaaagttgtagaataataggagtttgttaatactttaaggtcagaattgtaattttaagtttctaaaaattattacactattgaaagtattctgttttaatattaggcaatgataattccatattcttggggtagaagtatagaccagccagtagtcgaagtcacagtgtcactaactcaaaatcattctgatcagttaacactgtcataatctgtttaaagactttaaaatcacattgtttctattttaaaacttagaccatcaaaatttttctctctggctaggtttttaaaatattttatatttaaaagttgatttttttccacgattatgaataggttcctgctaagttttagaagacgagagcctacatttttctggtgaaagtgtttaaactttgagaaatttgttttatgttctaaccagatgttctggataatttctagaaatagatatgtggctatagatttattgcatataaaacataagaaagtttcctaatgtagttctcattcctgtctcagtcccaaaataaataatagttccacagttttctagattttactgggtagtacttttaataacagtctcacagtaatatttgttttgtttcaaaaggcaattatttaaaataaaatgcagttgcaacaactgtgattcaattatgagtttctgaatgttttaatatacttaaagtaaatacagttttgtacttttttgtaaagcattgataaagtaatttcaccatttactttctcagctttcttaatgcagaatgattcccttttcataggatcatttatttagcatctgaagtcaaaattaataggcttgattgagacacttgtgcactttttagtggtaatgatcattcacaagtgccttcatatttactatgttccctaacttagttttatgtctttttcagcattcatttttctcagaaggcattattatggttagacaaacagtaatttttttaaactattcatttaatttaaaatttcaaaattattttatatacattacactacttaaaatagtcacttttccccaaattctaaactctcaggatcatagtcgttggatatttattcccctttaaagaaaaacctttagaagatctatgaatgttaacagttcggtggaattgaggttacattttacctttactgtaggaaaacaaataagaaattatgcccagatgtcagcttggttattagcacttgttcctggttaattattaaatgtttttattaataaagttgcagtctttccacattatatatttttactgtattacttgatatttcattcttgtttgtttttaggtctacagtgaatatagagccagtcttgcttttgaccttgttagcagccgacagaaaaatgtgagcatttatcaagggcgtagtctgaaattaacaaaggcatagtctgaaattaactgaataatgattaatttagcatgaaatattaactaaaggaaagctacataaactgcctactgatctctattctcaacactaaataaacatttacaaattaagaataatagtaatacttaacattaagtagtatatgctctttgcagcattttaagttattcaactttgtatttaagacttgtgaacatttggatttccacatcattttataagtgccaggttctgttcttgctccatagcctcacctgtttagaacatttgctggtaataagtgaatagtacttttaaaatgctgtttaaatcccataaatctgaatcttttgcttctttctctgttcaggcatacactgattacagtgactctgtagcacggaggatgggctttattcctctcccactagctgttttagtaagtgcatactttttaatgttttttgtaacaaagtagccatcattatagaatattaataaatggattattaatatgattgtttcaaaaggacttgatataaaaattaagggtaaataacttggaagaaaattttgttttaaattatagcagtagcttatatatccaaatatctattggttgagccatccaatagatgagtgacgcttagctgttttatgtaaatggctttcctaacaatgagaatactcttttttgcttattcatttagtaaaaaacattttttaatggaaatatctgagcatggtcattaacgtggccactgcaacacatattggtggaagtataaattaatccagtgtttctacaaggcaatgtgacagtatcatgctttaattcagtcatttcatttctaggaattatcctaaggaaatagttataaaagacacacaatgatttatgggcatggctttgcatttcagtgacatttgtaataataaaaagttagaaacaaacgaaataggttaaaaaattatggtatgcccaaatgaagacatattctctatcagtggtaattaatactttttaaaaattgtccaaactttttgcaatgaaaattcctgcttttatacccaagaagtatgtattttttttttactcgggaggctgaggcaggagaatggcgtgaacctgggaggtggagcttgcagtgagccgagatcgtgccactgcactccagcctgggcgaaagagcaagactccatctcaaaaaagaaagaataaaaagaaatatgtatttttttcaaaagcactactgaaacttactaaatcaaccctcaacaagtcatcaactttgaatattttaatgaattgcccacaacaggcttgcaaatagtttctagccaggttaggctataataatgttaattaagacgatttgtttagcctggcttagtggcatgcacctgtagtcctagctactcaggaggctgaggcaagaaaaaaaaatttgctggctgcacttgtatttgattatgttctttcttgactaccgattctaacatcaaaacagatgcaaccagctgggcacagtggctcacacctgtaatcccagcactttgggaagctaaggcaggtggatcacctgaggtcaggagtttgaaaccagcctggctaacttggtgaaaccccatctctactaaaaatacaaaaattagtcaggcgtggtggcaggcgcctgtaatttcagctacttaggaggctgaggcaggagaatcacttgaacctgggagggaaggttgcagtaagccgagatcgcgtcactgccctccagcctaggcaacaagagcaacactccatctcaaaaaaaaaaacaacaaaaacaaaacaaaacaaacaaatgcaactgtcttttttgcgaaaggatatctagacttctatagctgcagtctcatgcaaatcagctaagaaatgtgtaaagaaagtgaaggtcataccagctatgttttagaccagcttccttgacttttttttagatgacagatgattaataggcttaatgctatttaaatttcagtgtgcctttacagacaaccacatccctaaacatttttaattatattaatagcttgcttattacatcataatatagctttcttttgcttcggaaaaggaactcctagaattttggaaaaatggaggcttctaaataataaaattgtttgttaaaggcttaagagattgataaaatagaatattaaatatttccgcatttgtttactacaactagaaatatgaaacatacaaatataaggataaacctacaaggcctgaatttttttttttttgtaaggattggtcagatggttggatttaaatatgatcctgctttgccaaataataattgacttatttgtctagtaacttgtcagaaaactcatagtatgaactttttttgaaatagtatttaaaaatttttcttcaatccttgttttattctttaaatgagtttttatggctgttataccaaaatatttatgaataattaataattgacaaaacacttttggaacacctgcagtgtgctgaaagggggtcatatagttaggcagagatctagtgggcttccttccatagcactttgctcacagagcttcgtcgtgtgccacagctttggcgggcatccaggagccttgagaaatacatcgaggcctctgtgacaagttaattctttaattaaggcacaaggatggcaattttttcttctaagcgttacattgggtcgtaaaatgattttatatccgaaaaaaggaagaaaaaatgtgtattaaagtctcatggaaattagactgagtaaaagttaactgataatatgctaggtgaaagtatagttatttaagccttaaatgtgatcattggtttgcctttcatattaatgaataaaatcctggagtcatgttaacttcagtcacaattgcctatacagtagacattaccctgtagagactgtgacacggttgagggcttccattgtcacttttctcatagtgagagtttattgaacatatgacaagccattgccccagctcttcccaattgttcttttattaaaagcatttttaaatgtctttttaaatgtgtaccattatgatgtttatttaagataccctaatagactttggataacttgacattactagataagacgacttctccctaattctctatttctcttttaacatatgggcatagcagcacttgtaacatgtggacattttactttaactgattccaccagatttattcagcagacttccaaggataatgcttttattcctttatttctgtgaaagaagtaagaaaatggatagttaactgtatccaaaagagagaactgtttcaatgtttaattaattttttaatagtgtttagtttttctaaatacaaaacttttaaggttccatttttcctgtgttccctgtgagttactgggggttcataaaagagtcaaagaagaaaggacggagggcaaaaaaagcaggaataaggaaacacccaccaaataattctagctttggtgtggacacgtgtagcaagatgaaatcatttgtactttgcagaataatattttataaaaatcagctgctttgcatccctgtgaggtataagtgtgacattcatgacctaagtatagggccgaacttagagagtccacaggagtcaaactgttgcactagccacaggcatcccagatttgcttgaaccaatccaaatgtaccacagaaggtttcacaagcaggcagattttgatacaaatcaacaaatctgccttcttggatttttagacaaaggccatagatatatgcctaaaatgttaaagtcagcatggagaaatctttttaagtattaactaataactctgtggttgtgtgttctgtttgtgtgtttttgttgttttggtttgtttctggctagctcatcagagttgtaacaagctcaattaaagtgcaaggaatcctgtcttatgcctgtgtcatactcttctattttgggtaagattattcttgaatatgtttttggctatacagtaaagcataaatgcaagatgtaatggaagttagtagcatcccaatcatactactcccagtctatgccaggggtttccattcaacagctatacctccaagtgtatttatttgtgactcagttagattaactacgctgctatttggtagtagtattaatagtactttagattttattttaatttttagcaaaatcttaaagccctttttgcttaagatttaggtttcactcacatttttttgatgaataaaagactgccattgcagacatgttttcatatttaaaaacatctttgaccctccaatatgtttgccacattgaattgttcagcacactgtaggcaggcatcacgtaaacccaaatgtaatgcacaagcttaggttttctgtctgtgaccagtggaatccatctgcaggtttgttggtctcatgatcttacattttggttgggggagacatacagtaaattaacaactaattaagatagaaataaatggtatgaagaaaataacaatgtaaaatgatgattttgccattgttacttttctcaagaagtgaacgatgataaagtacccagacctggcagtcaattaacttactgaaaaatgaaacgggaaacctgttccaccctcgcctaggtggtgtgcatcaggagcttcactcagggaggggtggtctgagagggttcgaacttgaatccctccagaggaaaaaggttggagggtaagcatagcagtcacaacttgagcggtggattggcttagagttccagtttcatggtatttttagtgtgtttttcacattgtttcctgcccagggcttagcacactacctagcacgtgctcaggaagcttctgttgaagtagcatgagaatagtcacttactgtctgcactttccacctctccaccaagtatcctgagtcgtgagcctgcttcccagctcctgcagtagcgggctcaggcccttgtcctgcagagctgtgtgtaggtcatgtggctaatttcagtgtttcacagaggaggaggaggttctgatcacactgtacagcattgcctgttgtttgtttgaatgagtatgtaaatggtttactacattaatgtaactcttttcattttttgacattaaaaaacattaagaccttccttttctaatgtagattctcacaccgcccctcaatgtttttaacattgtgctgtgtttacgaagtggtgttgctgtaatctcaatgggaataattgttagacaatctaattattctagtgttttttacataataatcaggaaatgaagcatgtatatgctacatctgaaaacctttgtttagttacacttgcctgtgcatagttcatccaggggtatgtgctttaatcttgagttacttagaattcagggcacctgtgccccagcctcccatgtcgcctcacttctccacctggatagtgcagccagccagatctgcttactcacctttctactttattcacctactctaatcctcatctcaggatgattcctaaattatcctcttctccttcagaagctttctcaaaactaccttgtccatgccttctttatcaattaactacaccaaacccaggaatgtgtcttcagttaaaaaaataaaatcagaattcagttgggctttttgacatacaatgctgaactttcccccaccacacccggtttctcctctttccctccagactcactcttgccagctaaggtgggaggacttgccagcctctgccgttactgctctctgcccagtgcccctcagggaatagctgcttagcagcagggcctgggcctgggctggtctagggcttggccaaaaagaagccagacaagtgccctgccttgatgtcacagaaattcccaacaacaaatagacaacaactagaaaaacaagtcactctattgacagttggtaggaatcattaggaagaaaagcacagtagtatgaggagatgaatgggagaggcagatacagctgccttagagggtggccagggcaggcctctctggtgagctggtgtttcagtaaggaagggagctgtgcagccacctgggaagagcgtaggctcagcagaagggcatggggacacaggcctgatggaggaacagcaggcaccaggcagctgcagtagtccatgagcagccatgggggaggagggcccggggacgggagactacgaaaggagctgagcagaagatggcatggtggctcatgcctgtagccccaggactttggcaggctgggtgggaggattgcttgagcccaagagtttgagaccagcctgggcaacatagcaagaccccatctctacaaaaaagaaaattagctgggcgtggtggcatacgcctgtggtcccagctgtgcaggaggctgaggtgggagattgcttaagcccaggagttcaaggctgcagtgagcgatgatcatgccactgcaccacagcctgggcgacaatgcaagactgcttcttaaaaaaaaaaagaaaaccaacttcttcactggttataaaactggcattgaggttaatgtgagacttttttcttcccatacttttttccagatttgtattgaatgccttaaaatattcatattctttgacccagaaattttatttctgtagtcataggtatctaggtatcctaaggaaatacagatttaatgtgttttcttaatcagaaactttttagtagaagcaaaatattgaaaataatctaaatatccagaaataggagttgtttggggctttgttatttgataacccatatagtgatgttataaggccatttaaaataatgtcactgaggaacattaactgatatggaacaaattcatgatacagtgttatataaataacaacaataataacaaaattgcttgccatttctgtgtgccaagcactgctctaagcaccttacctgttgctctcctttccagattagctgattaagtagcttgcccaggtgcacacaggttctaagcagtggactcaggactccacacagacacacttcaccccagagtccatgctctgcctcctgactccactcgcctactgccttgtaaaatagaccatttctatacagcaagaaagtacaaatagaggtgtactcagagaaagcgacggaaagataacatactaaatgtcacagtgattatcataagggtgtggaatcatgtaattttattatgttcttttttgttcaactgcatgtgctaaatgtatttgttgtgtaataaaagaataaatgttataatatttaataccaggaaaaatttctaaatggtataatttcttacaagagaactaaggaggccaggcatggtggctcacacctgtaatcccagcactttgggaggccgaggcaggtggatcacaaggtcaggagtttgagaccatcctggccaacatggtgaaaccctgtctctactaaaaatacaaaaatagccgggggtggtggcggatgcctgtaatcccagctacttgggaggctgaggccaagaattgcatgaacccaggaggcggaggttgcagtgagccaagattgtgccactgcactccagcctgggtgacagagtgagactctgtctcaaaaaaaaaaaaaaaaaaaaagagaactaaggaattccgaagtttttctttgtgacaaggaggcctcagaaaactcaagatttgtgtaagttcctctaaatccctaatctgtcaccgtcccatgcccccccaccttctccttagccatggtagtagatggcattcacagggatttagatgaattccaacggatgtggtttgttttgtttctgtttttaggttgatatccctgaaagtacttaatagcatcgtgctgttggggaaatcgtgccagtatgtgaaggaagccaaaatggaagagaagctgtcgaatcctcccgcaacctgcactccaggcaagccgtccagtaaatcacagaacaaatgtaaaccctctcaaggtaggtttggtccctttcttcacttccctggatcattttcaaagagttaaatcacagtttgatcaatgttaagcaacgctttaaagattggtttccctttgcatagatttttgggtcttttaatggttgtgttttagatttcatcccatatatacctggcccagtgttctgagtttttccatttactcattcgctgttcaacattgagcatctgcgacacatcagctccagtggatacagcagtggggtggaaaggcaattctctgctcccatggagcttgttctagattgtcgggaagaggggtagagagaaataaatatgcactatgtcaagtgacggggaactgcagagaaaacaaaagcaggacggggaaagggaagtacaacagggagttgggccctcccccaagtgtgaggagatggcactgcacagagtcctggagcccgagacagcacatccagccttccaggagcagctcccaggcagaggcccggcaggcccagcaaaggcaccaaggcaggaagatgcttggcgcatcaaaggacattaaaagccagatggctgcagtggcccatcccagggaaaaggactggagagggggtcttggggaccatggagagctgcaggctgttatgagaaccttccaggtggaagggggctgttgcggggctttgagcggagcagtggcatggtgcagctgacattttaaaaggatcattctcaagctttgtggaaaataaactccagaggggtgggcccagaggtagggaccagagaggcagctatctggccaggagcagggtaggtggtgtgagcagggagacctggccaggttctggatagacctgggaggtttgcgtgaagtatttgctggtgaggaagttatgcagtgtgagaagaataggtgagttcaggatgattccagggtttctgggttggaagatttggaggaagaactgggacgttgacttaatttttgttgttaggtggcagttccctgttcacagaggtatttgttcatataacttttagtttaaatgatgtatttttttttttttttttgagacggagttttgctccgtcgcccaggctggagtgcagtggcgtgatctcggctcactgcaagcttcgcctcccaggttcacggcattctcctgcctcggcctctcgagtagctgggactacaggcgcccaccaccacgcccagctaattttttgtatttttagtagagacggggtttcaccatgttagccaggatggtctcgatctcctgacctcgtgatccgcctgcctcggcctcccaaagtgctgggattacaggcatgagccaccatgcctggcctaaatgatgtgtttttaaatgtgtggaataactgtgtgcaaggtcatagaggagatgctgaagagagaaaaataaaggatgtccttcaaggcctcatgtaactacaggggtccaaataggtgagcagagggtttggagggacaggagaggggggttcttctaaactaaaagcttgaaggatgaaactggcccagggcagactggtggaaagggcactccagaagggccagcatgagttagatcatggagacctggaaaagcgtctggagaactagcagctcaatatggcaagtgtggagtgtgcttcagaaagagggaggagaggagagttgggctggactggagtcctacctgaaagtgggtctgtgctcatcatctgtacttaaccggaagcgaaaataaagtaaaataacaatgtgtataatcactgggaaattatttttttcattataagaacactattagtaataaggattgcatttttttcaaccaactaggtaattcatagtggggcctgtacgtgttctcttgttacgcatattagttaagaagttaggctaggcatagtggcacatgcctttaataatcccagcactttgggaggctaaggcagaagcagcgcttgagcccaggagttcgagaccagcctgggcaacctagtgagtcccatctctacaaaaaatataaaaacaaaaagttagtaagcgtcactcttgctttcaaggaggatccagtctaatggggataaaagctttaagcacgtactgcagggcagggccattgactcaggggtcatgttatgagaagtacattcaggatgacgacctgagtgtttgctcagaatgtcttggaggtcaggagaacacagactggagaacatgcaggagggtgttgaagtcaagctaaagagagggagggggctgtctctcaaagctgcatcagattcatcacgttgtaaaagagacaaaagacagcggttctgggggtgagggcaggagagagggattactacaagagagctggatgtgtcattacctccatcatggcagtagtgtgaccaggtgtatgcacatgtcagaactcatcagattatacattttaaatgtgtacagctgatggtgtgtcttttttgcctcaaagaagctgttcttacatggattgaatgtatgattcagatgagtctctccaggccccagcccagctgtccccaaagccaggctccaggatctctgtggcctaaaatgaacattgggggttttgtttatttgtttgtttgtttttaacctctggtttggacttcccagagatgatgatgctaaaccatctgtagctgaagtgactacagatgacaggtggaatgtagtaaagtcttcttggcccactccctgatgttctgtattggagcaagtgttaatgtttcaggactgccaacagtcatgttaggtcttgattatatagagaggagccgtaatgtaggagttgtgatctttctgcagttgggtgatggcattgtttgtgtgatacgagcaatgtaatgtacccttccataaagttgaacaaacagatgattagcctctaagttttattataaatgatggctgcttatacaacatgctatttggttatcatttgctttatcggaaagcatggataatgggcacttttttcagcaccactgtattggtaagtttgtatttattaataattggagaaaagtctttctctaatttaatggatctattttatcacaggcctttccacagaagaaaacctgtctgcctccatcaccaaacaacctattcatcaaaaggaaaatatcataccattacttgtgacaagcaattctgatcagtttttgacaactccagatggtgacgagaaggacataacgcaggacaattctgaattaaaacacagatcctcaaagaaagatttgttagagatagacaggttcacaatttgtggaaaccgaattgactgaatctgtggcttcatgcgctgaagaagctgggtcctggggcaacaagtgctgtgttgccaggacaaatagatgctaaacatggcacttaaatatttatttaaaaacttaaattattattggcaagcaaatcttagtatctttcttccagtaatatggcctggctgagggtcagaccacaggacaggagcgacctccggccttgactgtctgggaagcttgatggattataaaacttcctcctgcctggccaagcagcagcatcatttccaggacccaacaaaggcaacatcaaaatctgttttgctttgtcagtctgggcttccagaatgttgaatttgcctcaaggcctcttcagtataaggaaatacctggaaaactgtgaaacttttaccacgacgtaatctttccagtctcatactattttcacaaacagttttcaaacgttacttcatctgccaaagcattaaaaaaattaaacataagtcaagataaatgttcttaccaccagaataacccttaaagatgtatcttaattaatcagaataaaaggctaccttaaataagacatgatgaatagtagcattttgtagggttaaaaaaaaatgctaaactagtttatttattaaaaaaataattaatgaaggctatgcattactgggaaaaatccttcataatttttcagtttactctttaaagcaaaatgtgagctgtatgtcatttaattggtggataaaacaaatttccttacaaaagggcactttttacaccaaggaagcagagcagtgttaactttaaggtatacttaactgattttgctttaaaactaattacttcataaattattacagctaaaaggattcgatgttgaacaggctgaaaaattgtcaatgtacaaaattcaaaactgtcaactttaactgtaaagtaaatgctccaagtgtgttagacagcatcatcttgcttgggcttaccaaatgcattagtctttgtgtttgggtcgacagcgagtgtgcctgtgctggggcagggtgtgtgttctgtgggagggtgtctgtggggatgtgactatcagggtgggcctgtgctggggatggggcaggcctgggtctggagaggattttgtgtgaaagtaaatggggtgtttgaggcgtatgggtggctgttggtgtggggaggcatctgtgtatggctgttgggaacagcaaccaaaaggtgctttttggttttatttgagatgaagattgtgtttccgcttaattactagtttgtggtctatatcatagaagttatttcccaccccattttatcttgacaaccgtgtttgcatttctgtaaaacttctacaacttctggtgtcagaactgtccagaagatggtactgttaactgttatttcctttgatgttttgattttgaagtttagctctcatgcaaatgtttcaggcgtacatacataggcagaaagcaatttttaggtgatttgtctgtttcttggatgaaatataaagcaagctttaatgttctgacttgttcatttgaaatacaaaaaagtaagtgaattttaatgttttgcattaactaaagaaatctgaagattaatgttgaggaaattgtatggacatgcctttgtgaaaccaggaagtattttaagttaaaaatgaaaaaggttttaattgctttgtgtgtgttttaatggagccccattttagaattattttttccatctccctttaccaacaaaaggaacaatgccaccgtgaatggaatagtttggggaaagctttgccaaacacaaccctgatttcagagcaggaacatggtttggatagatcttcagttccgcttgaattattctgttactgcgctgtcattttcagaagatttccattcctttgcagatgctgttgggagttcgggattatgttcatttcttctgttttaatggcattcagtactaattttataagtgcatcttgtgtgaatctcaataaattcagttttgtaatcttttttaaaaaggtcactgaatttattttaatatttactattgtatttggtagagtgaatttcccactgtataataagtatttatttgtaattcacaagtgatagagctatcttaatttgaattattgctttggtcttaatggtggcaaaatgtttaattttgtctttggaaaaaataggctcggccttgattatagaccatttaatatttctcagcaaatgaaggtatttgcattttacaagtgttttgaatgtcacacaaaatatttttcacatctgggagtcaagttcaagacagtgctttggttttaaaaaaatctaatgaaggcacaggataggccagacccttattaggttttcctttagaataagtgtaaagaccaagtgtcactgatacgcttgtccagattttcttgtggactttggccagtatttagagtttatattcatgttacataaagtgaaagaaacttgctataattaggccatcaaaatatatcctgccactcctggtaactcagcagaggaggagataaatttacaaaataatgtaatatctctacattgttacatgttttcaactattttttatcaacaaagatttgttaatcacttcctatgtgtcagaaactgttctaagtggtgggatcagcaatgagcaagataagtccctgttcgtctgtggaagactgataggaacaagtcgatgaaataatgtctgctggtcacagagtgtccactgaccaaatgatctctcaggcttatttcagctctaaaatatagttctttaaaacgtt

SEQ ID NO: 16 - DNA, 194171 bp, Homo sapiens
gcgcacgggctggtctctgccctaatgcggcggctggcggcgagaggcgctgcaggggacgcgggggaagtggcggcgccggcagcggacagctcggacagcgcccagggccggagcccgagcccttggaggtaggcgagcgcgaacaccggagagatgggggtagagagtcatggaaacccacctagcgacacccccttgttcccgccctcgtctgtctccatcccctgacctgccccctccccctccgtccacattcccatcccttcccctctccacactgtcacctgccccgaatccatccgattctgttcgtatgcccaccccgtccccgtccagctcccagccccctgcccaccccaacaccctttctatctcgttggccgcgtcccctcccccttcccgcatcctcaaccctttccctttcctctctgtccccgcctcatccgtgagccctgcctgcccttgtacttctgtttacctcgacaccccactttggatgaccccatgcctcctgtatttcctaccgcacacatcagccccttcttgcctcccctattctcttccccatctcatgcccctaccagttggtgtcctgtctctccatttgctccctcagtttctgtcctcccctggttcccccttgcacgccctgtcccagccccttcccagctgcctcttggtgtcctcctgcatcacagtccctctcaagaaccccgccttctcccccctttggctgttagctggcctgacacccgtcaccttccctagctgcccttcctggtgctgtgtggagccatacagcctgtacccagccctccctcagtggcctctggaccccccttccctgggtggggatcttggttgtggaatataacccctttctgcatgttcgatcctatttgtggcttggggaagaatgctgggggttagtaggcctctctcttatgttcctctccagccatgcagccactctactcctctagctgttcaggtttgtttcctagatggattgggggagggggtgctaggcattgggaaactaggatggggaaggggcagggtccaggggaatgactgagcagactcctcctggggcttggcctgagccctgatgtaaaggcctggatgaggagccctgctggagggctggataattttggattttagaaaagattctgcttcagcctccaagtcagcactttggcatctggagctgtcatgagtgtggcccatgggctgggccaagagtgggcagagtgctgaatcacctagaatctggtccccatggcagcccccatcctgtcctgagccaggttctgctcctgactccttccttggcattttggcatggggtgtgtgtgtgtgtgtgtgtgtgtgtgtgtgtgtgtgtgttgagcagagatgcctcatccctcagtgtgggggagaggacaacaataccccttttctgcctgcctgtgtccctggcatgagggcctagtgcgtctcatctacccttggaaatgtgctgggccctgctgggcctcagtcaaatctccagcaaggcaagggcaagccacagggctttgagacctggttggacaggagtttaattgtttgtgtggagccaaagccagcctcagagcccacagaacttaaagcaataggagaatagcccagggaaaatgtgtgtgaagagtggaagcctctggggataggggccataccagctgtgaggtgggggcagtggaggaaggcaggcagagatctatcctccttctggtttggggatgattggatgtggtggaattgcattgcaggaagaattgaaggagatgggggcctgctacgcagctaatacatttcaccttttgtcttgactgagctggcacttcggagggagtaatttctccccttgtctttggattcaactgaaggggtgtgttgtgtgtgttgtgatgtgtgtgtgtgttgtgatgtgtgtgtgtgttgtgatgtgtgtgtgtgttgtgtgatgtgtgtatagagagagagagagagagagaattatgccagtaaggaaagagactcactcccacttagccccagaaattgtggttgccactgtggaacagggaatggcagcccgattcctgtcttaggggcttagacgaaacccagaggcttaaattgaggcgttaagagcgaattgcagacagactctgtcccttctctgcaaggctttcactttaggaatccaagtgactggactccttcagctcctgtgcagtaaactctgaatgggcctcaggcagtgcctggcaaggggatgtgctgctgggggcactggctgcaccttgctttgtcacccttctccgtcgcctctccagcgtgagagggggtggggctggaagctttccctggcatcagtgcctaagggctgccagcttttcctggtacagggagaaagcattacctgcagccgttgttgagagctgattggattaaggtcctgatgttgaaatgcttgactggagctcaggtgaagtgggggattctaataacagtgtacatatttcccagttttgtgcaatgaatttcacccctcacccccttgtttggcatcagaaagagtacggagaaataaaccaaggcacacggagggagaagccagctccccagagagctggagcaagaccttccaattgtacctagccagctccctgtgggctgaactggctgcgctcacaagggctggttcttttaaggcacacattgaagaggtggctgagagctgggggtggggttctggctttgcatttctggggtgggtgggccagaggagggtctgatttctgtggtgagtgagagacaggatgccaaggctctgatcagtatattgcaacttgtttcctacctctggctccactcttctccctcaggcttttttggaggccagaggcaccctgagatcttcaagaccatggaggagctggagtgtgagaatcatccctttgtctttagaaaaagaaattcttaggaaatcagagagggggaagcagaaaaattcagttctcagtctgtttgcctggggtgatgtttggggtggggaggggagaagtgagaggaacgtaaggccggtttcatacttactcatttaacaaagatccattaagccctacggtgtgctgctctgctaggtgctgagaccatagagatgaaaagtaagctagggtccaatctctccgagctcctgggcaatggaagaggaagacaggtgatcagacaaataacagataagcttgagcaagagcatccggatagggatgttacacagcgggatctttaattccagtggtatcagcaccctgctctccacagctatgaagagggcttggctgatgctatccggaatggtagctcagggctgaccctgaagttgactctcaggaaaagggtaggggacaagatgaggttcaaggtgttgtcagatccccagcttgaagggctagaggggtaatgttctgtgtgaacacctgtgtgaacaaggtgaacccggctagatgtggctagaacctgataggggaatacccaaagggagctctgtgatgaggtcgaggctgcttaactctcccaatcccatcttctaagctcttgtattttaggggtaaagtgtggctggatatgcttagaatgtcagtgagtcagaggaaagaggctctgggagctactcgtgtgtaggcaagatgcacagggatgtgctgagaggcaaggcgaggaaaaatattgtgaggactgcaaggttcacacacctgcaaggtgtgtgaaaggatttggcattatggggaggtcagagtcaggtgggagtcattgatggggagggcaagttgttggtaagcaggagaggtccttagaagctatacacttgaccacagattcccgcaaatatccatagccgaagtgggaaaatagcctaaggagagagactgtcagtttcatctgtctgagtagcccctcttttcccccacacacccatttttgttcatttcatcaatgtatcctgagcctttgaatctgtcaggagctgtgcaagctattgggcatgtaagtcaaattggagacacagaaatgaaaccaaattaagactcagcacaagaactgctataattgaggttagatgaattcctggtgttgtaggagcatggctgaggggtcatagtgagcagtaggatctggagtgattgcaccaaactgtctggacagacccctgccttggcttgagcaagttgatgacaaacctttgggcacttacaatgcccagctaaggcccaggtctagctgcaagggcccaggcctaactgtaagggcagatgttggatgcatatggcctggtccctggactgcagaagagggcctgggagttaatggctgtgcggggtgcttgagtaggcacttccacagctttgctgacccaggacattggttagattgtgccagcttgagaactctcaggccacccttttttcattaggtcttgaggcaagccagaaaaaaataaaagtggcgtaataacaatagtcaccattatcgagttctttctatgtgctaggcaccctactctatgctttatatgcatcatttcatttcatcctcaaagggttaaccctacaaatgagatattgttaagttgctggttttacagaaaatgacagattcagagaagctgttacttgttgaagattacagaacaggtgagttgcagagctagaatctaaacctttatttgtttgacttcaaagcctgtgctcctctcccatatgtcgtactgagccccacctcccaccccctccccgcctccaaccccaggtagaaaaataaaaagctaggatgttttatccacatgcacaaggctttctaggaaaatctgttagaaggattcagttagaaggcatttttgaatgccttactttcttctgaaagatagaaatgtggttcctgctttcaaatagaagaaataagactgagacaggtaaaacaccttgagaacaagacaatacagggtctaattaaatcttcattggtgcctcagacctgggacggtaaaatttcaaagaaaagcatgatttgttagttggattaggttgttggagtcatggaggtgacatggcacagtagaaaccattcagcctttgcaaccagacagatctgcattcagaccctgcttctactacttgctagctgcatagctgcagctcatctgcaaaatggggatattaatatgaaccttgcagggctgttacagagattaaatgtgagaggatagtgaaaggcccaatgtaatacctagctggtagtaaatattcatcagatgctaactgctgtacacagaggtgttgggaatggaactgagcctcgaagaattggcagaatttggatatgcaagagaagcagagggtattctagatgaaggaaccatcaggtgtataagcaaaaacttgggttcagattctctgggaaagaagtgacctgcctcatcctgcctattctcccccaccctccccccaccttctccctggtccatgccgcaaagtcttacaggaaaaggacatcatcctaaaaggcatgaggggccttcaacttctggccccattgttaacttaaatggatttctttctctgtaaaattacagggttgctgcaagttcctgtcccacagcctgtgtttctgggatttatgtcattgattaatttcttgtcctggctttcctctcccacatgcagtgccatgaaaaagttggagtgcctggggcatggtagggtcatgccctcactcccctatcatcccctcccggctcctgctgctctcttcctccaggaagcagctgtcttagcatctgccttctcctccttcacctgctcctcctcactcctcccctcccgggctggcccagcccctcctgaaaggcctccctggcagcccctctccccgttattgtgatgctaatcatgttgttatttttttttgagatccagaaagaaggccccaatctgttctaatgaatttaattagagacgggcttggagagcttcagaacctcttaccgggatcacaataaacagagttaacaagataaacagcctgagatcagccactcaggggttggaaagaaggatttcccggtcagtcctagaataaaaaagttcttggcacccagagttggaggaaggctgcgtgaatagtggtcctccaagtgggttcccttctggcctgtttctgcctgccccacccagcccctcgtacttagcttcatacctagttctgactctaggtggcaaatgaacctcctaagaaggtctaattattctcatcatcatcaccaagcacctgctatttgggtcagcgttaccacatcatcttctggagcaatgtggaggcttatgagaccctgtcttctgccttacaggtggtaagagatatgtgtccaaatataagtaatatttgctaattccagaatgtaagttctagaaagctgatggaagatcacattgggcttgggtgatctggaaaagcctcttgcaagaggaagtacttgaggtgggtctttttttttttttttttttttttttgagatggagtcttgctctgtcacccaggctggagtgcagtggcacgatcttgactcactgcaaccttgcaacctccacctcccaggtcaagcaattctcctgcctcagcctcccaagtagctgagactacaggcatccaccaccacaccccgctaatttttgtattttttgtagagatgggggtttcaccatgttggccaggctggtcttgaactcctgacctcaagtgatccacccaccttagcctcccaaagtgttgggattacaggcgtgagccactgcgcccggctggtgggtcttgagatatcaagacttgaagactttctccaggactactggagaaaaatcatgtgcaaaagcaggactatgtagaggatctttgattcatgaaggtaaatggcatggtttgggtggtgggtgcatgtaattcagtagtgaggggtgtgtctggagcagtatatggagacaaaaatcatagagaaccctgagtgctagtctttactcttctaacctcgttgcactgctgtctccctgatttgcttctctgagcacgtacgatgcccagctctgggaaaggccttctaggatgggagacttctggcctccatgctgagctagctttcctggatccagtttgggccaactggagtggattgatcagatgctaagttttgttctcagatcttgtgattttctgggatgagagtgaatggctggcagagcaattccaagaacttttcccagtgatgaaaattccctttttctttactgatgctggccaatttgctttggcagtagcattttaaacaaccatttggtgaaagctccaatttcagggtcagagaatttcatcactcttttctttatattactaagaattctctgagttgtgtattgggatatgtgtgtgcatgtatgtctgtgtgtgcgtgtgtgtgtgtgtggtgcctatgttagtagaattattccaactaagtctggttctagttttatctttatttgcagggtaaaagtcattaaatatttctaggccttttttgttgttcaaaggtggaagaatctcccctatatcttactgtgtgttgaccataagccaaattatttgagaataacaggatgttaattatgaggaggtattatagctatctatcattttgacagaaggtgtaatattgaggtaaaattttaagtctgtctccctgccacctaattcttggaacatcttgactcgtgagaccagccagagttttatttgggggcaccaccaatgtttatgcttcttgttacttttcctagtctgtctgggcttgtgtgtaattagtaaatgaagttagtacattgctgtcaggtgttggctgacctatataagataaatttatatgcaagacattgttgtcactgccattgttataatacctattgtgtggtatttttccacatgttggaggtgaatgtctttatggaggaaaatgcctccaaggccatagatgatatttctatgctgacgtaggtcagggcagaaactggatatctttccgattatcatcacacactgagtggaattgaagcctttgtcatccacattgggagctaaaccaggattctgtggctggcctcagccctgggatatgccctcgttttgtttttgtaagatattcattgcatctgcagttattatttgaagaccctgctatgtgcattgcactcttctaggtggaaacttgttctgagagaaacctaaactcaaaaatgttagaaatgttttagttcaagatagttattttactaatcaagaaatgactcagaagtgtggcatgactgacttgtgactgcatggctggttgctggcaaaagctagttctggcaaaacccacataggaacctggtaatgatacaagatgattgataggtaattaagtttctaaagcatgatctaaactagaagtgctttgggatgtcagacaacagaggaaatcagtgtagattaaagtctttggggaaggttctgaagagaagtgggggttggcttgggcctctagagatgggtaggacctgaacagtcaaagataagaaaatggcatttctggtggggaaaggagtgcccactcaaagggctagaagagggaaacagctagtgtggtcaggcatggtgaattggccaggctgcagcagtggaagaagcggtctggggccagactgtagcaaaccttggcttgctgaggagtgaatttttttggcattggtgaggagtatttgaagcttcatagctgaacactctcttgttctgaagacaacaagattgtggtgttagaagaagtgggtgggaagtcccttcccaggcacctggtggtttctgaggggatagttccttctgaaggatgtttggggcagacgggagtgctgaaatacactgggaaggagcttgtcgctgtccagagtgctgacctgacctgagatatttttctcttcagtgatgctgcactggaaagtaacgccggggaatgcttacaaccagccaaggggatctcgagaatgattctgcctaggactaggcagcatgtgggctttttgtcagtaaaatagttacagtatctgactttatggtccttgtgatgaaagcaaaagtgtggaaagactgtgtgtccacgtatgcaggctaagatggcccactttgtagccttgtaagttttgccttagaacttttgggtttacatgagaattccagcacactgcttctttcattatgaaaatgcacaccctctattcagcatcccacagaacacctaaagcctccccaacaaaccaggggagagcagcagaacttcccagaacaccgtactcattacttcaaatgaaacatctaaatgctttatattagtgctgtccaatagaactttctttgatgatggaaatgttctgtatctgcacagtctaacataattaagccaccaattacatgagcacttgaaatgtggctaatatgactgaagaattgaattttgaattacattaaatttatttatgtaatttatattagactgcacagctctatagagtcagaatctttgacctttgccacttacctctccttattgatcctcatacctaagcctctctgacttagagtaaagtggacttttgagtgggggtaagtttgaccaattgttggagaaagccccatgctgaatccaaactgaagtctgtgtctggctgtgagttttgccctgactttcttgttttcataatgagaaaaaccatccatgatgccctgcaagttttccattcaaaagccgagggaaggctccttggattctgtctggggtctcagggacctgatctaagacttttcggagcctggaacgggaaagcgatgtagtgtttatggccctgaaaagctggctgtggggtgaggtggggtggggtacaaataatgtgctgtggtgtcagatgtttgcaggcatctcagcagagaaaggttcccggtcctgatccatctcccactgcaactctatgtatctttacagtcatcccgtttatctggtatagtgaacatggcccagggtgggggtacaggtgagcctttttctgttttgtttttgtttttctgagccatttttgccccaaggaagagtgagtgttagaagtatcaaagggtgataaatgcttacaaatgccaagcaagaggtaagtaataataatctgtcaaaagactggagcagaaaatttccatggtgttggcgcatgccagcctccattggcctgcctaaccttaccatgaacatgcttgatttcctgtgtctctgttcttaggcttgctatgtataagtctgatttcctaaaccgggatgcatgctttttgaaggtatttcttattgtcttcttgttttctccaatagaatctcaatgtgctcatagtaatccctcataaaggcctacttgtgagtcactctttgttagcatggagcagtgggtttgacccctagaaaatgtgtgcacatgaatacaaataatatttattgagcccctgctgggcataagtctctgtgctcagtactgcgggcattgacaaaggaggagctgaaggtggttgctcccagtctaaagggagaggaaaggcaggcacgtatgaaacacacacacacacacacacacacacacacacacacacacacacacacacgatagggaaaaacaaagacaaaggcggtagcggggatccagagctgcgggtgggatgcagggtgctggaggggccagattacatgcgtgtccctgtctggcctctcagggattccctccttcatgagggaatggcttagctggtaccagccacctccatgcctgcagtgacagagctgcctttatggttggtcaggcagcttgctctctcactgggctgtaccgaggtagggctgtcctgagctcgcctctcctcttccatggtgaagagcacttagaagagggtagggacattggggaagagggctgtggaaagggaagaaactcttttttctttttgtcacttaaatggtgacagagccttgctcttagacttccttttagtcacagaagagatttgttgggtctccatcagctctggcacatggagccccatgatgcaggcccaggtgcagctctggaggagcaagagaagcagagcttggtgatgtggctccccatgatcacccaggcccctggctctactgtcttggggtgtgccctgcctggtggggagtgagtgggctgcatatccctgttggggttggggaagaacttttctggctgccttgcagggaggagtctgcccttcaccatcctccacatagtgcttctcagtcctccacatgcacacagatcacctgggatcttgttaaaatgcaggttcagaatcagcaggtctggactgggtttgagattctgcttttccaacaaggtcccaggtaatgccagtactgcccatctgcaaactgcactttgatggacaaggccctacgcatgggttctcaaccctgccaacatggtaacatcacttggggagatcttacaatatgctgatacctgagacccaacctgtaccaaataaattgcaatctctgagggttgggtctaggtactgggatgttgtaaaggccttccaggtaattctactatatagcccaatctgagaaccactggacagtttttctcctccttctgctgtgcttttcacgtggctatatcttctttacaacaagagactataagtggcttgaagtcagagaatgtcttacagcatattactaacacctgcaccacagtagtagtagttctctgatgtgtgggtggttagttcggttgattacaacatgatgccaagggctctgtcacttggtgccacaactaccacttgcacaactaccactgccctggccaccactcctgtagatccaccatcacccatgagggatcaaagaatgcagctggcttagagcaggctagctctactcttggaatagtgactctaagtgggtgtccagtgcctggaactaagtcaactttcagtaaatatataccaaatggatgattattccagtggtggggagggcagagactgaattagggatcagaagactggggctaaagtgactagcacaaactgttcaaccttcctttgctttcattttctcagttgtaaaatgaggatactaatgcccacttaatagggtgatttaagtaatcgtagagaagtggtcctgtagatgctagtgttttacagataaatgattgtataagaattcatttccaaagtggcagggctaagctataatgttaaccctctgactcacgtcctaacgaccctttggggtctcactatgtgtgcctgcatctacagaataacaagaaggctatgggacatgcaattgactggacacctactctgtatcagtgactgtcctagatgcttgactttgtcatctcattgactcatcacaaccctgattaaacgttattattcccattacactgagaaaatggaagctcagaaggggaaccaccttgccccacatagcacatgggtgtgtctgattccaaagtctcctaatcccagctcattacccattgggaaactctgggttccagcacgagttgatgatccctttgtttgagaagcctccttgtttggctgttgcttgtattagttagtgagataagagtctgagtatcacagagattccaatcttctgttagggaatgttaggatctgacagcatgggagctttgtgagtcttagccaacaccataccataaagccactgttcagtgctcttgaggccctgaggctgaggctgtgacatcttccccatagaagaatcaccacctgccaccactgtcccctctctgcttgacagagccattgaacccagcattggtctgtttcacttacaggtttacttttgattgtggtattaaaagaaaatgggaacatacaagggggacaaccccatgagccttccctaaccatcttacttccaggtgtgttgtcaacagaatgtttatatcacctggtgccagtccccccatcctgaggggtcggtgactcctctcctccagtaggtttagcactgagatgaggtctgatgtctgctctcctcctgtccacccctttggcttcagctgtgatgctattgcaagggcacttcctggcagaagtcaccctagctaagctcttcagtaaaaggaaacaggaagggttgatttgcatggtctgaccagttagcgggtggagccccagtccaggtgcttatacatctatacctggagtagatctttatctcaagaccttattaggtatttgctgaggctaactgaacccacactgaaaagagaacaatatatagcttaccagactggaaactcaagcctgactacctaggaactgcagatatgcaatgggcttccaatatacatttctaatgcttctccctgaggtctgactaagcatatctggtccacatttgttctcttgatatcttctaatttggctgattcttctcttatgtatttcctgaaattcttcagggccagttttacaccacccagaactttcttaagctttgcttatgaattgttcaaagtttacttaaagtacagagtgtttaagcactgtattgcttcaatttgttctctgctaagtccccgcttttacattgttgctttctcctccttttttctctttgagtgtccctagagctttctctgtctgaaaactctttgtcccatttttgagtgtacatggtcagtatgttgctcctctggttggaatagaaacttccagttaggcctgggcccaaaacaaatcccctgtcacccagaagcctggcccgttctgtgtaacaccattaaatgctccatctgaccacagaggcctggggttttaatgcttaatctttttattcccactgacctgtggttattccagcacaacctgtccttttattttaggaatcagcatgaagcctagtgggctcctgggacatggatgggcttcgggaactactggggctttgatgggtttgactggtgggcccgcagattcctgcctcctttcctcctccatctggctgccctcagcagtggggccatcagtgtgttgccttgctcagacacctgggatgggagttgtctgccattggtgtggagggaagctgaggcttaaaggaatgaatgctgtatgctgggccctcctggaaggctgatgtgggagtgggtcagggctgggtcaggtgctggctccattctgagtcagactaggaaaatcctctctgaacacatcccatgattcctctgtgttcctgaaaccttgacaaataaagagagagcttttatatggcaccataaaaagttgcagctggggcttctgagagcaagaatcctttgtttctcagcaggctggtgacatcatccagggcctacccagatgctggtgtgttggggacagaccaatataggccaaggactactcagcagtggctaaagatattgtgcttgctgggactatttccttttttaattgaacatgttattgagatggttaatccacttaagaaataatacagagagatcctatgtacctttatgcagtttctcccaatggtaacatcttgcaaaatcgtagtacactctcgcaaccaggatattgatgttgatataatccactgatcttattttgacttttctagttttacttatactaatttctctgtgtgtcactcagattgtttttgctccaaatcatttgtctgccttctcccctttcttccctctccaggtctgtctctctctctcccttctctccttccttctttccttcttccttccttccttccttccttccttccttccttccttcctccctccctccctccctccctccctcccttccttcctccctcccttcctcccttcctttctccctttctctctttctctctctttctctctttctttcacggaatttcactcttgttgtccaggctgaagtgcaaaggggtgatctcggctcacctcactgcaacccctgcctcctgggttcaagcgattctcctgccttagcctcccgagtagctgggattacaggcatgcaccactatgcccagctaattttgtatttttacaaaattagtagatacgggggtttttagtacagacggggtttctccacgttggtcgggctggtcttgaactcctgatctcaggtgatccgcttgcttcggcctcccaaagtgctgggattacaggcatgagccactgtgcctggccccaggtttgtttctctaaggctacattgtgcaatgccagagtgcatgcatctggtcttggaaatagaatatggagcaagagccagggcccagaaccacactgcctgggtttccatttggctctctgttcaccagttgtgtgatttcggcaaatgacttacatcttccctaattttcatttgtaaagtggagagttaagtagggcttacccttcatgggttgttaggattaaaataagtaatgcacatgaacccctttgcctagtgcctggtaaagtagaaatgccctatgaaagttagctgttgtattcttgccccactcccttcctgagggtagcttcatgctctgccttattcaagtacacctgatggctttggtgagcaaccataaaatgtttttgagcctcaaataagtgcttaattgtacgctagatactgtgggtattacagtggagacaaagaggcagtttttgcctaaaaagcccttatattccagtagagaaagtatgccaggcatccatgcatggtaaagataactacacaggtactaaaggacaactgcaggctgggcgcggtggctcatgcctgtaatcccagcgctttgggaggctgaggcaagcagatcacttgggctcaatgtaagaattaaagaaagaggagagagacacgaatggtggcttctcagtcaacagggacaggtttattttaaataaacttgagaggggcagctggctgagttaggtcagagccacactctcctacagactgagagtttttaaggattctgggtgggagagtttatcagaggcttggactgcttctgtgtctctttgttgtgcttatctgggagggagagttgtgtgtctgttcccatacatctttctgtagctgcaggcatatccccccaagtctgcgtttagcttccctatcttagtgcacctgaagagaaaggaatgtgcttattaaggcccactgttttactggggcccattgtatgagggtgaagtttggtagttacccaagggactttccccctacttccctctgtgcccgagctgtcttatctgtgttttactgtccactctttctggctgcttgtagttaaaagagaaatgttttccttgaaatgcatgaggctagaaagggagctggaacttaaagtggcggtgtatgtccgagatgatggtgctcctgctctgtcagtcaggaattcaaaaccagcctggccaacatggtaaaaccctgtctctactaaaatacaaaaaaaaaaaaaatagctgggcgtgatggtgagcacttgtaatcccagctacttgggaggctgaggcaggagaattgcttgaacctgggaggcggaggttgcagtgagctgaaattgtgccactgcactccagcctgggcgacagagtgagactccatctcaaaaaaataataataataataaaataaaggacaactgcaaatggctggttgagaccacagaagctcctggagtgtaggaaagggagaggacattttaatctgtggtacctagaaagacttaaaggaggagatttggggtggaaccttgaaagatgaaactctggccaggcatggtggttcacacctataatcccagcactttgggaggaccagtcaggaggatcccttgaggccaggaatttgagaccaacctgggcagcatagcgaaatgccatttctaaaaaaattttttaaaaatcagctaggcatggtggcacagctatagccctagttacttgggaggctgaggcaggaggatcgcttgagcccagaagtttcaggtcacagcgagctatgattgcaccactgcacaccgcgtgtgtggtaggctgagacctctgactcttgctcccaataagctcatgaggttatggctccacgggggaaggggctggaattcggaagaaatggacaatccagttatcctcaagccctgattgccttcatgctggccacacctacagggacaaaggatggaaggaggaagggatgacttctgatttaaaaatggggcccatggctgggcgccgtggctcacacctgtaatcccagcattttgggaggctgaggtgggaggattgcttgagcccaggagtttgaggccagccagagcaagacagtgagaagtgagatcctgtctatacaaaaaaaaaaaaagagggccagggagggtaaggagactgacacaagaaggttagtcaacaaaacaggtagaagtgaggtgttatgtttcagagtagggaattggaatccatttctcatagtaagccattttcctgtgatctaattgtgtccttatacccttgttccaccaggttaatacactaagccaatatattatttcctccataaagatggggaaactaatgcacagagagcttggtggccatttgggagtgcggcatgaattagggtggggccatgccatggtagccatctcctgactttggcctgtggatttctagcctagttctctcctgggcctctgtgacccaggtctcagctgatatctagcctgaggtaagctctggattcctaggtgggggatggagggtaatccacccaatgtaagacctcttccagatcaagcagacctggcacagagaaccacgtgaccatcactgcaccctcccggctgtggcagggttccaagccctggtctcaacagccacgggacttggtggccaagcctgggaagagcccattgtcttcttgcatcaccactggctgtgtggctgctggctagcttgcttgttcattatttgttttgtggaggctgccctgagtcctatattcagccacagctgggcagctggcacttgctcaacttttgccccagtctaccctagaatctcagtggtgctaatggaagactgctgcctgtgtgtgtgtacgcgtgtgtgtgtgtgtgtgtgtgtgtgtggtgtgtaggagaagagggagaaaagaaggtgttaagcctcctgaaaaggtaggagatttctgtctccactgggggcctggttttgggttgagagaactcagatgtgtataaattgaccttggttatttgccttaaccaccagtgggaggacacatgggtggtcatggggtctaagtgtgagtggcctgtgactaccccatcctggctattgtcatagcagcagcaacagtagtaataataatagttaagttaaaataatggcagctaccagatattcaaagcttactatgtgctagacaatgtcctaagtgctttaaatagatactatctcactccacattctacttacgacattttttcagctgccctgttttccaggcaagaaagtgaagcacagggctaccttcccatctggtagcccagggttctctagccctgatctatttgtaggatacctttgcttccccatgcccctccacctgcctacctaggctgcctatgtgagacagtgaggaaggaagggcaggtctacttctcttcttaccttggggctgctgacttgctccgactacagagactcctcctggctctttcccaaggctaccagcctcttttcctttatgtctgctcactcattggctatgcatttgggaagtcagggggttgcagaggacgtgactctctcctgccattccccctcctctaccttttttctccagaaaattccacaaacccagtgggttaaaagtggctcctccttggccctgtgtttgatccactgccatctctgtttggaggcaggccactttatattttacttcttttcccatgagcggtgggcatgggtggtgaggggaatattgttcagttcctctgtttgtcccattctgaagtgaaagctcacaggatccctccgggtcagaggagttcaaggacattagtcacagttaatggtgttgataagaagatggatataaagagagggtggagggcagtttggggtggcagtagggaactcacctctggctctgcttttgtcttcccattacccctttgtactggaaacagtgataattcccccatttcccagcaggaaacactgagacttagaagggccccaggagggaagcctggagaactcgtcctttccctctcatccattctctgtccaggagctgacactgcctcttagcaggtgctcagttggtcaggcccagtgagttagatgcagtcccctttttcatcacttttggcaattttgtattttttgaaacaggatcttgctctgtcacccaggctggagtgcagtggcgcaattacagctcactgaggcctcaacttccccagttaagtgatcctctcacctcagcctcctaagtagctaggaccacaggcatgtgccaccatgtttagctaattattttttttaagagacgggatctccctatattgctcaggctggtctcaaactcctgggttcaagcgaacctcctgccttggcttcccaaagtgttgtgattacaggcataagccaccacacccggtgcgaattttattaaagtgagacatacagtaaagtacacagatttatactttctactttttaaatgttatttgtctgattataaaggtaaaaatcataaactttgaaaagtgacaatcaaaaaaccccagttgcttgggaatagcaaccgttaatattttatgtgtactttttctgttggtcttctaatttgagagttgttgctagaatctggctgttgggaacagagcaaataaggacaggggtcatggagagctcgttgccctcttctcaggatgtttcccggttacaacccagcttctgatcttcacctgcagcttagaagcaaagcgttcattatcatccctaccccagctgttaataagttaaataatctgcgataataccacagaggccattatttattgaacagcctgctttgttcaaaatacaaaagtcaagtttgacatgtggaatgagattcctagggcttggaggcaggcctgtccctggggacaccagttggcctaagtgaattctgtgtgctcacacacctctgttaatagattggtgtctaccttcagtctgcttcttaggcctccctttggggcttgtgatcaaagccagagggtgggagccctgaatgggaagatgtgaccccattcgtggacttagcagcctcaaccatgtgtgtttgagcctctctaccgaaactagcttctgctggggccttgagttattttatgtgaagtgctcacaagagtgcttggcacattttgagaaccttgtgttagcgaataccatcaccatcaaggtcaccatcatctccttatccaggctgggatagaaactgtcagagcttcaagagacgttaaaaacagtctcttctgtggttctcatgctttagcctgcatctgaggcactgggggggcttgttagaacatggattgctgggccctgcccacacagtttctgaggcaataggtatggggtgggggccaagaatgtgtgtttctgacaggttcacaggttctgctgatgctgctggtccagggaccacacttggagagccattagtccaattccctcattttgcaagtgggggcctgagggaaagaactcagtaggaagcttaatactgtttggtttcagagctagaaccaaacccaggtctgcagcccagtgctttaaccacatgatgttctggtcatccatccccctggaagtgcccgcagttgggtggtaagggactgccttcccaagagtgaaatagtttcaactctggaaagcaagcaagagcaggcacagcaggcctctgagggccaggagtcccaatcctaaccctgctgtggtctctcttttatgatgttgggtcattcatccatgtatgtatccaagaagcatttactgattaattaccttctgtgggaaaaaagctgtgtctggcactgtgacggtacttagacaaacaggacgtaggaacatctctttctgttcaatcccatggtgctgccgtttcctgcagtgggctctggaaccttctcccgaggggcacacagtgagaagagaggacttggagtaaggagactggatactaatccttgctctgctctgacttaatgggtggccccaggtgacctctctaggcctcagtttcttcattagaaaattctgtgaggcaatgagtgaagtgatggtgaacagaactcctttcccagcctgagattttacaactctgggggctttcaaatagcttgtaatggcagctgtcttggtttcaatttttaatcatttatttagtaccttgtcccatgttttcttccttaatatggaacagactggactctccttgtgtataaggtgtgaggagctagaggagacaagatgcctctcatgcttccacctctcaggtgtcttgttatctgctgaacactgccaactgcagtggtggttgatacagcttggctctgtgtccccatctaaatctcatctcaaattgtgatccccacatgtcagaggaggggcctggtgggaggtgattgaatcatgggcacagacgtcccccttgctattcttgtgatagtgagtgagttctcacgagatctgatggtttaaaagtgtatggcacttctcctttgtgcgctctgtctcctgctccgccatggtaagacgcgcttgcttcctgttcaccttccgccatgactgtaagtttcctgaggcctcccagccatgcttctgtacagcctgtggaactgtgagtcaactaaacctctttcttcataaatcacctagtctcagatagttctttatagcagtgtgagaatggattcatacagtggttttgccctcatagttttgctttgcttttcttcttagtctattgtttattttatccataatgaaccaggaaacatatgcaacttcatagagttaatgaggagcacaataataataataattctacaaatttgtctgaagatgatggctaccagattgtattcatttcaccagaatttttacatgacacatcaagatgtttcagtactaaaaaaaagtgataattatatctgaagtggattttcatttactgggaataaacactatctacaacaaagaagtgcatgtaaatcagtctgaaagcttctcttttttagaagcaaaatttaaaactgacaaagcaccaagtgtatgaatttccaacttcagcatgtgagagcagcttttgactatttttaaaccttaacatttgatgaaattattgtaatataatttgacccccaagactgatataacatctaaaaatgtgttaacaaatcatgcttttcttttttttttttttttctttttttgagacggagtctcactttgtcacccaggctgcagtgcagtggcatgatcctgactcactgcaacctccacctcccaggttcaagtgattctcatgcctcagcctctggagtagctgggactacaggtgcatgccaccatgcctggccaatttttgtgtttttagtggagatggagtttcaccatattggccaggctgttctcaaactcctgacctcaagtgatcggcccacctcagcctcccaaagcgctggaattagagtcatgagccaccacaccaggtcaaatcatgcttttattatctagttaatctggaataaattgaacagtatgtgccattgctaaatggggaaaaagttgaaatttgcctttatgcatataacaatcaacattaaatattgtgttaaaactacactttgtaaaaattttcatagtaagctgatctaaaattacatattttaaaacttaaaataatcaacattaaccaaatattctaaaattcccttggggtgatcacaagataaaaaagatgaaaggattagaaagaacaatctccaggattctggctttgatgctctggaattctaagatggtacagggtctgaaaatcatgaagaacaggtgagtatagtagttttctaggagtgagggatgtaatgtgccccccatgccctaggattgttgttagaaacaggattagacacagtctttaagagtctacatagcagaactaaaatcagagagcagctttctgtctagtttatccaagaactttctaatcatgggaatcactggatattagaattggaaggagcattagcgatcatctgatcccattagagctgcccccaaatagaaagtggagtaaggcttggcgtggtagctcatgcctgtaatctcagcactttgggaggctgagatgggtggatcatctgaggtcaggagttcaagaccagcctggccaaaatggcgaaaccccatctctactaaaaatagaaaaaattagctgagcgtggtggcatgtgcctgtagtcccagctacttgagaagctgaggcaggagaatctctggaacctgggagacagaggtggcagtgagctgagatcgcgccactgcactccaacctgggtgacagagtgaaactccgtctgaaaaacaaaacaaaacaaaacagaaagtggagtgagaatccttgtgagaagtaagtgctacatcttaggatgtgtttaagcagaggctggttgacccatgcctgggacaatggcctctgtttgggccttcatggctggagccttcctgaggctcagaaatgagcatggccacatgggcagtattcccttccatcctctcctaccagctgagttttctttggcaaagttcagtccatagatgggtgagctcagggcctggtcctgggactctgggggtactgctgtggcaccatggagctctcaccagcctcctgggcttgcctcatctgggtgagctggcttgtgtgtcttcagtgacatgagaattttaagtacatgttttggggacgggggcagtgacctttgaaagagaggctgacggtctggtctggaggcaagtcccatggacttgaattcaagacacacctggggccttgcctagcccacagcatctactgccttgtcaatagacagtgttcccatgccacctcctcccagcctggcttgatactattatgaccccactaacagatgggaagcaatgctgtggaaagcctaaaccccagataatctacaacccacatttggtttaggaatgatctactggatgtcatttctaaaacatagattatccttcctaatttttatttagtcaaggctgaaaaaaatgttttaatatacttggagtccatattagaagtggctagcctagaatgtgttcaggctcagaaataagctgtcccagacctgaacatttgctgcagataattgaggattgcttttagttccccataatcacattagctcatatttttgtatgttaatcctcttcaactttagttatttcctctgtgtgtatgtgtgtcccccatgtcccccatttagacttgactggcttcccagagctgcagcctagagccttctttctgcatctcttcttacctagggcttagtcactggctcctgtagtactttgaggtgtagttaagcggaagccaactgaagcatagggtttataacctggagccagtgctttgtgttctattcctatctggggagacctttgttgggtatatgtgcatgtgtcctaaacacagctgttcacacagctgctatctcttggtattgtgccaaacccataccagccccctatattgcactgaactgagagaagactctgatgctcttggcttgtcccacttggagagagagaagggagtccccatggtgaaggtgtgaatgagtttcttagctgggtttctcaaaacacccctttctgcctgctattcctacccatcggggccagctaggcacacccctgggtctctcctggcaagggggaacccatccataggggagagagggggaggaaagagacaggccacaagagagctgattgtgggggcttctgcttggcttcttttctgctcctccttgggaagggctccaagaaagcctcctgcctgtctcacaaacctagacatagccattagcataatctcatagctaaattgttcactgactgccactaggctgcccattccccacccccacccaccagcctttttgcctgacctattcatagactctcagcaagagccaaaactcttggccagttatcaatgtctcttgtttgctctgttccttgggtagtgggctcatcaaggggatgcacgagttgggggctgtgtgggagtagcctcacctacttccatctctgtcacgtcaggccccttcatttttggttgatgcctaacccaataggtgaatgcctatcttgccagtaagggagctggcacctgggaacttggtgtgagacatagaccccggttgcgttgccttcccccaccctcctgacctgggaaatcctctaagctgacctaattacctgcagtagggaaagcatatggattcccagcagatgctgcagtttgaggagggaggggaccctgggacaggtgggtgtgtgcatgactctgggattaaccctttggctgctgcctccttaggacagcatctcctttcactttgccatccttgtgggaatgaacaactctggagttctctcaagctggttagccctctccagggcattcatctctgggacacaaagcatcaacttagtgccaacttagcactgacttgggggactttctgctcctttcacttggcactgatcatcagtagatgggtctacttagccagaagccctaatctttgcttcttcaaggttccctgttcagtaccctggcaagtccttggtaagaagtagttttcctctgagccctctcctggcctcactctgggctaatagctgcttctccagacccaataccatcagagaagctgagatacttgggagtggtatacaaggtatcttcacccagctcatcacgcagtgattgagtgtgtgctttgctaatagtgtcttacattgtcacagtgctcttttacttgcattggagagcctcctttgagcttcctgacagcactgcaaggtactcttgggagccctcacaaggactcctgagactcaggctccatcagtgagtgagggatagagccaggatctatctgctgtcagtccacctgactccagcaacagtgctcttcgcactatcagagctgctgcattagtgtagatagagcatatgtataatgagacttagcctcttacctcaagggcattatcttagtttggaagcaaggtttacccatgcagaaaaagactcaagaatactattccatgctgaaacacaactgtataactgggaaccaagagacagcaatgggattgagaaggagaaaggccactgttgactggagtcattggggaaggctttgtggaaaaggcagactttaagctagaccttaaaagatcaataatattttgatacatggtgaaaaaacgaaaaaagactttagaaattaggacctaggaaagactgtggtgggaatggggtgggtgagatatggggaggaggaatagtaaagagacctctgagcacagggcaaggtgtattattgaacaggagggcactgagcgagggctgaattccaaggtcaagtcaaacccagttggacccaagagactggaggagaagaggccagggctgcctcacacaaggacccttagaacagggacacaattctaaagcattgccttggacctcaccctccaacccttgctgctatggtctcacctgccctccatgctcctagaagcaggagttttagacccagaatccctgcttgttgacatagctagagatccagcagatattctgagatccactgaatgaggtctctaaagtggaaaccatgtaactgggattgggcaggaaaagctttcagggaggagaagcacaagagaaatatttatgaaagaccatcctgttggaccttttatatatgtttcattaactcttacaatgaccctatgaagcaactattatcattatccccagttcacacaagaggaagctgaagctcagagagattagagtaacttgctcttggtgacaccgccagtccacggctagggccttttgactcataattgctgttccctcctgcctccctgcttgtaaaaagactgaaaagttatggtctttgccctcgagagcttgcagtccaattggaagaacaggctcaaaaggccaagaagacccctaagagtactgggcaacagggtggggaaagtgaatatacagacagatggctgttgcagacaaagcttcccaaatgaagctacacttcgggacatcagtgagggtggtggacagggagaaggccagttctgatggagttggtcacaaaagtgccaaggagagatgcagaacaggtgtgtgtgtgtgtgtgtgtgtgtgtgtgtgtgtgtgattgtgtgaagaaacgtctgccaaacatatgtaaaaaagaaactagaacgatcccccatgtacctaatgtctaaattttaaaaataagttattgaggtaaaatttgcatgacataaaattaataattttcaagtgaacgattcagtgacatttagcagattcacaatattgtgcagctatctcctctctctagtttccaaactttttcttcatcccagaagatcaccccatacccattgaaaagtcattccccattctccctctccctatcccctggccatcactaatctgctttctgtcagtatgaatttgccttttctggatatttcatattaaagaaatcatacaatatgtagccttttatagctggcttctttcacttagttttcactaatgttttcaaggttcatccacattgcggcatgcatcagtactacatccctttttatggctgaataatattccatcataggtatataccagaatttgtttctccattcacctgcaaatagatttttggactgtttccacctttctgctattatgcatagtgctgctatgaacacataagtacatgtgcttgtttgagtacctgctttcgattctttggggcatttatatacctaggaatggaattgcagggtcatgtggtaattctgtgtttagcttgtggaggaaatgctaagctgttttctagaggctgcaccatgttatgttcccaccagcagtgcatgagggctccagtttcccctcctcttccttgctagtgcttgtcttttgacttgaagatgaccccttacaattttacacactgaactcagcacagcaggtgccaccttttcctcaaagtgggcccaaaatcccacccagcttgggccaggagccttggccacttctcgattctgcttcccatacttgctctggcatcgccaaccttgtcttctcttaggttgggagactggacttgtagaagttggaatatcctgctgtgatggtcatcggagcagaataacccaaaatatatgcagtttcctgcacggcgtgcccctgcctgcctagcaacaggtcaattggctggtttctgggctgggctgtcctgcctgcccctcgagtgccctctgtctcccctgtcgcagcccccagaatcccattgtgtgaccacgtgggatctcaaagtctgctgaccctgctgctgggatgttttcagtcctgcttgggtgccccaaaatgtcagctggcttgaagggatgtacactgctagtagggtggtgtttttgtttgctagggctgacaaaacaaagtaccacaaccctggtggcttcaacaacagaaacttctttccccacaattctggaagctggaagcctgagatcaaattgttgacagggttggtttcttttgcagggtcctctacttggctgcagatggccacttctccctgtgtctccatgtggtcctccctctgcaaatgtctgtgtcctagtctccttcttcttcttctttttttttttttttttgagatggagtttcactcttgtcacccaggctggagtgcaatggcgcgatctcagcttactacggcctccacctccggggttcaagcaattctcctgtctcagcctcccaagtagctaggattacaggcgcctgccgtaacccccagctaatttttgtatttttagtagagatggggtttcaccatgctggccaggctggttttgaactcctaacctcaggtgatccacctgcctcagcctcccaaagtgctgggattataggtgtgagccaccgaggctggcctaatctcctcttcttataaggatgccagtcatattggattaaggcctacccatgtgagctccttttaccttaattacctctttaaaggtcctgtctccaaatactgctcagtcatattctgcacccataccgggatagaacaccaaatgtgcataataataagggagggggaagggcatctgggagaggccttgtggttcctctgggctcctgttttggtctgagtgactcatccaagcaaatacagaacaggtggaggggaagagagtcatgatggcaacgaagagggcactggggacttcggggaggtgggagaagcagtgtccatgatcaataatttattcctggatactaggcaggagggcgttgtcatggcaacaggcagctccagcagggactcctctggagtcccctctcctcactccctccgctccccctcctgccttccctgctttctcttgccgcttcccttcctcatcattttccttgactgtctcaggaggctttttgcggagtggagactgcctgcacctgctccgtgtaggagctctggggctcccaacagccatggcagctccttccccaccggggtcgtaaccctgactcttctttctggaaagaccccagtgaggggccatctcactgattccccaccgccaggcatcttgctttagtggaagcacacggggcactcctttatctcacagccggttttaccacccgtctcttgccctccgctattcagttgaatgcactgactttttttttttttttttgagacagagtcttgctctgtcgcccaggctggagtgcagtgacgcagtctcggctcactgcagcctctgcctcccgggtgccagcgattctcctacctcagtctcttgggtagctggtattacaggcgcatgccaacacgcctggctaatttttataatcttagtagagacggggtttcgccatgttggccaggctggtcttgaactcctgacctcaggtgatccacccacctcggcgaatgcactgacttctaaccatgctctgctcactgtgccaggtgcttctgtcctcagagagatcccccaagccaggcagccgggcagggtcttcccccgccttagcccctagatgggaccatccttgggactgctcatcattggccacagcagttggtccttcatctcttcctcctgtcctcagtggatgggaagatgccaggagcatatggccaaccagaaagtctgtgtacctcactatactgtaagctccatggcagggattctgtccttagtgccacatagtgggtgcccagtaaattatctgtgctatattgtggaaaacatgagacaggtctgaaggatgtctgagacaacaactgggtcttgggtctctaaaccaatatttcccagaggctgggtcttgggtcccgcagctgcactgaaggaatccattgaatatttaaagttgttttttatgcacattaaaattcactgctcccataatttactggctgtaacaactagtaagggatctgggcctaaaataaccatttaagacttaatgttattagtcttgtaattgctgctaagggtcttgtcttttctctgagtttgtaaatcctcatgcacaaagattaggaaaacatacccctaagctggagggcgccaaggggactgggcagttggagaccaaactcagctgccttcctgatgtgttggtttcctaataaagccttgagctgggggtgcagatatagccgtggagcatctgtgagcatccttggggatcagggaagaaagggaggggttacccggcagaagagtgtggcgtgggctgccctcatgacaagcagctgccagtggagaaaagagccttatcttcagggaagggacagctccttcccagcctacaggctcacaccctgatggcccaggagagatagcagtgatgttgtaatcaaatggccatgatactgcaggcagggattagagtcaccaagaaaactagctgtattggaaatgtcttcctctggcttatctcaggaactgttcctgcttctccctgcaggggatcattttccaacatgcctgtctctagtcctcatcaaaaagcatttatgaaaggcctgataagttttggtgtggtgagaggtcagggcacatgggctgactgtcactggagtgtgggccagtgtcccctgtgccaccctcacttgtctgccacctgtgagggtctcaacactgctgcctgtgagagctgccaaccagagccatcagctgctgctctcccataccagagctctcctagcagaatttagcacagaaattctgcccacttcttttttctttggggaaaaaggtaaaatacacttaacataaaattggttaaaatttaccgttttaaagtatgcaattcagtggcatttagtacatttacaatgctgtgcaaccaccaccactatctaattccttaagacttttattaccccaaaaggaaaccctctaccaatgaagtggtcacttcccattctttcttccctttagcccctggcaatcattaatcagttttttctctatagacttgcctattctggacacttcatgtcagtggaatcatataatatatggccttttgtggacttagtatcatgtcttcaaggtttatccacattgtagcatggatcagttcttcattcctttttgtggctgaataatactcaattatctatatatggcacatttttatttctccattcatccattgatggaccatttgggtttttttttctacctttgagctattgtgaatagtgttgctatgaacatttttgtgtacaagttttagtttgaatacttgctttcctttttttttttttttttttttttttttggagacaagatctcattctgtcatccaggctggagtgcagtggtgcaatcatctgtcactgcagctttgacctcctgggcacaagcaatcctcccacctcaacctcctgagtaactgggactacaggcatgcaccaccacacccagctaatttttgtattttttgtagagatgaggtttctccatgttgcccagattggcctgcaactcctgagctcaactgatccacctgccttggcctcccaaagtgctgggattataggtatgagccactccacctgacctgagcacttgctttcaattcttctgggtatatacctaggagtggaattgctgggtcatatggtaattcaacatttggcttattgaggaactgccagactcatctcacttctttttttttgagacggagtctcgctctgttgcccaagctggagtgcagtggcgtgatctcagctcactgcaagctccgccttcagggttcacgccattctcctgcctcagcctcccgagtagctgggactacaggctcctgccaccacgcccggctaattttttgtatttttagtagagacggggtttcaccatgttagccaggatggtctcgatctcctgacctcgtgatctgcccacctcggcctcccaaagtgctgggattacaggcgtgagccaccgcacccggcctcttctcacttcttgacacatgccagtctgtgtcttcttttgagcgagtggacagcctccctgtacccactccagactcatgaactttggcagccacttttggttggtttctggttcttagcctctggtcaagacgcagtgacatgggtggacacaacatggggatctagcattaacaatggggtgatttctaattatttttagtggtgttaccagatcttatttactcatacatgtgctgtcctctgaaactgtaccatgttgtgggctgcatatttgttcctataatgaagccagtgctcaaaaccttgtttcatcctgtgtaggaatagccttcagagttcttgccttgataatcattctttgcttttgacactaaacagtattcccaactgcatcacccaccatctttcccattcttggctctatctttcaacttaagaaaaaaaattaccatctaccctcataggataaagatttgtcaccatggggtcccatcaaaagaatatactgtaggcttgaaagcagttccaaaagaaaagcttctgaaatgttctaagcactggtgggtgcattgttggaatatgtatatagcttcccaaggggacttctttgaaggagacagcactaatttaaatgtataaattctggtgtgttcatttaaaagatcagctggaaggctttataggcatataataaaaagtcgatgtgaatggttattgaattatgtacacctccaggaaatcaaagaaagagttttactttaggagttttagagagatcaagtttaaaatataacctgggagtttggtgggatggttaacacaaaatagtattacccagctgctagagaggagaagggtcagtggggagaccaaaggcttggaacaagcatctcatcttcataagggttaggaggtcacttaggtagtctggctaggaaggggaagttgctatttttattattctttatctttggagggcagtgtgaggagggaggctggtgagaagtacaggtgaactggaaccttggtgagttaagtttttaaattttttaaatagcacatctcttgctatagcctagactactcaaggcttccctgtaaacttcaaatattttagccagctttggaagcctggcagagaagctttggaccaagcacttaggccaatgtgctgggtgtgtttgacctactggatgtggtgcttttcctcctcgttcaaaaactaaagtcagcacagaatggggtagaagtaaagtcatctggagagtagactggagggaagtgatgggtcagagtttagtctggttctttcgagatttcagaggtacactggagactggtgacactgtccctatttgacaaccaggcctgggaagtggatgacagggtcagcggaatttcagagccaagaatagatccccagctccatgccatcaccacagtaactcactccggagtttgaagaatatcgccctctggggaaatagcgcttctgaaaactgtttcatgtctttgtctcatttatcccagcaatcatttatttggggtcagatattgatggatttgacagcaaagcagtgaaggatgttgcagtgatttttaaaaacatttttattgtgatgaaacacagttgtctatataatagaaaacttgctatttcaaccattttgtagacatacaactcagttacatttagtatattcacaatgttgtgtaaccatcactacttttctgtttccagaacgttttcaccccagacagaaactctgtaaccagccaggcgcagtggctcaggtctgtaatcctagcactttggaaggccgaggggggtggatcaactgaggtcaggagttcgagaccagtctagccaacatggtgaaccccgtctctactaaaaatacaaaaattagtcaggcgtggtggcgggtgcctgtagtcccactactcgggagcctgagccagaagaattgcttgaacccagggggcagaggttgcagtgagccaagatcgcgccactttactccagcctaggtgaaaaagcaagactctgtctcaaaaaaaaaaaaaaaagaaagaaggaaaagaaagaaaaggaaggaaggaaggatggaaagaagaaagggaaaggaaaggaggaagaaagagagagagaaagagagaaagaaagaaagagaaagaaaagaaagaaagaaaaagaaagaaactctataaccattaagcattaacttcctattatctactcctcccagcctttggtaatcttgaatctactctctgtctctacgaatttgtccattacattacatatatttcacataaatggaatcatacagtatttgttcttttgtgtctggtttatttcacttagcataatattttcaaggttgaaatgtatcagaacttcattcttttttattgctgaataatattccatggtatgaatgcacaccgttttgtttatccactcatctgttgaggacacttgcattgtctccatcttttggctgttgtgaacaatgctgcagtgaatattgtatataagtacctgtttgaattcctgttttcagttcttttgggtatacacccaggagtgaaattgcagggtcgtatattaactcttatgtttaactttttgagaaactaccagactgttttccaaagtggctgcactattttacattcccatccagcagtgtacaagtgttccaatttctccacatcctcaccaacacttgttatttttcattttattgattatagccatcctctacacatcctatagtaggtgtgaagtggtatctcattgttttgatttgcatttccctataatgattaatgatattgaacatcttttcatgtgcttcttggccatttatgtgtcttctctggagaaatgtctgttcaaagttccttgctgtttttaaattggcttttggtcttttgttgtggttattgttgttgggttttaggagttcctgatatagcctggatattaaacccttattaagtggaataagctgtatcttcacagcacaaaccctcagcctaccctagagaaccttgggatttgcatctgttttctcccgttctgtaggttgtcttttcactttattgataacatccttcaatacataaaagatttacattttgatgaagcccaatttatctcaccttgttgctggtgcattggtgttacatctaaaagtccattaacaaacccaaggttatgaagttttacttctagttttcttctaagagttttatggttttagcactcatatttgggttgttgacccatttttgactcagtttttatatatattagtgcccctttatccatgagggatacatttcaagatccccagtggttgcctgaaaccatgggtagtactgaaccccatatatactatgttttttcttatgcatacatagctatgttaaagtttaatttataaattaggcacagtaacagattaacagcaataactaataataaaatagaaaacttatactgtaataaaagtcatgtgaatgtagtctctctctctcaaaatatcttaatgtactgtattcacctattttcagaccacagttgaccttgggtaacagagacctcagaaatcaaaactttcaataaggcaggggggactactgtagtgtgaggtttgtagtttggggtataacttcattcttttgatgtggaaatacagttttcctagcaccatttgttgaagaaactgttctttccccattgagtggacttggtactcttgtcaaaaatcagttgaccatagaaatatgggtttatttgtggactctcaattctattccattggtatgaaagtttttccttatcccactacaacactgatttgattaccatagctttgtagtatgttttgaaatcaggaaatgtgagtctctgactttattcttcttcttcaagattgttttgcctagttgaggcctcttgcaatttcatatgaatttgagtataatcattcttgagcatagtgctggcttctgttggctgaatacccagaggtagaactgtggggccacaggatagaagtatgttcagccttagtacacaccggcagttttacaaagtgattgtgccaatttacccttctgccagcagtgtatgggagttccatttgtaccacacccttatcaatatttgatatgccaatccttttgtaaaatttaacctttctggtagactgccctaaaattatgagtcaaacattgctatctccttcaaggggcagccaaagtgcagtcatccacaactttgctcaagtggactttctcctagcactgggtcttggagattgcttcttgcttccttccccatcagcagcaatcagggtctagctcaggtccggaggctggagctctggctggtggaagaggcagaataagctgtatcctcacactgccaaacctcagcccacctgagagaatcttgggatttggagtgtgtgcgtagtgggggcagagaggatgatcaagggatgctaaaggaaaaatggtaactggatgccgtcttggctgcaggagttggatatgattccagtgtggatggggcttttggagctatgccgagcccttgagaggtcagttcttaggtaaccatgcttccaagaattaagaagctggcagacctgtctcatttgaccttgaaaaggctctttcagctaccgatcctgagtccagaaagggtaaaaggcttttcccagccctacagcaccctggggctggaaactctcaggcctgtgccttatacttgctcagctctaaaggccctgaggcagtgagcactctttccactcacagcttgctgcataggtgaactcaagtttagtaaacattcactgcaagcctgtgtgtgcaatacatcaaactaggcaccttggaagctgcaaaggacataatatgaactccctgactataagtttttcatcatctggtagaggaggaaatatctgcacatatcattacaatgaatctttgcttagtgatggagatacataatgtcctttggaagccagggcaggagagttcatgtcccaccttgagagatttggtgtaccatatccatggttagtgcgtggacatgaagggttggattggcttcctggaggaggtggcattggtactgggccttagaggatgaataggatttgttgggcaaattttactccagagatggagtaaaggaattgtaggcaaagaaacaaaaaaagcagcagtgtagatgttactatcctggacatttggagaaaaacaggtgcagtcggattactgaatgctgacaaggggggacccctagatgtcagcctggaggagctagatttgattttgcagaaacagggagtccctgttggatttgcacatggaagatttatttagtgttgctcctaattggagagcattctggtaacaacagggagaccatgggactgctccacccacacagaaacagaaatacaatacccatatccagataggcatatgtgcccacaaacacacatacaggaactaggacaaacaaacacactgagacctagagacccacatatcaaaacacatagtcatactatcagaactcaccacacacacacacacacacacacacacacactacacaatccgtaaacccaagaaaacacatattcaataccacacacatgtcctgaatacctatagacacatgaaggctgacagatgcccacatgtactgagtcacactaaggcacacacatataagtcagatagatcccctgtgcctgatatacacaaacgcccaccaagcctggcaggtatacatgcacatttagacttatacatacaccaacacgcttacacacacacacacggccagaacatgctcacactcactgaagcccctccccagagacacacatgctatctgcgcactcatggtcacacgctcatgcataggcacagccacaggcagacccacatagcagccactccaagcagagacagagacaggccctggcgggtaccgactcagcccatggctgcctggtggcacctcacaccctcctccaaggctctcttctaaatgacttgtctcttggcttccagccctgggtcatcctggggtctcagccctggacaggccctcgaggcagtcacatcctacctcctactcagtgctgagatttctaagctcctctgacagggttacccagcttctgcttaaatatttcagacaaaatactttgtggtgacaagtttcccgttgtaatagcgttcactttccacgctgggaaatggggattatgcacccagggatgagactggacccttcactgcagtagttacagtcagtgagcaaatccagctggacggcctctggcctgctcagtccaccctgtccccaagtccctgtgggctgcacttggccacaggatcaacagttcccctaagtcattgtattgctgatctcttctggtgtgggagagcaggtgggctggatgtggcacaccagacctctttggagggagctgtggctggcaggggagtaagccttggggaatcggaggagcacgacctggctgccctgcctaggatgcctaggacatgctggcgctctcccccaggcaggccagctgttactagagccactctgcattggcacgggctgtcctctgtgaatgtgacccacattcaggcctgcccagcagctgtcttcccctaccacattcctctttctggctgccaacccctcctggcttcctgttccctatcggcattaggctccctgggttgagaaaggggctgctgtccacaggtggctttgggagatgggctgggcaggtgtggctgcctctatgaggagaaaagccgcaggaactgcaaagcgatggcttccaacactgagctgagctcagagcaggcagagaacaggaggcaggagcatgggggcagctaccctctgggtctgcccacccctccaacccccaggccacccagcagggggtcatctggatgtcacctgattttctcagcattttatccccttttgttccgcttcaatgtgggatcaatctgatctctccattaacccctctgtaccttgctgatatggaaaagggctgcctcttccggggcagaactttgcccctgacctgggctgctcactctgttctggctctgagtcttagggccaacgccttccatcctggttgtgcctttcccctctatccttcccattcccttacaaactccattagccctgtattcattataggcaagagaaatggctcaacaggagcccctgtgaaaaggccagatgggggctagatgtggggctggagggagccagggtgggagtgcgggttgttgacttgaagctcagtatgagccaatagtgggatgtggtggttgaagaggcatcacaacatgagcctgtcccaaagggctgccccgtgcaccctgtgtggggaaattatgccctgccctgggcgccataccacaatgagtactttatcttgttaacaaaagtgatttatgtttacattgcagaacacttagaaaagataaataaacacaaagggaaaaaaagcaaattatccataatttcactgctcaaagatagtcattcttctcctatatttataatctgttttttactcaatcttccatttgattaaaatattttactatattattttatcattttgataaaatatatcatatttcattgcttatgagagtattaagagtacaggccagtttcttagcatttaccatatgtattaggtactgtcatttagagaatctttgtactcaagttgactgtgatcccagttgtacaaataaggaaactgaggcacagtttcccgaggctcgcctgcactaagtaacttgcccaaggcaacatggccaataaatggcagagccaaattttgaacccaggtcgcctgctccagagctcttataatctccacactatactgactttcaaaccatgggcgtgccatagtttgtttatcatttcctgtagtgatggttgtttaggttgtttctaactttttcttatcattataaacaatattctgctgaatatttgtgtgacttaaatattttaattatctttgattatttaagatccattcccagaaatggaatttatgcaatgaagggtataaacatttttaagatgttttcatgtttttccaaactcccttctgggaatgctgttatcaggggacgcctcctccaggagggtaggagagctgagccttacactctaggagaatctctgacccagtgaagtttgtccatctcagaggaagcaggacaatgtggtgagtggaaatagtttcatcaggggaggttgaagggactggagatatttagcctgcagaagatagggacaagggccacacgcatggctgtaatcaaatgtgtaatgggctgtcaagtgaaagagagaggtttgtcctgaggctctcgagcagaagtggaccaggggaccaaagttgcggagagccattgttctgtgcgggagccattgtcctgtgtggggccagcacacagccctggatggaacagggtgggtattacataaaggttacatgaccagctgccacctctggcttgggttcatggaggacgtgtgcatgggggagggccaggaccacccccgccacactgtgctcccctacaaaacatgacgtctctgaatcttaacaggggggtctgctccccaccccacccccgccttggggagcctggcccggcctggtacgtctctctgtctatcccctcaggagcacagcctggcttgtgtcatgggccacacaactcttccattatgcatgagggagacccagcggtgagcgagtgagcaagccggccgagggaggggtgagtggttattaataaacaagtgtattgtgtggcgttccattcacggcactctcagaggacgtggtgggcttgagataataaagccctgtttatgccacggagggctggggaggtggccgatgggggtgacaaggagcagggaagccaggaattattttgattccacccagggcagggctgctgtgttttctctgaggccaactttcagggaaaagaaggatcttgctgggattttgctcaggcctaagtctgccagctgggatggcctggggcctaagaaatgcctagcttccctccccacctgtccccatggagggagactgagaagacgctggatgaaccagaccatggctccttcaggagagaggtaggatggtcaactctgccctccctcttggcctctcatcctcaccccattcctcctgctttggccttcaaagactctgaagcggtgtgtgctaggattgtgcatactttcccaacaaagctaagactgtggttgtgcacaagggctgcaagaatcttcccggcccagggagtggattggttggggttaagatctgaaatatgaagtaggcaggcttgaaggggaaagaggtggtggtactggtctcctgtcctaaatgagctgaaattttaggaggaagagaggccaaggacaaggctccaaagcccctgtgtgggtgggcaggggagctttgatttgaggaatgagggtgtctggaaaagtgagatgccggagagcattttagaggagggagactcagtgttgtgcgtctaattgtgaagcctgtgttaactctgtggcgtgtctctgtcctacgttagtcttctcctgttccctcgtttggccatttgctctgggctccaccatctcaaaccagctgtctccctcctgagtcttggcatttctggatctcaggatctcaggccaggaatgcagaagctgctggttgggaggaagtgagaatagtcccttttgctctcagctggcttctagggatggagagcagtttctgggtcaggagagccttggtttcctgtcacttcatgctaaaccaaaacaagagtgaagacagagcccacacaggcttatgtcacctggtctggctgatgatgttcactttgacctttggaggtggctttggtccagagctaccctgagttaggaaactctttcatgtcaagacagctctgtctacagagatgtgtactggtttgttgttggttgggagggaaaaaggaggctgatggaagggacagtctgtcttgtcctttgggtacagggctccctgaagcaggggtttggatccagtgactttaaagttttgtttgggttgaagattcagtgaccgtacttaacccaggaaggttcgaggctgcattagggccagaacaaactgatgatcccaggttattggagtattgcctccctggctcagaccaattcaaccttcccagaggcagtcagacctcaccccaggacagagtgtcaggagcattgcggagtgctccctcaaccctatgcacaaagcaaacggtacagttttccctgagcatcacgcatcccaggcctgagtgccgcagggtgatgaggaggctctacagagaattgcagctccttcctggactctccttggctcccacaggcactgtggacacttgcttcccatctccctcccacggtctgaaggagcagtgactatttttagaagcatctgcatgctcctgggagcactgtttctgtggtttattgctgggctgaatgcacaggagctggtgagacagctggggctggggagcgcaggcttgtgtgtggtcaactcaaccgcagtcagccggctgggcacctggcctggaggaatgacccagtgtcctccaccaagctttttgggggctcctactggctctgttgtaacattgtcatttgctgtgggaggcttcctggaagatgagggccttcatcatagagttgggcaggctgagtcatccttggacaaccctctctctgaggctgatgtgctcagggtgcaacaggaggaattggtgagatggcctcccccagtgatggcaacaccatcaacaactataatcacaatggctcttcactgagagccttctccatggtaggcagttctctgagcattggatgtttgtcctcatataaacctttcaacaacctatgctatcttcattttaaaatcaaggatcctgaaacccagagaagttaagcatgttgcctggtgtcacactgtcggtgactgagccaggcccaagaacctgttcttttagagcccctatgcttggagtctcttggagcttgctgccatgttgcctctcagtagaagacaataaagtgggttattttggtgtccataagaaggactgaggtcagatgcaaggaaatacttcctgacagtgaggggggctatgtgaaatgttcttccttccaggcaccttgcatttgaaaggcaccttgcatttcagaggggagctctcttgcaggctggactctggattaatgaccactcaagacattttctctcttgggattttggcagctctgttttctggaccctgggccagcagtggtctgccatgaaagatgctggaccatgtgtcagtaagaacagggagcaaccagccagcagctctgggtacaccaagtacctggctgggatttggagtcctaggaaaaagccagggaggccagagaatcccccaggcttagagaagaagcccgagagagagaaaccactcccgtggtttagtggacatttcatttctgcctttgagtcagatgtgcctgttcacccagaaagaagcctttggcttctgctggggcctctgttcctgggcctcccaccacagagcacacaaggagctggacagatcccggggaaggcttcgttctttacctaggacacaagcatctgcgggtcatgtgtgctagggacagctgctgggggccttccattctgaggcaatgaagaagccagagaaaagagcccctcagtgggcttggtgagccatctggatggggatgggggactcttctttgccaaccagctgggctgctgtagcttttacttcccctctgtcaccctgatctgtaccatggcagcagtctcaggagaatgttctgggggtggggtacgggctgtgtcttctccctccaggagctgcagtggggagcagggcagctaacaccctgcaagtagcatggcacagtgggtggacaggtggggttggagccagactgcgggggaacagtcccagttcagcccctagctgggtgacctctggtttcatcatctgtcaagtgtgatattaatagcacctgcctcttggattttgagaagataaatgaactaatccatgaaatcattagcacaggagtaggaaggaggaggctctctctgtccagtcctatgcagcctttgttccccttcgttcctacccagccgaaatcttcctgcgctgggggacaggcccatgttggaggtgtcctcactgtgtctcctgccgctgggcttggctcaggttaaataacccatggtctccatgttgcctcctgctgccactcccttttgtcgtaggagccagtgcaagaccacatgctaaattccagttcttctgccccctgggctgcctttcgccccattttgggtctctggaggtgagcatcgtcttctggtgtacgccaggcttctgacttcctgttcttcctcacagctcagtagtatctggctgcttgggggcctgggagtggaatcacgtggctttattccacccgctctgccctgtgacaggctctccagggccctgcccccggttcccattcctgcacttccaacccaccatcctgaatctacttccctccaccctcgggccctgggtcctgatggcatctgccccagatccttcccgcctctgccggtgcccttctaccctccccacctaggcctggggcctggtctgaatgtcatcttggtttatacttctcagggattcaagcacactttgcatgcctaaagcaaacttctcttgacatttaaaggagggcccggtgatagagtcagccccacatttataatcacttcggaaaaggagaggtaactttccactttgctgtagactgaataaggtcaaaatgagaggggtgggtggtgggggcaggtggcatcatactttctggctaccctcagtcactgctccattctttgatatgtctttatttagtccctcagtaacctaatggaggcaaataccacaatccccattttatagatggggaaacacgttaagtgacttgcctaaggttacacagcaattaggtaggaaagtcaagatttgagtgtgggtctgctttgttgttgttgttgttgttgttgttgttgttgttgtttgaatcattcagcctctagaagaaagtgggttggataaggtgctcatattgatgtagacacatctgcattttgattatccttaagctggatttctgagtgtgaacaaatccaaatctcctgttcacattgcatcttcctcactccccatcccttggctatgggcccttctctcataaagaggcctgggaggcactgaagggaagatgggagaccccagccttccactgttttccactggtctaacctccaggttagaccaggagcctggcaacactactgaggctgtctgcctcccagaagtcacatgtgcctaagaggtgactatattttgctggaggaagtggaaagaagaacagagtagggaatctggaggtgcctgagtcatacgggattagaaagttaaggtgcttcttttccctaaaaacagtctaggagggaacattctgcaaagtgattgcagattgtcgggaggcctcgagggctggagaggtgcagtccaatgagattgcttggatctccaggcccgggttctcttctgagtgctcccctgccctttccccccaccacgcccctcaggtcccctgctgtgggttctttgtaggagaagatgtaagtgacatggtaatggccctaagcacacaccagaagccaacggtagataccagccaccctgttcctccccactcccacaaatctccaaccaagacaggatgttattaactagtttttgagggaacatttggaactctaacttctatcagactgaggagaggtctgatagggtctttgtttgactgactctgaaattccagggttggtggggaaaagtggaaggaggaggggtctgcaaccctcttagactcagcctagaattgcctggtaatacacagtcatttgggatgtattgtcttccttcctaagcctttaagataggcctcctaaattactagtgaggcatggggcgctcttgctttatttcttagagattttttgtttgttcatttttggttttttctcaactttgaaaatcaactgtatcaaggtataatttacactcaataaaatgtagtcattttagagtacagatgcgttttgacaaatgtatatgccccatgtaaccaccactccaatcaagatggagtatatttctattgccccctaaaaatctcctcatccagtttacagtccaccgccaccccacagcccctgcatattttaaggatactttcagctctagggaaaaaaagatataaactaaagccaaaattttgccattatgatatatctttcttttctttcttttgtcattattttcttatttcatcatggtaaaatatgtacaacatacaatttactattttaactatttttaaatgtacagtttggtggcattaagtacattcacttattatataaccatcatcactacacccatcttcaaaaccctttcatgctccccaactagaactgaccattaaacactacctcctcattctcccctccttccagcccctggcaaccgccattctactttctctctctttgaacttagctacgctaggaacctcaataagtggaatcatacagtatttgtgcttttgtgtctggcttatctcacttaacataatgttgtcaaggctcattatattgcagcaagtatcagaattttattccttttccaggctgaataatattctattgtatgtgttgtcaactgaagaatcgtgggactcataaatgtggagaggagagctttgttttttataaagatttgcagcagcttgtaggctcggaagcatagcctctggtagaaaccaaaagcaggcactttgatggagggaagggtagaacaggaatttatgccaaatgagttggctaaatatgtatatatatatatatatatatatatatatataatatatatttatatatatataatatatttatttatatatttatatatatataatatatttatttatatatttatatataaataatattaaatgttaaaatattaaataatatataaatatatatttaatagattataggaggaaatgtgaatattcacaaagcaggggatgcacacatgcacagtaagcaaacatgcatgttacatacatctcatgttcactttggaatggagacttaacatttaaacgcattaaaattaggctctgcacacccaatggtgaaatggaaggcacagaggcatcctatacacagcgtctgtgaaacggccagaaccagtgcatggtcagtggtctcctgttgggaagccgtgctggtcacttgtatcaaaactgcaaaatggaacaggcaggcagttggttgaaatcgggggtggatcaagtctttggaaagggtaagtttctatttaacctttaggaaggaaactctgatagtagttactgaggtgggaggtataatgaggtatgtctgacctcccatcccatcatggcctggaactcaatttttaaggtttctatgggggtccccttggccaagaggggttccatgcagtcgatcgggggacttaggcttctgtttttatttatcaatatatactacattttgtttatccatttatccattggtggacatttgggttgtttccaccttttggctgttgtgagtaacgctgtcataaacattggtgtgcaaatatctattcgggtcattatggtatttgagtgctcagcagcatctcctagcaacttctcctggttcaacctgccctcgcaccaggacccggagtggaatgcatttctgctcctcatctgctgccctgtctcctctgacttcgtgcctgtggcaaatgatgtttcaaacactgcagcccttgatgggtacttccggacccaggcttcccaggcaatagagtttggagttcctttccccagaagctttcttttcagtgtatctaggtttctcctggccagcagctgacttctggagtttgattccattaagcttgttaatgcaagaatacaacagaacatctttgtttcctcaaggaaaaaagactaaattttatcaaacatctactaggtactggttcaaggtgtcagcacagcactaaaaacttcaccttcttttatacagcagctctgtgagatagggtcaaaatttgtttcaagggcaaagaaactgaggagagtctcagagaggttaagtcacttgtccaagatcacaaaagccaacactctttctctacaccaactaaatattagtaaatgcagttttcgccgttaaaaaaacataatggcaaaaaccgcaattacttttgcactaacttaataactccctggtcttgtaaatgcaaatgtgctagagaaatttcctggatgttttcttttacaatggaaatcaggcctggagttcccctgataatttggaaagaaaaccccttgggctttcttgccctagttctggtaaaatatggaattataattaaagttttgttgtgtttttcaaaatatacaaaagtaaagagtgtagtataatgaatccccacatacccatcactcagcttcagccatgatcaacacttggccagtcttgtttcatccagcggattcttctctttgatctgcgggatcctcccaattcatgtggtagcagttggtgtgttttggaagagggtaggagagtcggcagatctgggcaccgtggagctaaatccttcccagctggaagagtgttaattgccaccggttgaatcccctctgatggttcattattcatctggttactgaacaccatccaggaggcagggggacagatctttggagaggcctggccagaactggtggggtgggttgcacagaggcttcccttttgaagagcaatttcttcctacagtttgatttttattggagattcttctgagtggaaaaaaagaaggttatttgaggataaccttccccttaggggaatagcactgagccaagctaatctgaggacagaagtagggaccaaccagtgcaaaacaagtctgtggcctcttcaactagatttaatgaacatttttattttgtaaatgaaatttaaaatatctgcagcatgccagacactaggtgctttgaatgcaactatgacaagttggttaatctactctcaaaaagtttgtgggacaaaaaaataatagtgaataactaacatttgttatgtgccgacgtactttatggaaatgtgtacgttgtgtctcatattactactcgtctcccccgcaaaacagtcgtctgtaggatagggtacagtgatctctgttttatagacaaaccagggcttgggggcgctcactgaacccacacagctagcagaggtggaacccatggactttgcttctgctgctgtctgtgcagggtgaatgtaggacagggaggaccaaggggtgggagagaggagagataacgggaaccatcccttaggctgcagaaatgtggttatgtaaaaatctcaccagatgtgctttctcataggatctgggggcagccaaatggtacatttttctcttgacattatagaggactgtgggatttatttttattttgaaaacagggcagttcttttggaaatgggaaggagtgaagactggaacttgagaaagtgttctatcctgagactgcagaaaaggatggagagaaaggaattcagctgggtttgtttgttctgcttttatttaaaagaagatttagcatctttcaagggagaagagctgtgggaatagaagggatagtatgaggtataaagggcaatttctgatctggtttgaccttgctcagtgatcagatggtttggggttctcatgctgtgggctctcggctgtgggcacagctggtggtgctggccctctcattctggggtgaagtggcttggcaggcttattctctgcatggaggcctaccttgtgagtgtgaacacattttctagagccagaacattgactcagctagttatctcagtagcagggggagtgcacaatttattttaaaagaaaacctgagaacctcttttcttctcatcccaggaagcccctcatccctgtccatgtttaagccatcacctacaggctttaggttagacttagacagctctacctgcgtgagctaagagggagttgaaacactgaagtgaggcccagtatggctgaaatctcttaggaatgaagaaaaaagaagtgtagcaattggcattttaatgtaattttttttctcattgtaatgtttaatttcttttttatttatttattttttgagacagagtctcgctctgttgcccaggctggagtgcagtggggcgatctcagctcactgcaagctccgcctcccaggttcacgccattctcctgcctcagcctcccaagtagctgggactacaggcacccgccaccacgcctagctaattttttgtatttttagtagagacagggtttcaccatgttaaccaggatggtctcgatctcctgacgtgctgcacccgcctcagtctcccaaagtgctgggattacagacgtgattcccacttggccttgagtttttcactgtgagatggcaagaggtttcatctggttcagaggtaggggaatgaaacctctcaagttccttccagctgtgggatttggggtttttgattttttcctagttgaccccaccctgagttcccaggtgtttcaaaagcaaaattttatgcaggatcagcgtcagagagaacccaaaagaaagtcctgtctttgaatggatgtatcatgtccatttgcaccttgctgactgagacaggagacagatgaaagtggatgaggacacgtctttcaggagtttcaggcctcccaagctaaccagagaaatgcctgtctcttttcagaataagcgaagagtgtagcagccctcctgccctccctcctgggactgcaactcacaaatgtcagttactatggatacgggcaactgaggctcccctggggcaggggcagaggtggaggctgtttgtggcagtgatgcagggtagtgtcgctgtgttccccacaatggtgcctcagcatggcaggcagggaccggctttgcttgagcctctaccttggccctagggactggaccccaggttgaccagcagatgcatctgttgagccacccctgggggtgtgtgcccctgaagtaggcgacacctgtgcagagccgctgggcattaagtggcaggtagggcacagttcaggttggggaggcctctctattggtgacagatgcatagctccctcctcttttttctgattgtattaaaagtaatggcaaaaattgcaattacatttgcaccaaccaaatagagcctgctaggctaatgctagtagttcctctgctccctggagctcatttctgggttggagtcactatccagttgagctttactatgagtggggccttgtcctgaagacagaaggcagcagcagaaggtagggaagagcttctggtatgagacgggagacacaagccctgccgtcaatgagcttcagtctgatggggggaaccacgggttcctgaagaacacgggatagtagacaaaagacagaaggaaaaacccatcagtcccttgtttctgacaaagattctttgcttgacaaagattctttgcttgaccaaactttagccaggttcctgaaccttccgctaggcctacctcggcacttccttataaaatccagttttagcaagaaccctgctaagtcagtttgacaagaaccccccaccttggatatctgatcacccttgatatctgactaggttcctcatcctccaccactccccaggtgatgtctgatcaccctggcctgtttgcagcaggaatcctgttcggtctgtttagccagaatcccccttactcctgatgtttcctcttagtaattttccatccaccaacccccaccctgcttcttggctataaattcccactcacccacgctgtattcagagttgagcccaatctctctccccgactgaaagaccctattgcagtgctccctgcacctatctggatggtcctgaataaagtctgccttaccacgctttaacaagtggtattggataatttttttctttaacatttcaacccaccccaacccctggccatgccttccttcatgcttcccctaaagtcaggctcatctccatggtatacaaggcactgcatgatctggccctccctaccctgccccacagttccccctgctctgccgggctgtctttaggcttttcctcaatgttccagccagctctagccttggggcctttcctttttcttccctctgccttaagctattccccccctcacctcccagttcgctcctttattttatttaagtctctctttgatatcacttcctgaccaccctatgtaaaatctgccctttctttccccactgtgtatttcttcatagcacttccccactacctgcacttacgtctctgtttattgtttcatggcccgtctcccccactggaaggtaggctctgtgagtgctgggacaatgtcttgtttacccctgaatcccattgccaagagcattgcctggcacctgtgaggccctcggtaaatatttgatgaataagtgaaaactgtagctcagtgtttctcactgaattctgggagaatgtttaccatgtgcttttctattattttaccagttaaaagacaaaacttctcttttgcaattctaatttgaaattgaaagatgtttttcataaaagtggattttggtttcttaggatagtgtctctcacactggggtatatagacgcccggggttctcaggtatgctcatgggagtctgggaggtattctttcctttggaatacgcctacatatgagtcaagtttgggaaaacccgtgtatagctgctggaggccatggataagggctgaaggtcaagcataagggctagaggtagggtgtgttggagttgtctccagagaactttctagaaagccgatcttaaacagtagttacaaggaaggggtgagcctcaacacaggatagaatggcactggatgactcgcactgggagcccagcttatgtgaatgcagagaagctatatgtggcaagcactataggccataaggggcttggctgaaacacggcagcctgactgaataggagtttcaacttggatagaacaaggtgcagagttgagggcacttcataccccaaaagtcgaaatttgagtgagtgacagctgtgcagggctggggcggcactggagcagcgacccataaactctgctttctagccccttccccatcacttacatcccattgaagtcatgtcagcatgaaggccccaccagggagcatcgaccccgctctgtggcctgtgcagctggggtgtggagtatatgtgctcaggagtcagctggcaggtggaagatgacccagccctccggaggatggtccccagctcaccagcttgcagtcctttgtttaaccaggaacctagcaggccagaggtcagcatttttcttggaagactgtcaaagcatgcctgtagctgaagaggagcagggtcagattcccagggagtgggccagcataaggtcctatcactgcttagttctgcactgtctgcagtctggctggtgccagcagcatgggattggcagggcagcttccatagtctggccatagaaccacaggcctgagccactggaaggccctttacaagccacacagtgacctccatgctgcagggatgagtggtgcctgagtcccagagagttactggaagatctgagacctgaacccggatgtcctgacacctagcgtggtgctccctctgccatctcctgatcaggacagggaacccaggtgggtaacccagtggggaacccagcataacagtgcctcgacatcttggtttttccctcccctgcgtctcacacagaagtattaagttgacgttgggaggctgaaataaatgcatcccactctctgctggagtgacagtgattctccttggacatgtagctataatgtggctctctcaccctgtcagggccttgggtgttttcaggggtgaggggtgtgtgtggaaggactgtgattcaggaactttcaagcctcagggtagcatctatatgtagggcagcttgtacagaaaggctgctgggcctggggagaaggaggtctatgccactcaaggtgctaccttttctctgtcagctgctttttccacctccctctggttcttcaatggtcagcaatctcattggtggtccctgaagtcaataccccttgggtattgagagcctcttcttccctggccctggagtttaggaaggcaggcgagggaatggagctgaggtagagagaaccacctgcggtagaagataggctgagggtgtgttctaacttcttaacttggcagggagtgatgtctggatgttaagacctctgcttttggagtccaggacacctagatttgtacctgagcccctcccctgaccttgaataggctacttacttagcctttgtgagcctcagcttgaaaaatggagttaatagcccctcgcacatagtactgttctgaggattagctgaggtcgtgcatatcagcagagtaccgtttgagtgcccagcacacagtaggcatatatgatcatgtgataacatcaccatcaccatcaccacgtgatggctgggtgcctgcactgcacccaccagcatgctgggtgctatgggaaataaagagagtgccacacttcagccatagagcgcatggtcttactagagagagaatcacacaggaaagagaggatgtgccaaactaagattgagagatttagattatgggatattgggagagatccataaagaagtagctgggcacagtggctcacacctataatcccagtactttaagaggctgaggcaggagaatcacgtgagaccaagagtttgagacaggaggatcacttgaggccaagagtttgggcaacataatgagacccccatctttttttttaatatgtaaaataaaataaactgaaaaagatgattttaaagaccttttgaggagcccagggtgggaacaacttgataaatattcaaaataatatttcacttttagtatctcctctcacccacccatcacccctaaagtgaacattttagaataacacagtgtggaacaaggaggaaattgttccagccgtgggccagcagaagtcctgagtggccaggagcccggggaatagaacccttcaccttcaccctcccctttgccctgtggggggggaagcatggtacactgggcacctccttgccaaagtccagaaaatctgtgtggctaaatggtgaaagaattttccaccctctttgccctcactggactttgtgggatgctagaaatattttgcaacccaccgtcagagaaagaattgaccagggctggtgccaaaatattcagtacattcaaaagagtcttttgttttatgaagaaagtgactgggctgggagcctcgtcttctgatttgacatcacagcctggtgggtggggccttctactgatcctgtccccactccctggttcaaagttccttagcctagtgaagattctttaggaaagctaagttctggttcagtttgtgagttccataaccttagacacattcttcaccccctttggcattcactgctcatctgtgaaatggtgagactattccactcctgtcgaagggtgagttcttgttccccaagaatgacctcttgttccatttccagctctcaggtctgagcttgcatgaagtgagtgttgcccctttccagatgggcactctgtgatgtcaaacatgtaattctgtcattatccgaaacacgtctgagctatgctttcgaaatcgctttcgaggctgcagcacattctttgaatatcctcagggatgggcagtcttcttccttttagagggaatttgatttctgcaagccgcctaatcaggacaataagtctaggctcaagctaaatgaagatacttttagttccaaacaaatgaagctgatttcgttcagcttctaaactgactcagcagtcggttccaaataaagtttcaaaaatgctttaagcaagaactgcatcattaaaacagcaggtggtaggctattataacttttaaggacagcactcatttggacttttaaaaattatgatttttaaaaaaaattaatttgctactttatatttacatctcatttttgtaaaaagtaattattctctttattcctattcatttgctaatgtgtttttatgtgtctggctgtttatgctttttatttccataaaaatgtggcttactcagatcactattagctataaaaacataaaatgtcctagctcagtggttctcaaacctatctcagcttgttcaaacctagactgctgggcccacactcagagttcctgattcgggaagtctgggaggggcccaataatttgcatttttcatacgttcccagattctgctgcaggaccacaagttgaaaacccctggtccagctgaggtgctttggtcatctagttcaacccccttgtacaaatcagtaaactgaggcccagggagacgcaactcccttgcctagtgttatagaactagttactgacaaagttggaactggagcccagggattctgtatgcccattctagtgctctaaaatgatcatttcttggttgaagacttcttagcatgactgtaggttcttaccattttgcaggaccctatcgaattcaaatattccagcctgttatcctttttagcacaactgtgtcatgatttttatttcatcacaggaagagcctgtgtttaatttgcctcattaaaaaaaattgtgataaaatatacataatataaaatgtaccattttaatcatttcagttgtatggttctgtgatattaagtacatgtatgttgctgtgtgcatctacattgccgccatccatctccagaactttctcatcttcccaaaattaaaactctactcattaaacaataactccctattccctcctcccccaagcacctgggaaccgtcattctgctttctgtctctatgaatttgacctctctaggtaggtcatatgagtaaaatcatacagtattcgtccttttgtgagtggcttatttcacttagcatgaatgtcttcaaggttcatccaggttgtagcatgagtcaaaatttccttcttccaaatactgaataatagacctttatttgcatggatataccacattttgtttatccattgtcaatggacatttgggttgtttccaccttttagcttttgcaaatcatgttgctatgaacatgggtgtacaaacagctcttcaagtgcctgcttccaattctttggcatatctgtacctggatatgatgtggaattgctggattatgtggtaattccatgtttaatttttttgaggagcctgattggcttttttttttttttttttttttttttttttgagacagggtcttactctgttgctgtcacccaggctggggtaagatcatggctcactgtagcttcgaactcccaggctcaaacagtcctcccacctcagcctcccaagtagctgggaccacaggtgtgtaccacaacgctcagctaattttttatattttttgtagagccagggttttgccatgttggccaggctggtctcaaactcctgggcccaagcaatcagcccgccttggcctctgaaagtgctgggattacaggcatgagccaccatacctggcccctgattggctgttaattctgggagttggaggctggaaatacagctctgttcttaataaattggtgggtaaacagagcctgaacagtccctggctcttacccatctggtgctactcttggtgctcccctgaggccttgtgataaaagagaccctgttattcacagttcatggccggaggctgcaaatggtctctagggttttctctcttctcccccttggctctctctgatttccgtgtcaccagtttccatccatatttgtctccctctttgcctttgggcagttatctgcttgtatttctgtctaccaaatctagccaaccccaaagcactcccactgtactgcagaaccaagtctggaaccaatgggtcagcttcattacacttgccaaaagacaaaattacaacaaatttagttaaagatcgaattagcttttatttgtgatcctagaattgggcaatacctcattctttaaaatggaatgagtgttcccatgacctgagcagaggaggttggctttataagcagaaaaaagctgaagaaaacagtcacagagaacaaaaagcagattggtcatttcaaactaactgtccttctagggttaaaacagaggggacttccttatgctgactcaggttgactggaatcttctggatttttgaaaactggcccatttcaaagtttggtttgattccatggcactgagcacaagtgacctcgcataaactttgtttaatacacaacaccttaaattctgtaatgaaatgggattgtaatctaaggaggcagtatgccaggtcatggggtgggaagacctcccatatagtagagattttaaaatgcttacagaattaaatgaatgagtatgacaagatggcaagaatgctgtcaggcagagctctagggctggccattttgtaggaaacagccaattacatgggttggttttcaccacaatccagcagtctggggatccaccaactctagggaaccctgtgctgccctagagttagaggaggcaatggggaagcctcatgctttctgcttctgaatgatcccagcttgagagttgaagcacgagtcttccttggggttcaccctggttgggatgcttcccgtgggttgtcaggcagtgagtccaggagtcagccgtgtttcaggagctcaagggcaagaacgaccaggctttggttttgttgattcgaggtttctgcctgtctgcacaacctcgaatttctcttacctgatttcagggaatattgtgaaactctaaaaccaaaactattattttttacatttaaggaaacttaaaatgatacaatattcttttcctaggtgatttacaaaatccttctgtcaatgaagttaaactaatagcagccaagtatagagcccccataaggcttgtttccacatcaccttcccaactttcccaggatcagttaactgagtggataggttactttaaagaaaatgttttgaagcagcatgatgcctattattgatgtcatcagaaattacccttttggtgatagtacaagtgcttcattacgcaggttaacaggaaaagtgaagcaggtgtggtagttaatccacaaaatccatattggctcagaatagcaggttattttgtgacagcagaagctaccacctttctgaatagtcttacggtgttcacttttacccacacactggtgaatatcttctcagccctggggactttgtgtttcccttcctccaggctatgttccctgaaggaggtagtctagacgtccgcccccagtgtgcaatatccttgtttcctttcctcaattagaatggaggcttctcagagatcccagatcccagaaacagtccgggaaggccaatgtactgggtggtaattggtgagatttatctggcggctgggagctgtcatcaggttttcagagtacaaatttgtattaatagaatccattaacatcagtgcttgcagcaaattgtaaccagactccaccttatcacagcaccatgctactgcttcagagggtaattcccctccggcagccgacttctctttcctgctgttctgtgtgtaaaaatgagaggatgtttatttcctcggggctgtaacaaagtcatcaaatgagaccaaaaaggtctttgtgggcctcccctatctctgagagctgctctggtgccatctgcttagggtgaggctgagcacacaggcaaattggttgacttgcctgacagaagatgtaggggaagagttgtttcttatttaaaatcccctgaggtggaggctgtgcgatgacccctgggtaacacctatcccttcctgcatccatccattcacgcaggttgtgttggctgcacatgtgctcatgctgaagcagcccagagtgcagagctgtgagacctgctgcatgcctgcccagagcccccatgtgattgagggatccagacggcactatgtgaaaacctaggaagcaatacagggcaggcctgggggcaaccaaccccatccttttataagtaaataaagtgggcacgggaaacttagctttttctcttgaacttggtatgaagaaaaatcagaaggggagaagggaaacattttcagtagcttaagtaaaggtccttgagaaaaaggatgcctggtgtctttggaaagcagggaggcacttttttttttttctttttttttgagatggagtctcactctgtcgcccaggctaaaatataatagcatgatctctgctcactgcaacctctgcctcccaggtcccagctattctcctgcctcagcctcccgagtggctggaattacaggcgcccaccaccacacctggctaatttttgtatttttagtagagacagggttttgccatgttggccaggctggtttctaacttctgacctcgggtgatccacccgcctcagctgcccaaagtgttgggattacaggcgtgagccaccgcacctggccagggaggcacttttctaagaagtgggtggtagagggagtgatagtggcatgcatcccctgatgctcacccaatggtctcaccctggtagtgggccaggccttctcccaaggatagtgggatgagccaagaaggtattacttcaattcagggccagaaatttgggtctccattgaagcagctagacataaggtgcctaaagtcatacttgagagtagaatgtaaaggtctcttccctgattgggtcctaggtcacttggcatcttggcatggaatccctagaaagcagaacctcgggcaaggcttatgtgttacaactttattagggagtgcaatcccagagaacagaagtgaaggaacaggcaagaagggcgaggagaggatgagccaatatgaggatgcccccacttcctggtctcaaacccaaccagtggctcaggctattggaagtgtagagatggactgttgctagggacagtgcatcaggagaagggccaccctttcccactggtcaaagtttcaaaccatgggtcattaattcccctgaatttctgggttgcacatgcctgggatctctgaataggtcctactttatctcacccctcattgtcaataagaggccctagggctagaagcaagaggtgcaggaagctaggcatacgtcgtggcactgtggggtggtgcctgtatgaagtgggtagctcttgcagagatagtcactacagcggtatttggagccctgtaaacatgtgcctgagagcatctgaaatggcactggaccacacacctctatagcactgtggatgggcatcaggatagattttctttcagtactgccaggagtgtggggcacagagtggggctggagtaggttggtccaggaaacattattgttttcctatgggggactccttgcaggcttgatgaaatgcctggcaagtccagaggaaggacacagagatgaagaggcacgttgcccaggcaggcaacaagcatggctgccacttacctgctgcagccaaaacttacggccaaactaacccagtctacgaggaaacctagtaccataatcttctccagccctagcctccatggagccctgtacctagcctagggaagaagataccatgggctcctctgttattactgagcatcaggaatgtgccttgtatgctgtaggcatgcatttttttaagtaaatgagtaagccccatagcaagcaattttaatcacaggaaggtggctcagagttggtaaaaaggaaatatattaagggaaagtgagttctctgatgctgactacacatttgaggactgtttttgctaggttagcttaacccttctttatccaccttgaatagttaaccccttcctttcctgaactcttaacgactttcagttccttagcaaatgtagcaacactgtctgctctagtatccactgtcttgttgcataacaagccaccccaaaacttagtggcttaaaacaaccattttatgtattcacaatctatgagtcaacaagttaagctgggctctgttgggagattcttctgatggccatgtcaggtgtcactcatgtagcgacagtcatctggtggccccagtacagctggatgatctcagatggcctcacatggctgacatgcactgctgtcagctggttggtctagggctgtgctgtccaaaatggtagccactagcccatgtgactattgagcacttgaaatgtggctgacctgaattgagatgagctgtaagtataaactttccatgtttaatgtaaactatctcgttaatagttctcgatagttcttatgtattgattagaagctgataatattttgaatcttgggttaaataaaatacattattaaaattgaattgatttcacctgtttctttttacttctttaatatgactattacagaattcggaaaaatcccatttgtggcttacactatcatatctctattggacagttactgggttgtgctaaagcacgcccacctggcatttgacccagatattctaaggttctaaggaagtctgtatcatccatggctacagcaaagcaaaactgtaccatgtgtcttgcagaaactcaagatgaatgttgttaggaagcaaaaaaacaatgactaggtttcatagtaatcccatgagacttgaactaaagaatctgtaggaagcaagaatgtaagggatagagtaaatagatactctggagccaaaatataggagttgggtgtgggagacttggagagggagaagaagctgcttttcaagtctagctggtgaacatgctagatggtgttattcactgataatgtgactgtaaggaggaagagaagatttggtaggatgatcatgggtctggtcttaaatatgttgtttttaaggtcccagtggagatccaagtggagatagttactgaacagctgaaaatatagatttaatggtgggagagatgcttggacatgagaaatcaatatgggagtcattattgagcaggaggtgattgcaaccattggtgaagataagatttcccagggagattgtggagactaagagcatctctgagagtggcacctgggaaatgcccatgtttgaagtacagagaaaggaaacaaacgtctgcagaataccaagaagtgatctagcagcagggcctagtaccagatctaaaattgctaaagaaagagaggaagcaagattccatggtgagccgtgtgttcttcatctttttgttccccaaagggcattatacaaagaagacgcacaattaatgtttgtcgaattagatgaagttgcattgtattgcgctgcactgtattgcgctaactcaagctctgctgcctcctgggctgctctggcagttttaggctttcccccactctgtcaagcttctccccctttgcctctcttattcagtaagtccattatacagtaaagctttgttgcccaactaaatattttaggaacttagtaaaagctggtgtgaattatgtcaccaattcccatttgcctgcctttagatggctaacaacgcccagatagcagaggctgaaggaaaaggacattaatgacctctcataacaagtagtctggatgtaggtgctttcagatttggggcaggacttcagttataaaggacccaggctttttttgcctggccactttggaatcttcagcttatcaactctttgtacctggatgtatcacctcatagttataagcatcatgtcctaaaatagtcaacttcttggtaggaataagatatcaggcctctgctgtatctttggcagagattaaaaaaatatttgtcaaaagtttccccagctgacttcctcatgcctcattggccaacttggccatatgcccatccttaaaccaactactggcaaaggggaatgttattatcatgcttggcttagccaaatcatgtcttatcccttggagctggggaagaagatgggaatggctgttgggtaggaggaaatgcattttgtcttccatactcatttttaggggatggggttccttgtaatttagtttcaaaaacattcaattcaacatttattgagtgcttactgtgtatcaagaacagttgttttaccattgaggcaaatattaattacaaagagcctagatattagcatgctgagtagatccttctgcctaccacctcttgttggccctctgttattccttggaattctttctagttgggatgctaaaccagtcctctgccctcctggcctccccttcagctcctccctttaaaacattttaccacctattccccttttgatttttaatcagtctccctcagtctcaccttccatcagtcaacctcagtgtcaccttcaagcttgttttcttactgtttttcttcctgcatcatccactgtcttctgagtcatgcctttcattatgccattctcaggagtcatctgctcacctctgctgactattcccgatttggacaccatccctggctccagaagttctagtgattccctattgcctgttacatgaggtctttagcctggcagaaggttatctacctaattactaacagtgttgcctccaaaagagacttgaatgagagaagggagcattgaggggtttattcacttaatctttattctttgaatctttttactgctggaatgtcttctgtgttgcttgcatagtttaaaaaaactgaaaacctctagtctaacattccaaatgttctgttttttccagttcctctcctactactcttttacacaaactttcctctccatccaaactggtatccttcctgcccataagaacagccttgagttattattgctcacaccacaacccaatatcatatgacccctgcctgtccctcctgacttacctaatttctgccactactcaagctttcaagacccagactgtctacactttacccaacagccccgtcccatttcctgccagccccttcccactaccaccagcttcttttaatttcttccttctctgaactcctgcttcagttttgctgtagtacatcagggattggctctgaacatgtctgcccctttgtgtcattcaaccctgcttttttactactgcctaatagaggatgtgcatccattctcacagcttttactcattcaccccctgatttttgctgatgaccatgtatgtggctggattgaccacaacagtgggcagtcaggatttcagcttacaaagatgggctttaagatgtgatctccagaaatgcattgcctataaactggaacatctgaactattcatttcacttttagatgtttacttcctggtaatatcactgatattgtaaccttgaggcattatttgaataccacattgttacttttcagtgctgtatttccaaaccagtactcacaaatatcctcattttttaaatacttaagaccctacatttgaatttgagcatctatgttcccaaccccctttatgtaagtgactcctctaacatcataatcaccttcttagagatataggatcctcagtcttgggtgccttcttcaggtttctactttcctccccaacctgtaagaggttgagaatgaagggaatttgttctgcaaaggggatcagtgtccaatctattggattccttgagattattttgtttaggagcttctgagctgcgaacagctttgcccactctctggcctggaagagatggcatggagaaggccaaaaggaacaatctggaggagaggaagtggggtgcggtaatcagaaaagctgaatgcagagaactgaggtgcatcgcctgaagctgccgcaaaatcagtgggagggggaacattgcagcccccgcctgtggctgctgcttgttgggtttagtaattgtattctgagtagcatttagactggcatttagacgggtctagaatgtgaattcttgcaggggaggcagccagcacaatcctgctttgttccagttctttgaggactaagaaaataatttttaaaacaataaccctccttcctgggctgtcacttgtttgtttgctctggggactgcccagtaactctttggtctctgttatttgtgtttaaactctgtgtttctacccacaagtaggaattggtagaaggaagaaggtagaaggaagaaggttcataggaaaggctggtgatgtattaattgtgccattccatgtgtgttgtacactcaggaagggacacaagccagggtctctcattcatttgttcgtttagtcatccattcatcaaacactttccaggtcttggttttgtgtctaggccattgtgggaactatttgtggcagcaaagaagtaaatatatggtttttgacccaagaaactataatcggcatataaaaaaattattattattaatggcagccgatgccatttattgaattccttgtactctgatcagaaacaaagctagagacattatagatattggtcagtttaatcatcagacatttcttgaatgcttttcatctaggcactgcgctaggggctgggatagggcaagaagcagcccggggctcaagtctggcaggaattacaagagtaatggtaggtatgcaaaggggcctttccattctcaaaggtgctccttctagcagcatcagactacctggagcttgttagaaatactgactgtaggttcccccccttccccccgacccagacatgctgattcagaacctgtgcattttaacaaggtcactgggtgtttcattcatgtgtacattgaagtttgggaagcactggtgagtagcctgggatgtagcttggtctaggctaggatatcaaggaaggcctttctgaggaagtgacttttaagctgagatgtgacaaatgagtagagactagctagacaagacaatgacagatggagggtggggtgagttccaggcaatagaagtgcctgtgggcaggctgggactatgaggtcctgtgtgatagtgatagcagagcagaggaggaaaccccggagcaaggccttgtaaaccaggctagagtttaaacccagtgatacggagaaaggattggagagcaatcttgttcccaatttatagacaaggatgggctgagaaatttgcccaaggtcacacagctaatactcactggtaaactaataagagctggaatttatatccagtgctctaattctaaagcttattttctttttccttttttttttttttagatagggtctcactctgtcacccaggctggagtgcagtggcacaatcatggctcactgcagcctcaacctcctgggttcaagtgattcttccacctcagcctcccgagtagctgggactacaggtgtgtgccaccatgctcagctaatttttttttggggggggcagagtcttgctctgtcacccaggctggagtgcagtgatatggtctcacctcactgcaacctctgtctcctgggttcaagtgattctcctgcctcagcctcccaagtagctgggattacaggtgcgtgccaccacgcccagctaatttgtgtatttttttcaaagagacagggtttcaccatgttggccaggctggtctcgaactcctcatctcaagtgatccacccgcctcagcctcccaaagtgctgggattacaagcgtaagccaccgcaccaagccgcctggctaatttttaaaaattgtttgtagagatggcgtctcaccgtgttgcccagactggtcttgaactcttgggttcaagcagtcttcccacctgagtcacccagagtgctgggattacaagtgttgagctactgtgcccggcctaaagcccattttctgaaccgctgcattaaggtcattaagaagacaaaatatacagctgataaaattttgaatgcagttttgtattatttaggatttgaagaaccttataataatctggcttaaatttaaaagatgatcaaatttagtataaaataataaaacccatgagaacccaggagaaaatgtaagttccatttgagcacacatttttccctcgagtttcttaggaaatatggtataaaaggaaaccttctgtatagatcgctctttttatctgaaagaatgaagtagacctctctctgaggaagaactttttatttttcttatcattaaagtgtaagaggaagcatgaagcaatggattgtgagggcagagcactctatggctgatctggggtcacttctttctctagggctgctgggctgagtgagccctgtatcctttctttctgtctattcccagtgggccaaaaggcaggcggggagacgggggagcagagacccagtgcagcctcgtgtcctccacatctcagtccagacatgtaagggttgagcatcggcaccagctcacacagatctcctttcaggagactcacaaggtcccgtgtagttcattgatttctaaaaggactaattggccgacccagtcattttggaggagcagtgaaagcataccccagtcctaggtgttggaggaggttaaatgaggagataggagccctcaggttctaaagctattctaaagctatttgaggatatgacctttaaccttggggagcttccagtctaatggcagagacacagcccctgccttcagacagctccaagtgtgatgggggaggcacagctcctgcgaagtccggactggaggggagaaacagacctgccccagggagctcccaggctgatgggaggaagagagcatagataaagagtaaataagcacatacgtatcaaaggtactgaagctattaaaaaaagtcacagcaccgctggctccatgcagccatcagagggctttggaacatgacaatctgcttcttcttgccttttcctgaaccactgcaaaagccgtaagtgctcattgcatctgcaaaattagaagccagtggaaacagcaacgtcctcttcattaagttggttttctctgcccagggtttatttgaggtttctgctcatagccctggcaagagaggagaagctcctggggctgaggccggcagctgggcaacactcagcatctctctcctttcccccagtccaagcgccaactccactggtaccagtaggtgagacatttgccggttcctgcctctagagaacagctgtgctttccagcagacgttccagagccctgtctagcatacagtatatttgtctggccttggcagaaatggaatccttctgtctccctgcccttccttctcaaaagctcccctggcagccgtgactgctgatgttagggaaagaaagaaagaaagagaacttgaggtcttctgaaagggatgttggattcattaggaggtgcttgcttttgtcccacaaatgacttacatatcaccttgagcaagttctccattttcccatcagtattaaaccaaggaagcatggcagagaagaaaggtcacatgatctgaaatcctgagacccaggttcaactcttggctctattactcctagccacatgaccttgaataaggggatcctatttgtcctcagataaaggatttttaaaaatcatttgagcttcaattttctcatctgtaaagcgggtgtcatgataatatgtactgtactaagtggttaggatgatccattatagtggatgtgttgaaatgctttgaaaatcttaaagcatttaataaccagtgttattgttgaggtggagatggctacccttcccttttctccactcatggtgtgttgttgataatattgaaaaaagaatcagacatgaaaatgaaaagtttattaaaatataagattaagactagccaaaataaatactctgtttgagagcctgagcagtaggaacagttaattcatggtcaatactgtgcttgggctgagggggataaaggataaatggaaaaccagatctcaggttcaaagaattcacagcctactgagagaaataagaactaagaatgggaacagtaatacataatattaactgctgcatttcaaattccaagtgctgggagcttcagaggtgtcaggaaaggccaaatgaagcaaacactttttattctagctgcatgtataaatgtattcatttattcaacaaatatttttggaccaccttctatagactgaacactattctaaatgcaggggatatagcagtaaacaaaacagatagaatcgctgtctctcaaggaacttatttttatgggaaaagacagataacagggaaaataagtaaaatatgtgtacattaggtggtgctaagtgctagtgaggtataaattaagcaggcaggggagacagggagtgctgggggaggtggtttgcaatttcaggtcaggcagccagggaattcctcactgagagggggacactggaacgaagacctgagggagaaatataggctagcaggcaagaatggtagcttagactaggagagtagtagtagaggaattgagaagaaaacagattagttttttttttcaaagtggaaatggggtcttgctatgttgtccaggctggtcttgaacctctggcctctagcggtcctctcctcttggcctcccaaagtgttgggattacagatgtcagtcactgcatctggcccagattccttttaaagatgaaggcactaggatttgctgatggcttgggtgtaaggtgagagagaaagagaggaggcaaagagcactcttgaggtctgtcatgaactaaaatgggaaaggctgtgtgtggtggggcagggaagtgcggggaggagctgtgttttagttagcagctccgagatgcctgttagaaatacaactggacatgtcaagtaggcagttggatatgtgaagctcaggggagaggtctgggctggagatttaaaactgggagtttccagtatagagattgtatttcatactgtgagtccagataagatcaccaaagcagaagagaagagatcctgggagatcctggggtactccaaccttagaagctggggagaagcagaggaacagcaatgagaaaggaggaaacccgggaggtggcagtattccagatgctaagtgaaggatgtgtttcaaggaggatggagtgctcgcttgtgttaaatcaggaatgatgagagcttagagtttatttatttaccattggactcagcacgttgaggtcatggatgaccttgacaaaatttgattgagttgtggtgggggaaatcttgattggaatggatttaaaagaggtttggagaagagaaattataagccataaatgtgggcaactcttctgaggcctttccttgtgaaggaaagagaaataaggcagtagcccgaggggagagtgggggcaagggaggctcctcaggttgggataaatcacagcatgtttgtaagcttctaggaaagagccagtgaaaaaggaaaagttgaggagacaggaggtagaggaggattgctggagcattgccccagagcactgtccctggagcagacagctcacccgcggtaatggagagaaggtggcacagaggggcaaaggcaggcagacggatgcgtgagggggcggcacctgtgcaggttctgttttggtgacttgttttctcaatcaaagaataaacaaggcacttacccaagagtaaatgaagggagaaccccagtttctctaaaaaaaaagaagtgtgtaatcccaacactttagaaggccgaggcgggaggattgcctgagcctaggaattcgagaccagcctgggtaacatagtgagaccccgtctctacaacaagttttaaaaattagttgggcatggtgatacacacctgtagtcacagctattcagtaggctgaggtgggaggattgcttgagccaaggaggtcaagactgcagtgagctgtgattgcaccactgtcagagtgagtccctgtctcaaaacaaaaaagggtgtaaagaaaaaaagagggaggcagaacttatataatagaataaaagaggcctattacacatatcaactaatacgttggccttatttggattctgactcaaacaaacagtaaaaataaaaagacatttatgagacaattggaaatttgcaccatcagtggatatttgatcctattaaaacgattaatattggaggtgaaataatgttatcaaggttacattttgtaacagagtcattgtcttttagacatagatgctgaaatatcagtagatgaaattagacaatgacatggatttacttcaaaataatccagtggaggggtggggagaaggaaaggtggggtgtggatgaagtgtgattgcctttgggtcaataattgttgaagttggctgatgtgcaagagtcgttatgctttttctacttccatgatacaaattaaaacaaaggaaaaaagaagagggaaggagatgctgggtgcttaagaggaaaagggaaagttggaattgccatctgggactgccagtgagggggagaggcatgtgactgtcaaatgccacgaagggcccacttgagattcaagagcataaattaaaagtgaggccagacggcagggaggtatgtgtgaatgtatttccgcagccatgtccagcggcacatgcaggcacagagtaggtggaaggttagattcgaccagagttctgagtttagccaacaaaatatgagcattgagaataccattctcccatcatattgatgacatctctgaggaccagaattatgtctttgcttcagtgacattgggctaatttgactagatgattgccaagtcccccctacccccacaagttttgaccaattttaatactctgtcctcagcacttacaaatgatgtatttggttgcatgagcaagacaaaaggagggtggtgggtacaagtggctctaattgccttgtctctcatttttctacccttctttccaaagtgaagggtgctcatcttggtttgagtgatccctcccagtgtgtttgtggctgggccaggagtgacagtcatgcctcttttgaacgatgacctccctgccttgcatccttgttttcacttgttagcttggtctgtggaggaaatcattgaggtccagtagggaaacaaagcactgcctacagaggccaggtgtctcccatatccctgattatagctgggcctttgtggggtgtccccctcagcccctcctgtccatcggcttgtgatctttcccaagactattccatctgaggcaggagcttggctctcattggctcttttcttcccaggtcctacttgcaggactgggggcccagttgctgtgacttacctgctccagcttccttggagagagatgtttcataaatcagaacatgtctctggccaggtcatgttgaccggtacaaatttgtctctgactcatggcatgttttaaaacaaagacatattgaacatgtaaactaagtatagccagtatggtttttattccaatttttcttttgagaattatagcagttttctgagataatcacaaggggaactttttaaagaaatctctgtgtcgtttgcttatctttttatctttcacagggttgtagggtgtttgttgaaattttgctatattgccatgaactaggtttcagcatggcataaaaggagtgtagacttgggaacaccaacctgggtttgattttggctttgccactcactagctaagaaaccttggacaagttatttaacatcgctaggcttcagatttcttcttcttcgagtttttcgtgtgtgtgtttgtttgtttgttttgagacagggtctccctctgtttcccaagctggagtgcaggtacaattttggctcactacagcctccacctcccagcctcaggtgatcctcctgcctcagcctcctgggtagctgagattacagacacatgcaaccaagcccgtctaatttttgtatttttagtagaaacggggttttgccgtgttgcccaggctggtctcgaactcccggactcaagtgatccacccgtcttggtctcctaaagtgataggaatgcaggcatgagccactacgcctggcctaggcttcaaatttctaatgtgtaaagtcagcataatagtgtttcccttgttggaatgttggaaggattaaaagggatggttactctagaaatggatgtctgttcttaactttccctcactgttgttgccttttttgacaagcatggctgtgaagggattagaatgtagatatctctgtgaccttaaagagatcattcctctttgagcttcattcacatttcttatctatctctgcaccacttttcacatgacattgaacaatggaatccaattagagatttctgagatccctttcagtttagataatctaggtttcctttgacttattggaacagcttttcttttatttttagagctcaggtgcacagcactgggttaatcataattgttggttcatgactcactctcatcattggtccatgcaggtcccactctttttctttctcttttatttctgctccttccttccttttcttcctattcatccatccacccatctgtttgcttacttatttataataatataataagtatctacaaacctaccacccccaacaaaagctaggaccttgataattagcaaatgtctaatcttatgattccctcgccaccaccagtaccaccaatctatcctcattgcctcctccactaccagaagcaattgttatcttttgattttatttttaattaattattatttttttgagatgaggtcctgctatgttgcccaggctggagtgcagtggtgcagtcatagtgcatcatagcctggaactcctgggctcgagtcatcctcctgcctcagcctcctgagtagcagggactgcaggtatgcactagcacacctggcttatttttaattgtttgagaaactgacctgctgttttccttagaagctgcactattttacattcccaccagcagtgcacaaggctccaacttcacatcctttccagcttttgttattttcagttttttttttttcatagtagccattctaatagatatgagaaggtgtctcgttgtggttttgatttgcatttccctaaagattagtgactttgaacgtctttttatatgtatgttagccatttgtgtatcttcttgggagaagtatctattcaagtccttcgctttttttgtttttgagttgtagtaattattctcttgaatcctgttttcttttttctctttgcttacattatcttatcgtatagcatcctaattcacattttgacttctatgtaatatttcattgtttgactctaccacagtttcattatccttttctctgttgaacttttaggtttttcctaggtttctgctgtggtgaataggactgtgaggaacatttttgtacctgtgcaagagtgtctcatgggtatatatctaggagtaaatttgctgaatcagtttgtgaatgttcaacattagaggtgatacaaaacttttcgcaaagtggttgcaatatataagaaatatataagcaacagataagaaatcctttgccaacatttggtatcattagacttagtaatgttttccaattgaatgagtgtaaattggtttctgataatggtcttcatttgcatttcccagaccaccaatgtgtttattagccatatgtattcctctttggttcctgcctagatgtctgttggattgtttatcctcttattaatctgtgaatcttctttataaaatatttaaaaatatttttatagtcactcatcgtgaggtgtatcttcattgttttctaggttttaacttctcatatatcttaaggcttttttcttccaaatgaggtttactgagttataagttacacagaacaaaattcacccttgctaggtgtatagtcctatgaattttgccaaacacatagagttatgtaaccaccaccataagcaagatacagaacatttccatcatcccagaaagttctcttgtacccttttttgggttaattctctccccttaatcccaactctggataaccactcatctttattctgtctctagggtttgcattttctagaatgtcgtataaatgagatcctacagtattgagactggcttcttttacttcatgtatttgagatgcctctaactcgctgcgtgtatcagtagaacattgctttatattgctgtatagtattccattgtattgcataccatggtttatttactcatctgttgacagacatatggtttgtttccagcttttgacaattataaataaactgctataaatattctcatgcagttttttgtgtggacatatatgcatttttttttttttgagatggagtctcgctctgttgcccaggctggagtgcagtggcgcgatctcggctcactgcaagctccgcctcccgggctcatgccattctcctgcctcagcctccccgagtagctgggactacaggcacccgccaccctgcccggctaattttttgtatttttagtagagacggggtttcaccatgttagccaggatggtctgcatctcctgaccttgtgatccgcccgccttggcctcccaaagtgctgggattgtcatttctctggagtacataccagaagtaggaatcccaggtcatatggcaactgtatgtgtaacttttgaagaaactgccaaactgctttccaaagtggatgtaccattttttattctcaccagcaatgtatgtgagttccagtggctgtacatcctaactaggacgtgggattatgagaagtttgtttgtttgttgtttagccattctaacatgtgtataatggtatctcaatgtggttttaatttgcatttctgtgttgagcatcattttgtgtttgtttgccatacatatatcatcttcaatgaagtgtctgtttagcaaaatgatcttttgctcattttttattaggttgtttgttttcttactattccactgagaatttttaaatatattatgaaagccctttatagattatcaagtattttctttcaatctggggcttgtgttttcatcctcttagtaatgtctctcaaacagctgtcttagactaccctagtctggactagcccctccctgccccctcactgtaaggcaggcatacataccttcagatgcatgttcgaccctgggtttcccagtgtcaccaacaatcactctggcaccttgcgaagatattggctctctgcattgcttactgtcccgtttggactggtctaattgatgagagtgcttacatctgttttgaactttccagagagaatggctcaactcccttgcatttcaaaaaccttctcctcttgctagtggcttcagaatgcaggtccagttatactaaaataagttccctgttttagctgaatatgagattcacttagcaaaagaagttatcaaggaaggttaacacatctcctttcttggaaatgtcattcttgggctcatgatgccttggcattttattctcaggagaaatagcttttaaatacacctgggaaagtgttttagtttttagaatctataatacatactaacacataatgagaataaatgtgtgtgtgtgtgtgtgtgtgtatgggttttagttttattgtttgtttgtttttgagacagggtcttgttctgtcactagagccagagtgcagtggtgcaaccatggctcactgcagcctcaaccacctgggctcaagtgattctcctgcttcagcctcccaagcagctgagactacaggcacgcaccactatgcctggctaatttttgtattttttgtagagacagggtttcaccatgttgtctaggctagtctcaagctcctaggttcaggcaatctgcccaccttggcctcccaaagtgctggaattacaggcatgagctaccatgcctggcctgagaatatatttttacaatattttcttccagtttgtattactttatgtggtagtagatttttttttcctaatttgtttatgctttaactaacattaaattggttctgccaagagaaaaatataaggtataaaaattggaaaggaagatatattatgattatttacagattatataattatttacatagaatacaaaaagaatcaactgaaaaactctttttaatcaaactttttttttgagggtattatagattcacattcagttgtagcagataacactactttgcccaggttcccccaatagtaacattttgcaaaactatagtacaatatcacaaccaggatattgacattataccatcaggatcaccagaaggatccctcatgttgcccttttatgtgtgtgcccatttcctaccaccacctcccccttccttaacccctggcacccattaatcacttctccataatgttatcatttctcctatataaatatatcatttacatcatatatatcatttccactataaaaagtcacaaagtatgtaacttttggggactggcttttttcattcagcataattctctggagattcatctaagttactgcatatatcactagtataaatagtccattccttcttattgctgagtagtgttccatggtgtggatctaccacagtttgtttaaccattcactcattgaaagacacctggattgttttctagtttttgcctattatgaataaagctgttataaacatttatgtacaggtttttgtgtgaacataagccttcatttttctgggataaatgcccagaggtatatttgctgggtcataagacagttacatgtttagttatttaagaaactgccaaaccatattctagacgctgtaccattttacatttctaccagcaacatatgagtgatctcatttctccacatctgcaccagcctttggtgttgtcacaattttttttaaatttagtcattccaataggtgtatagtgatgtctcactatttttttctcattgtggttttaatttgcattcccccagtggctgatgatgttgaatgccttttcatgtgcgtatttgttgtctgtatttctactctgatgaaatgtctttttatgtcttgtgcccatgttctagttggattatttgtgcctctactgctgaattttgaaagttcttcacatattctagaactagttcttcgtcatatgtgtggtttctcccactcgtcatcttctttcgcagataaaagcttaattttagtgaagttcagtttatccataaattgttccttctatgaattatacttttggtgtcagatctaagaattgtttgtctagctccagattgcaacaattttctcctatttttattgtacaagttttatagttctacattttatgtttaagttggccatccaatttgagtttgtctttgtataaggacttaggttaagattccttttttctttctttctttctttctttttgcctaaggatatccaattatttcagcatcatttgtcgaaaagactgtcttttctccattgacttgcttttgcatctttatcaaaaatcagttaagtatatgtgtgtttctattttgggttttttttttaattatgttccattgatctatgtgtctcttccttcaccaataccatgtaggtttggttactgtagttatataatgagtctttaaattgggtagactgatcctcctatgtttttcttctttgtcaaatttgtttcagctattcttgttcctttttatttccatataaattttaaaataatttgtctagctgttaaaaattttgttgggattttaataaggattgcattaaaccagtatatatatatggagataatttgcatctttactgtgtggagtattccagtttatgaacaaagtaggcctctccatttatgtagatatttgatttctttaatcagttctgtgtagttttagcatacatgtcctatgcatgttttgttcattctatgcctatttttatagattgtaatttatttaaaatttctgtttccatatgtttattatgtgcatatagagatagttgattaattttcatgtttgtcttgtatcctgcaactttggtgtattcatttattaggtttaatttttttttaatttgagaagcaagagctttttctgttgtccaggcaggaatgcagtggcaccttctttggcatcttagctcactgcagccttgaactcctgggctcaagggatccttccaccccagactcctgagtagctagaacttcaggtgcaagacaccacatccaggcttgcatctggatgtgctgagttgcacctgcagttctagctactttaaaatctttttaaattttttttgtagggagaagatcttgctatgttatccaggctggtcttgaacacctgacctcaagctatcctcctacctccggcctcccaaagtgctgggattataggtgtgagccactttgcctggcctcatatattagttccaagagatttttttttaaatcaattcttggaattttctgtgtagaccatcatagtatctgcatatagggacagttttattcttcctttgtggcctatatgcattttatttccttttcttgccttattctattggctagaactttcagcactgtgttgaataagtatagtgaaagcagatatccttgccttgttgttaatcttagaaagaaagcatttggtctttccccatcaagtataatgttatctgtctattttctaaacgttttttaaaaaatcacactgaagaaatttctctcaattcctctttttctgggttttaaaaaaatcatgaatgagtgtctaattttgtcagatgctttctctgcattgattgacacgattgtgtaatttttcttaattagcctgttagtatggtagattatactgatgagttttaaaatatagaaccagccttgcatccctggaatgaaccccatttggtcatggcgtataattctttttatttattgctgaattctgtttgcttatattttgttaaggactttttttaaatgaatgttaacattttaactttttatttaagaaatggaggtctcaagatattgcccaggctggtcttgagctcctggcctaaagcaatcctcgtgcctcagccccctaagtagctgtgactacaggcagacaccacctcacctggtctgttaaggatttttgtgtctatatctgtgagagatttattggttaatagttttctttttcttttgtttcatcttctttttaaatgttgcactatctatgtctggttttggtataagggtaacactaacctcataaaattaattagaaagtgtttcccctcttctataaaagagattttattgaattggtgttaattctttaataatttggtagaattctctagagaaaccatctggcctgaaggtttccttttttgaatatttttaaattattaatttcattttcttaattataaagcaattcagattatctgttacatattgggaaatgtggcagtttgtgttttttgagaacttggttcatttcacctaagctttaaaagttatgtgtgtagagttttcatggtagtttcttatagccctgcaggggctattaagtctgcaggggctacagtggcatccctcattcattcttgagattgataattgagtcattcctatttttttgtgtttttcatttttgctaaaggactgtcaattgaagtgattttttcaaagaaacggcttgttgtttcattgctttttccctattgtgtttgttctctgttttattgatttctgctctttattatttccttccttctgcttgcttttaggttttggggtgggaggctggctcttcttttactagttcctcgaggtgggaccttagatgactgatttgaggtgtttcctgttttctaatgtgtggatttataaacttccccttagcagtgctttagctgtgtccctcggattttgatatgttgtattttcatttttattcagttcaatgtactttttcatttcaattgaaactttctctttgaattatggattatttagaaatcacattcaagccaggcattgtggctcatgcctgtaatcccagctactcaggggggctgaggcaggtggattacctgaggccaagagttcaagaccagcctgggcaacatagcaagacgccccatctctaaaactataaataataataaattagttgatgcggtggcaagcatctgtggtcccagctgctcaggaggctgaggcaggaggattttttgagccctggaattcgatgcagcagtgagctatgttcacaccactgcactccagcctgaatgacagagcaagcttccatctctaaaaattaaaattaaaatttttaaaaaattgtggtctaggcacaaaggctcatgcctgtaatcccaacactttgagaggctgaggcaggaggatcacttgagctcaggagtttgagaccagcctatgaaacatagtctagagatcctgtctccaaaaaaaaaaataatttaaaaattagctaagcgtggtggcacgtgcctataatcccagctactcagaaagctgagatggaagggtcacttgagccctggagactgaggctgcagtaagttgtgatcatgctactgcactccaatctgaatgacagagcaagaccccatctcaaaaatatttttttaaatttaaaaatagaaaaataactttcaatgtggtgggattcaaaattagtatgcaataattatttaaaatagcttaatgaacaatcaaatgcatagtaataaacataaaaatgttcataatctgtacaacaaaattttaaaatgaaattgaagaattccaaagaaaatttgaacaaattaaaattcatatcacattcttagagtcaacatcataaatgtcaattctaagttaatttataattttaatatgactccaataaaaatatcatttgattttctttaagaaagaaaaagtctgattctagaggaatctgtaaaaaaattgacaagcaagagtaagcagaaaaaattttttaaagactataaactcgattataaaactacagtaattaatacggtatgatactagcacatgaagggataaacagatgagtagaaaataaagtccagaaatagacctaaacacataggagaatttagtagtgtgtatgattgaagatgacatttcaaaccatagaataaaaggtaaatttttaaataaatgaggttaggatcctcaccatcttatatacagttagatcccttcttcacatgatttcaaagtaagttctagatggattaagattgaagcatgattaccagcctgggtaacatggtgacaccatgtctctataaaaaatttaaaaaatagccaggtatgcacctgtgggcccagtgcttgtggtcccagctacttgggaggttgaggtgggaggtgggaggatcacttgagactggcagatcaaggctgcagcgagtcatgatcatgccactgcactccagcctgggcaacacagcaagaccctgtctcaaaaaaaaaaaagaaaagaaaaaagaaattaaaccacagaaatgttaatgaaaaacatggaaacataaaaatagtcttgaaaaaagaaggcctaaatatgacacaaaacatagtgaaatagaaaagatccaatcaactatgaaaaaaatttcatgcataataaaaacaccacaaataaagtcaggaaaaaaaataatgatgtggtcgatttgcagcccctcttatagagaaggagtttcctagtaaaagaagttccttcaaactgataagaatcaaccaactgcccagtagagaaatgggcaaataataggaatattgaaattgatatggtttggcagtgtctccacccaaatctcatcttgaattgtagttcccataatccccatatgtagtgggagggacctggtggaggtaattgaatcatgggggcagtttcctccatgctatgctcataatggtaagttctcacaagatctgatggttttttaaggggcttctcccttcactcagctctcattcttgtctctcctgccaccatgtgaagaaggacatgtttgcttgcttcctttccaccatgattgtaagttttcaaggcctccccagccatgctgaactgtgagacagctaaacctctttcctttagaaattacccagtcttgggcagttctttatggcagtgtgagaatggactaatacagtaaaacgaaaatactcaatcttacttatagtaagagaaccacaaaggagatgccaatttctgtgtatcacattgtcagagatcaaaaagattaataacacaacatattggagaaggaatgggaaacaggaactctcatacattgctggtggtagtataaattgtcactacattcatggagagcaacttggctgcattatctttggataaattactatccaataatttatttgaataacagtcttgcaaatataagaatcacatttacccaaagatatgtattgtagcaattttctatatgaaatgattacaagcaacctaaatgtctatcagtagaggattaagtaaataaattatgatctgtttatacaatggaataccatggaactgttaaaataacaaggcacgctgggcgcggtggctcttttgtctgtaatcccagcactttgggaggccgagacaggtggatcacgaggtcaggagatcgagaccatccttgctaacatggtgaaaccccgtctctactaaaaatacaaaaaaattagccgggcgtggtggtgggtgcctgtagtcccagctactcgggaggctgaggcaggagaatgggtgtgaacccaggaggcagagcttgcagtgagccaagatagcaccactgcactccagcctggacaacagagcaagactctgtctcaaaaaaataaaaataaaaataataataacaaggcagttttatatgaatgaatatagaaagatatctaagatatttgttaatggcaaaaagcaaggtaggggaaaatatgtatagtatgctagaatttttaaaaatacatgtatatgtatatgtgtttacatagactctctgggagggtatacaacaaactagtaactggttggccagggacagggtatgagtggagcttgggaagctgtgcgacaggtttgagaggacgatgttctaggctcatctcaaaagtatactgtatatagttttgtatcatttgagtttcatatcacgtgaagggattaactattcaaaaagtaagtaaaataattttttaaatgtttaagtaagaatcctgagagacagagacagaatgatctttttgccctgagcacagtctaaatattcaaggggtagaggcacatgaaccacgagtcaggagaattttgattgtgtgcttctttagaaatacgcccttatggaattagggaattccaagatgagaaagtgtaagagatcccgggaccagcttatactttgtggcagagggaaggacagtctgagaataaacgtttgctaaggaatgatctgtaaagaatccccagacagtcattaagatatgaatgctgaaagaaagaagtgttggagctggttagcaaccccagacactccctgtcatcagtccgacatgctgcgtcctgcctttgttgctggggagtgtcttccacacctactctccttgcttccagcccagacctcattcagaggaacgaatgaggtgtctgcagcgtggctgcttcatctgaccttctggaatctagggacagcaaccaagtgcctagcaaactgaccatggtctcctccttgctgtgacccagagctgctcttcttgcaaattggaagatatcaggtgccttgttggtctctagtcctccctggagtatcaggtatccttcctggaaccttcctatgcctgagtcagagggacagtctatttcctggattctaagtttcacttttaactaaccctaaagtcctatgactggtgataaaagcactggtggtaattgtgatttcattcatctttaaggattatctgtctgtctatatatctgtccatctatcctcaaatcacagccctcatttgatctctacagcaatcctataggtagatctgatctctcatttttaaatggcagtaaaatatttgtacgaagattttgttttccaagtactttcctctgtgttatctcattgctgtcccctgacactctcatctaggtgaggaaggatttattaacccagatatatcaatgagggtattggagagtcaactgtgtggaatagtgggcctttgagataagaacatgtgggtttgactcacatggattcttttttgttttttttgtttgtttgttttttgtttttttatttttattttttgtagagacaaggttttgccatgttgcccaggctggtctcgaaccgctgggctcaagccatccacctgtctcagccttccagggtgctgggattacaggcgtgagtcactgtgtccagcatcacatggattctttacacctatttcctcaggtgtaaaatggggataataatatctatatcaggctgggcacggtggcacatgcctataatcccagtactttgggagccaaggtgggagaattgcttgagttcaagagttcaagtccaacctgggcaacatagtgagacctcatctctacaaaaaataaacaaaattagccaagcgtggtgacacatacctatgggcccagctacttgggaggctgaagtgggaggatcacttaagtccaggaggtcaaggctgcagtgagctgtgatcgtgccactctactccagcctgagtgtcagagcaaggcctcatctcctaaataataataatatctacatcatgtcatactggattactgttaggattaaatgtctataatgtctatcattcagaagaatttcaagaattaatattccagtgatttcctgtttcttgacctgttctatcacttaaaatatttttttactttgaaaatgttttatggaagaggagagaataatataatgaaacttatgtatccatcatccttgtcaataattatcaatataaggccaatcttgtttcacctatgcccctacccacttccccctttcttttgttaaacagttttcaaagtagtgaggcatttccctgacatccttcagatgtgactaatggcttatttaggattattttaaaatattattaggaattcatagatttaaacacatttgttatgtttctccctgttgcagttattatctttattgatgctcagcttgaccagggaaaccttattcttcttggtctctgagtccttttgacatgactctactagtctttgacacgactctactggtctttgacactctgtttgcttttttggtatgacagtatgtttaggcttatcttgtatgtttgctgcatcaaatttggagtcagtcatttctccaaggaggcccaattccttcttcgggaatggtatttagaattcataatctgattgctagaggtgctcattctgactaggatggtcattgtttctaggccttacagtgaacagagctaggaaatgtgcatgcacaggtgtgtgtgattaacctaaaacatatgaaggacatactgatactcccagttcacagccaagactacagaatttttacgcaatctcattaatcttacttttgtgtctcctttcaaccagtaaatcttgtttccaagcaagatcaacagtattactcatttgatttattcccaatgaacatataaaatctcacaataataatattatagtaccatcaataatatggttattgaaaacagtttaggatttcttgtggggcataaggtagttctttttatctttgtggtacatctatctaaggctagcttgtccagcccacaggccacatgcagtccaggatggctttaaatgcagctcaacacaaattcataaactttctcaaaacatggatttttttgcaatttattttacctccttttagtgttagtgtattctatgtgtggcccaagacaattcttcttcttgcagtgtggcacagggaagccaaaagattggacacccctgataaggatatgcagtcaaattacaattgttttaatctatgtgtagtatgccaaccaactgggctcaaaggttcatttgtttcattttatcttcatttttacataattctttgaaactttttttttttttttttttgagatagggtcttgccctgtcacccaggctggagtgcagtggcatgatctcagctcactgtaacccctgcctcccaggttcaagcgattctcatgcctcagcctcccgagcagctgggattacaggtgcccaccatgacgcccggctaatttttgtatttttagtagagacagggtttcaccatgttggtcaggctggtctcgaactcctgacctcaagtgatctgccaaccttggcctcccaaagtgctgggattataggcatgagccactgtgcccaccctctttgaaattttttaattatgttttgtaattatgtcaaatatttacatagtccaaagcaaatccatgtaacaaggtctgttcaaagtccaacttctgtctgtcccctgcacttcttgtctccctctccttgtagggttttttgtttgtttgtttttgagacagagtcttgctctgtcacccaggctagagtgcaatggcatgatcttggttcactgcaacctctgcctccccaattcaagtgattttcatgcctcagcctcccaagtagctgggattacaggtgtaagccacaacgcctggctaattttttgcattttagtggagatggggtttcactatgttgcccagggtagtctcaaactcctgagctcaggcaatctgcctgcctcagcctcccaaagtgctaggattacaggcgtgagccaccgcacctggcccctgtaggtcttttaaaatgtattttatgcttcatcattttattgtcttttttaaaaatacaagcaaatgcatatatatttttgcattcctcctctctttcctaaataaatggtagcatattaaacattattttctatcatgtgtttttcacttaacaagaaccttggagattgtaggtatataggatatattttaaatagattcctggaattgggattgttgggtcaaagagtaaatgcatacttatttagatagctattgccacattcccctctacaagagtggattataccatttcctgcagacactttttttggggggcagatggagtcttgctctgttgcccaggctggagtgcagttgcgcaatcttggctcactataacctctgcctcccgggttcaagccattctcctgcctcagcctcccgactagctgggactacaggtgtgcccggctaatttttgtatttttagtagacacagggtttcaccatgttggccatgctgatctcaaactcctgaccttaagtgatccaccctccttggcctcccaaagtgctgggattacaggtgtgacccaacatgcccagcctcctgcagacacattctaatgttataacaaatgactaaatggaatatgttattgctaccaagaaaggttatatgattgttcagaactggtcttgaaccctgctaactaatgatctgatcctgtctatcatgccttctccccatgttacagattaagaaattgagtcacacatagagaagtgtcctactctaaatgacataacaagctaggatttaaaatttgcatctcctgaccctaaaattgggtccccttttaatgtgttatggatttatttatggtgagcttggtttgtttatctgtagacagagaagaaaaacatagttctcctaggaagctaaaaaattaatgagatgattatgggtaaattctcccctggtggaggagagattcttcgaggtatggctgaacttcttgtggtgaatagggaatcagcaattagactgtggtgtcagggcactaagaaatgatcttacagataagagagacaatcacccttgcaggatctgtccttttttttttttttttttttcttccagagtgctttgaacttctttgaacaaagatgctgttatgctatgcaaaactttaccaatggatgtggacaaaaatgtaatttccccagtgaatgagcaagctgcaaaccacaaaggcttttttttttcttcctttcttagagtaaccctggggttctcctttgtgcttgcttgagacaggttgattgacttatgtgcaatttgggacgctggagtttaccttccctccgcagcctggaacagagcctcctctggtgttgcaaggaagaggctgaatgaggcagagaaggtaagcaggacttgggcctggggtatgtgtcattggaggggtgagaatgaggggacattctcgcctcctgccccttctctttgataagggaagcctgtttgcctggccccaggaatcttctgagaggcatctcctttcttctccccagagatagaagccctgagttgccacagaactgcatgccaaagttctccttgcaaggaggctggtgagggtagcgtttaagccttccctggcagggacagtcagccaacattagcgctggcattgtcccaatgtccacctaattgaaaaattgggaaacaactttgtgacccacaccctacttagtctcggcctctacaacctggatgctcctgagtgacagccctggcatatgggagacagtccaagaacccctgccctgggcggggcattgggccctggcagatggacagttatccaggcgcagtaagcagccaaggcccacagcacttagccatgccctgtgcccagggtctgccttgttccattccgggttagattttgctgccactcccagcaactcctgttttactctcaggccctggtagccggggaggacatgtgacaactgagggctgcaattttaacagagcagtaacgggcagtagtgacagactggcctcctggaggctgctgggctgagagggtctgggctggaggcctgagcagggcaaaatttccttattctttgagtttgggcatctctacctcatcgaaggtgtctttctcactccacctcactctcttgttgtcttttttcctcccagaaagagttggagctggggggaggggcgtggagagggttgaaaagtggaagctgagagtgccgacgacatggacttgggatccagacacatctgctggaattccagatccacttgctttgtgaccttgggaacgctgaacccctctaggcctcagtttcctagtttgtacaacagggataataaccaacattttgtggtaaagattaaagagtaaatatataaacagatgaagagccctgcagagtgcctggctcatttaatcaatgagggttattatgatttctcatatcaatggcaattcagatatagtttttttttttatcaaggtagtttcttgtgtgggccctttagggccaccacttatctcagaacagtgtcaggtttcagagaccacctgggaaattcctctgaccttagggctttttcaccctgtcattgttactaaacattgaacttgaacatactgactgacagtgtgtgttttggcaggggtggcgcgggcagggggtgcatgccattcttttactacacgtggaggagtatgattgcaaaagcggtgtacccatttatttaaacgggtacgaagtatatatgaaactggatggggacagaatcgggtagttaatgcagctctgtgtcaccaagtccccgctcttggcactttcccatgcacccttcccactctctatccctgtccctccacagctctctctgaacattcactctaggtaacctgaccagatccccacctaaggaaccccgggggctggcttctctgatgacagcagcctcactgtccgacagcagatatggctgccctggagtcgtgccctgccacctcctgcctgaccagaatagattcgttctggctcgtacttctggacaccaccagtctaaccagcaaaatcgaatatcggttctgagcttaatccttttaatagtgtttccatttacattaattgtgtcatttgactgtcaacacaattcagtgatatgagcaaggctgctgtcatcattcccatttgattggtgaataaactaaggctctctgagaagttatttcccccaaggtttcgcaaaactaattagcaaaagagcccctcctaggcttggatgcgctgaattgtagactgtttttctcgctgtgatatcacactgcctcctccagtctgaggcacccacaaatcatgaagggggagtacctatcaaaggactttcagacacacagaggaaccttaaaaaagacataagactgcagagactgcttgccagcaggacatacggctgttgagcgtacagtaagttctgagagaagggaagctgacccaggcttctttagatgatgataatcgtcatcattataataatcagcatctcagcactccccgtgcaccaggcactgtgccctgcgctccatcctcccacagtggccccatgaagtagggcccattattacccgtgttttactgatggcagaataaaagtccacagaggttaaggaacttgcccaaagccccccatctaagaaagggcctggattcaaatcctgtggtccaactctggcacctgtgtggcaaccatttgggtttggggctggctgtgtatttagggtggctcattccaagattcactggaaacactgcgtagctgtttctgagcaagtgttccccggggctgcaggtgtgagctctgaaaccgcctaaggaggaagccctccgtttatctgcgtcttctccctttgttggaagccactgccatatggagctgccccaagcgtctgctcctgagccgcccctccctcctcctcccactccagcatgcagcaccctccaagctcaggcttcgtctctccccttccctcccgccatccccagtacgtccactccttgtcacctcccatcacgggaagcagacactggccctctgatgcaaggcagagaaaccactgagcttccccaggccttcaatttcccaaaaggatctatttgattaattgcactcacactcctaagtccctctgcctgtcagagagaagctgggcctcctctctccagaaacattgacacaggcccccttggacagcatgggcccaggacacacaactgtggatcactgagggtgggaccatggagcttcattaggaactgtcttccccacctgctgcccccaaaccgatttcaggcccctgaggcaggcacctgaggcagcccccatgcttagccccattttcctgtgggcaccgagacctgtagggtaagtgtggggtacatgagtgtcaacggtgaaagctactgccctaatagcttgtgctgtttacctcctttctgctgcagtgatgcaatcatgtctagacccctctcagcctttcctgctgcctcgccaagcccacctttccaccagaggctgggctgtttgaaacagcatgtcacctgtgagtttctaataagaggaccatatgctctagcaaagggaggcccttctagggcataagacagcaaggtttcctccacaccactggagctaagagtctttggtataagcacttgcagccgccagcgctttgcaaccagacttctagacaaatggtgcatcttataactcaggaaaatcctcattctgttggctgcctccccctttttgctcccacctcccctcccccatgcctcctgtattttcacatctcctccagcctgtagaagcctgccaggatagcagttggatccagactgatgtctgtatgggatgtaaatgcagaaggctgcagggagggagagaaggaacaggtgctgctccctcctgctgtcttagttctttcctctctatgctcccgcttatcacatcagacaggaatttaaaaaatgcaaccggggatgtgctgtccttgaaatatcagcagctaaaccaatattggcagctgaattgatgtcaattcagaagacccagctccctctctggggctgactccagctgtttggtggatgtcagagctggtgggacattggtggaagaagctggggtggagtgctttgcttgtagaaaccatggcaaaggcaggagagaggggagcccagaggggatttggctggcctgggattttataggagcctcccttcctctctggtctaaagtagactgcctgtgcagataaccatctgttggctctaagagtaaacaataattccttaggtatagagctagggtatggtgtctgcacaggcatcgtctacactgtagatctacaaagtagatgtgaaaccccatcttgtccaaagccttatcgcaaatcagtataccagctgtaacttgggggagaggagaaagggccaatcgtttattttgtttgctttgttttgttttgttttgagatggagttttgctctgtcacctaggctggagtgcagtggtgcaatctgggctcactgcaatcttcacctcccaggttcaagtgattctccggcctcagcctctcgtgtagctgggattacaggtgcccgccacatggctggctaatttttgtatttttaatagagacagggtttcactgtgttggccaggctggtcttgaactcctgaacctcatgatccacctgcctcagcctcccaaagtgctgggattacaggcgaagaaaggaccaatagtttttgaatgccagctatgtgccaggccttggattaggtgctatacatgtacattagctcattaattcatttaggaattgtcacagcaaccttgtaataaataagtgcatttatcccacttttaaacataagaaaacagagagagagaataaaccgcggaagaccatgtagcaggtaaatggctaggtgggagggaaactcaggtgtgtgtggctgcaagtcacatgtgccagctggattaaacatgcttccttgtgagactaaatctctgcatcttgtctggtatgtttcccctggtctgcatggcttcccagctagtggtttgtcattcaccagtttattaagcccagccctgttctgctttgagttaatactcacttctgtgaagggccaaagaaaaagtaaaaggctcttcctttgccctcaagaagctcataatctggctaagagactgaaagtcatctctcttttccccaacccaagtttcttctgctacagtcttgcccctctttctttccctgctcaagctcagcctatggttttcaaatggctttaggactatggtctgttgaaactaggcttgcaatccacccaatagaggacagaataagcagcttgatttgagtgatgtcatgagcagatgtgtccagatggtgggtcctcagatggacaatggtctggatttcaaatggacagcccacttagggagcttggcagggcccagggtgaggaagctggggttggagataaggatggctggtggagtcgcacagatatctcttgggaaagctgctcagggagggagaggtttctggccattctagagccaccttccttttgtacagcattttataatttactgtggagatagagaccagacagtttgtgacttgctcaaggtgacatacaagatcttagccctaggtcttttttttttttaattaaccaatcttcaatgtattaaaattacaaatccccaaacctaattattccttaaactttttacctcaatcaacaaattttacaattttcttcatgaatcttatagattttagcaatcacttacttggttttattaataaacttagttaatttaattcctttgaacatttgaaactgtatgtgtaaatttatccattttccttttcaaagtatcacagttttttttctaacaaaggcttccaagtccttatgtaattcttttttcatgtatatatatatatatatatatatatatttttttttttttttttttttttttttgagagagggtctcactgttgttcaggctggagtgcagtggcacaatctcagcccattgcagcctcaacttcctgggctcaagtgatcctcccgtctcagcctcttgagtagctgggaccacagttgcgcgccaccatgcccggctaatttttgtgttttttatagagatgaagttttgccatgttgcccaggctggtcttgaactcctagacttgaacaatccacccacctccacctcctaaagtgctgggattacaggcgtgagccacagtgccttgccttattactatttttaaatgacagctttattgagatacaattcatgttataatatttactatataaattatagaattcaggctgggcacagtggctcacacctgtaatcccagcactttgggaggctgaggcgggtggatcacttgaggtcaggtgttcgagaccagcctggtcaacatggtgaaaccccgtctctactaaaaatataaaaattagctggtgcacggcagcgggtgcctgtattcccagctactcgggagactgaggcaggagaatcgcttgaaccctggaggcagaggttgcagtgagccgagatggcgccactgcactctggcctggatgacagagggagactccatctcaaaaatagatagatgatagatagatagatggatggatgatacaattcagtgatttttagtgcccatagacttgagcagccatcatcacaatggattttaggacatttttatcgccactcccagcccccgcaagaatctatgccattgttagtcactcctcttccccacctccacccccagccctaggcaaccactgatctattttctagagatttgcctattctggacatttcatataaatggaatcatacaatatgcggtctttgtgtctggcttcttttccttagcaagatgttttgagagttccccacatcagtaattcatttctttttatggctgaatgatattcctctgtgtagatatactgcattttgcttattcatctgatggaattactgggtcatactgtaggtctgtgtttgaccttttgaagatccctagaccttttaatgctaattccaaggcccctttctggacttctaccttcagctcctgaagtatttttatactctacaaaagtatactctataaaaaatactctctaccacctgggtccctcctccttagccttcccaaatcttgggtccccacccttagggacctgtcacacaagattatcactccccacctcaccatccccctccctctgaccactcttctttaatgacagagcccctggagacagctgctgcctgacaccttgataccccacgccttctccacccacttggagccgggagggggtggggtaacttcacaagcctctccctccagctgtgaagaaggatgtgtgtctaattgctgtgaaaacttcctccctgaggggagcagacagggagccaaggcaagtgagaagctgggttcttgaattgtagagaggtgggggctcttctccgtggtggtgggatcggaattcctccccagaggggggagttcgcttcttgcttttcagcaggtggaggcaggcaatacaccctagtggtaacaccttaacttgttttctttacatcctgttttacctgctaatctttgtatggcaggagactggtcaggctgtcagtgactagtagggcctgaatacatccactcacagataatccacaaatcttatttaagccagcccttcacagggtgttgggtcagctaatcaggagggtataccgactacatttgagcatcttttccatttcatgcatgttccctagtcctgcccctaggagcatgaatgagtaagcagtaatgaggaaaaaccccacagccccaaagacccgtagaaagctggctggattgtagagtcggcgatgtcctccccagtgtatccattgactgccagtctgtgtggtgtgggtgtcaacgacaaagctgggctgtagaccagggacacctatgcactttgggcttccttgctgtgccaggctgcaatgtgccaagctccagttagtgggccttgggtcaaagagacagcatgaagcagcaaccacattttctccatatacaaggatataaatacaatgacgtgagttgtaccattgttgtaataggggggaaaataaagaaaaacaacttaaaggtccataacaagtggatggttaaaagatttgtggcagtcccacacaatggagttacaacaaagaacacagacgtctctgtgtccaagctatatggcttgataacccagctagttgtggtgtggcagtgagatgcaggcacctcccaccctagaagtggctgcactttattggtgggttcaggctttttgtggggctctggtcctgctggtggcttatgaataacatggcgcctcataaagagttttcgccctagagagcctggtgtgaatacgaggtattcattagatcttcatggtggtcacctagagggaaaagtccctttcttctttcccagcccttccctcttccccagcttaataatagccaagaggtttaggtttcaacctatagattagttccgagtgttgagcaggaaacagctgtttttcagccaaatccctaatcctaaaaccaggtgtccccctccaccccatccccaggagggaatcaggaccacctgataccatttccctcccccatccccctgacccatgtgaacttagccaaggcagggaaagacaggctaggcctgctgagtgctatcaatggttaaacacacagcccctcactcctcccagatctctgcccctgacaatgaaggggagccaagcgtgaaacacagccagtgagcagatggagaccacccccatccaaccctgaggagggaggagggggaagcagggagtcaaatcccatatacagggtttcctgggctaagtgaaaattctagaagacaatgactggttgaccccacaccggccaggaagctgggtttctctccctgagtgtgggggaggccgaggtcctgaagcaggctggtgagtgctttcctctgctgccaagtcctgccctggagagtttggtatagttactgcctcttctaaaaggggaggtgggaggattgtgtgggcagactgactttcttagaagttgctgagacatggggtcatttcatccagggtaaagaagagatatggtgagatgtaattctgtggcaggtgctccctggggaatgggagctggggagtcgctccctggggaatgggagctggggagtccctccctgcctcttccccttctaatcttattttcttccagagatccctctttctccacttgcttggtgttctgtctctttgggatgggctaggcatcaatagggggcagtttgagtttcctaggagactcatagttctggccttcagatgcctgtgagctggaaggaatggaacacggctgggtcaccatctgttgcatcgttccttccttggcatgggagagatggaagggaggtggccatggggatcagagggcaggaggggaagtggcggacggtggccctcagtcatgcctagccgatccctgggctgaaggcagatttcagaacccagtgcagccaagccagagcctcaggatgaaagagaaaggaagagactgagaatggaggtgttgttgattctgaggctgctgcctggggtgtctgaatccctcaattctgagagtctgtagagtggagcaaatagggtgacattgagtgtggccctgacaggtcagacagaaagctctgagagtcagcagggggagatttgagaaagaaagatgagcatgtctgcagagccggggcaggctctgctacagggacaggatgctggttagatgttattgttaggttattgcttttgttgttattactcaggcttatactgtacaacagatctatcccgtgttatagcaaccaaggatttattgtactgattcattgatgagctattaaaatatctcccagtaataggaagtatctgataggatgtctgtccactcatcccacgtgtgtttattgtactgtctcaggagagacaagacatggactctgagcttaacatcagagtctgatgcaggagatggatttgggaataaactcatcccatgaggcaggaggaaatgaccagtggaacagagcatggggcatgctaggaagcacaagagaaactgccacccactttcaatgggaaggcagcaaccctgttgtggaggggtggcccacttagggccttggcaaaaagggaatttgcactgtggagaaggaagagaatagcatttctggcgtcagcaaagtgggagcagagatggcaggaggtgcagaaagcacgtggcctatacaggcctggaggctggtgtggggatataggagggcagatgctgggagaggagaagccacacaggggtcaggagctgggtcataccagggcttgagggctgctctgagaaggcagattttatccctcagattcctggatgactttttctggacaaatcctggagttgtcctggatgacaaatgtaatagaggctaggcccaggcaggacacacactggctccttattctttaagaagaagaaaaaaaaaagaatatgaatgagaatgtagttattataatgttaataacctgagctgctctgcaaacattattactttgtattaggaacaaatttcttgacaaatacatatgatcattagttccaactaaaaggagctgctgcctgtccacatggaaccctccatcccaatgagggataaatctgagctcttttcagatctcccgtgtacccacatgcatactccttaattttgtatacttctatttcctcctatttcagctcctctctctcagtcctgaacaagttgtttccaggcagctgtagtgataagccctgctacatttttttatcccaatgcagaatggctgagttttgcattggctctgttgggcttttattatctctttgttccccaacaatttcctgtggcagtgatgtgtgaatgtatttctcccttggttcttgtagtactattctagtcacttgactagtttattctaagaactaattgctggcatgtggccttggtagcagtaatctgttggtgtatccctaggcactaactcatgtgcacaaccttggaatacctgacgaactgtttcattcatggctcttagacatttcaaactgaatatattctgttccatgcttgtgatctccctgcatcccagtgactaccagactcactctcccttctgtgttcttggtgtcaattattagagtcatcctagtccagtttcccaagctagaaaccttgatgccatccttcttcttgcttctactaccggtcagtcatcagatcctattctaacacaaaaacagtcctcaacaggctttggagaacattaaaccatccttctatcatgatctccccttttctctctcactctgaccagggccacctgtggaatctggaagaaggcaagtgaagtgaagcgggagaggagacatgggctgagcaacctcactctgggcttcactcccagaataaggggatactataaggcagagtgtggcctgcagctaagccccagaccagcccctgagaggcagaatataggtctccgttgggtcaggtttaccctatattcagagaaaacataaaggtcttgcttttagtgacgtcacttgagtttgtcaggaaggaatgcactaagaaaaagtaaaaacagctttatgttcctgtgcagtattttatttagttcttataacaaccatctgaaaaagtcagtaatgcagtaatatttatttccatttttgagattttttaaaggcttggaaaacaagtaatttgtaaaagataagaggcaggattgaaacctttacctggatcttccattccataaatattccttgccagggactatgctggccactcggcacacaggaatgaacaggacacggtgtcagcctcaagaatttcactaagattgacagcgtttgcaaaaggcatttaaaaaaaaaaaagaatttcacaaagtggggagaaagattaagtcagaagttagcaaactacagcctctgggccaggtccagaccaatatctgcctgtttttgtcaatacagtcttattggaactgagacacgcctgttcactcactgtctgtggctgctttcacactgcgaaggtaaagttcagtagtcgtgacagaaagtgcgtgcctcacaaagcctaagatagtcactatctggacgtttacagatgtttcccacccttagtttaaacatagttttaccgcagtgtgccacatgccccagagaggtagatttgtggttgagtggcacagcaggagtgcaggattcttcactcggcagatgtctgagcagagtcttgaagactgagtaggaattgatcacatggaaggaggaaagatccttccaggcacaggggatcacatgtgtaaggtatggaggcacagatggtgtgctacagcatgcagttaaaaagcatttggggttggtggtgggagggtagcgggggcagttggagagacctgcaggagcctgatctccaaaaaccttgagtgctgcactcagaagtatgggtctgatcttatagattaatgggatgatatgaaagggttttcagaggagcactgacatgatcagatcaggtgtttagaaaagtcactggaatagcagcatggagaatggattggatggaggagaccaactaggaggttattgccgtagtgtatgagacatgtatgtgaaaggtgagatggggagaatgcgggggagatggagaataagcaacactgggaagtagacagtctgagggccttgatgcctgggtatgggctatgaaaaggggtgggttgtaagggcaattcccaggtgtctggcttgaatgacttgggtgggtaccaccaacaaagatggggactggagatggggcacatgaccccaatggagacactgaattttaggcagaagaagagaatccggccatgggatcagtgtcaccatggaggctataaatgccagacccaagatggggcctcaaagtgatgtctcagaagccaaggaagaaagaatattaggataaatggagtggttaacaatttttaatacctccaggaggtttggcaaaataaagactgagaacactagattcagccagtgggaggtcaggagaggagagttagaggagcatgaggagtgaatgggaaaggaagaagccaaaaaaaaaaagctttcagaagagaagagatggagaaaaaaattctagtatgcatatatagggaggctgtgggatacagagaaggatctttttgttataagataggagaggctgggcatggtgactcacgcctgtaatcccagcacttggggaggccaacgtgggtggatcatctatggtcaggagttcgaggccagcctggccaacatggtgaaaccttgtctctactaaaaatacaaaaattagctgggcgtggtggcaggtgcctgtaatcccagctactcgggaggctgaggtaggaaaatcacttgaacccaagaggcggaggttgcaatgagctgagatcacgctattgcactccaccccgggcgacagagtgagactccatttcaaaaaaaaaaaaaaaaacagatgagagaaacttgaagatgtttctctgctgaggcagagagccagttgagaagagtttggaagttctggggagagcagcatttcatggtcaagggcagatccatgcagaagctggggctggtccaggtagaggtgggcaggaggaaggacactttttatatacagaaagtggcagcataggtaggcatcaaccagcattctaagggcacttctgattctgacagcactgccagttgcaagtgatagaaaattcaactctaattggcttgcaaattaaagagaattgttaatgtaaatgtatatgtaattaaaaacccacaataagacttgtttcagaaaatgttcaatcagtaactcaaacaaggacatgaaggattgagtcttcctatgtcttctctctgccttccgggttatcctcagatttcacatggagacaccctttcccacccccaacagctccagcctctcctcttactgaagatgaccacagggtctttttcagaagagaggggaaactcctctttcccagaggtctcaacagaagtcttcatgaatcacattgccgcctgctggaatagatgcccattcctaaaccagtcgtggtggtgacaggctaggagatggtaattggcttaaactaatcagggcccagccctggaattggtgtaggattgctctgagaaaggggtagagatgaattctccgaagaaaaatatgggcactgtggacgggaggaggatagtatgggtgctggctatgcagccagtaaatatgcactagagttctctgtgtgctggacgttgtgcaggttgaacaagacactgtcttagcctcaaggaattcatggtgcagttggggaaacagacaattaattgacactgaaatctagcactcattatagtgaatatattccaaaatgctctaagagcacttaggacgaggacctaatccagccttggtgggaagggatggtgccaggaaagtaagggagacttcccagaggaggtagcacctgacctgagcctggaagatggcaaagaattaggagaaagaaggagagcagtaaaggcagactaggaaagaagagtgattgccgtaaagacagtgtggaagtaaacaaagatcacccacatgagaacaagcggaagctatttattcagagcttgctacagcaagggagtcagccaccatcacctgcatttgacagagactcagaggcaggcaggggagtgggaaagctttgtcatgagtgaaaggaaggctccagatgtgtctgggaaactggagatgggcaaactagaagtgggcatcttatgtgattggtttgggaacgtattcagctttcctggtcagttctgagtagaaagtggcagcaagaaataggggagctgacagcactgagcaagcctgactgtcctgggctgggtgctgcagagcttgtgtgtcaggactgtactgtcatctaggggctggccagcgtctgatctgttcagtctgcatggggtataagtaggagtgatccgaaatgggatagaggaagatgagactgggcaccccggtcctcaacacaaatgcaaaggctagcgtgggaaggctgggggattttccaaggccagcactgcagccttagcctggcgtgttcctcctcacacccatgtcttgccgttgcccccgtgcatcatggccactgggcacagggtttttgaatatggaacattaggctgctgcacagggtttccagttctttcctcccacactatctttatgtcagtcactctcctttcccaatctgcctttactgtggttcttccttcactcaacagtcttttcttcaaataaaaccttatatgaaaccccagtataaaaacagtcactgttggcagctctggggagagtgggaggggggtcctgagtcccacctgttctcctcctgcccaatcctccttgaagaaggcccctgagtcattttcggaaaacccaccagctcctctggacccaatgtgaaaacctagcattaacagattccctctctctctctttctttttctttttttttttttttgagatggagtcttgctctgtaacccatgctggagtgcagtggcacaatcttggctcactgcaacctccacctcccaggttcaagtgattctcctgcctcagcctcccgagtagctgggattacaggcgtgcacccccacgcctggctaattttttatatttttgtagagatgggatttcaccatgttggcaaggctggcctcaaactcctggcctcaagtgatctgtccacctcggcctcccaaagtgctgggattacaggcgtgagccaccatgtccagcactaacagattcttaagaaatctttagctctgtcctcacccctctgggtattttatgttttaccccagagatggccatgaggctggctgcacagggtgggggtcttgttgaaagagtgtggggtgtctggtgtgcaggctgagggctggcctcactcagaggctgtggagcctcctacctggcctccccacttccaccctggcccattgacattctgccctccatgtggcagccagagtggtctttacaagcaaatctcaccatgtcactctggcttcaaaccctgcagccgcttcctatcatgcttagaatgtgcttcaggctccttcttttggccttcagagctctccgtgagcatgccctggactctctctctgactgtgacttgttccattcttgtccttgcgccctccaagctccagccatgctggcttctctcagtttcttgcatggggcaatgtgattcctgccacagggcctttgcacaagcagctcttcttgcctgggatgcttttctgacctgtctttgcaaggttagtgccttcttaccattcaggtcttggtcagatggcaacttctcacagagaggccttccttgaccactcgcttcactttattacatcacatcaatcactactgtggtttctttctttaaaaaaaaaaacacttctagagcagttttaggttcaaggtacagagagttcccatgcaccccatcttcacacgtacacagccccctccattatcaacatttcttaccatactaacgtgttcgttacagtcgatgaacctacatggacacatcattatgacccacagtccacagttgatgttagggttcactcttggagttctatgggtttggacaaatgtattatataatgacaagtatctactattagggcatcatacagagaagtttcactgccctaaacaccctcctctgtgctctgtctattcatccctcaacctgcacccccagcaaccacagatctttctagtgtctctatagttttgccttttccagaatgtcatgcggttgtaaccacacagtgtgcagccttttcagactggcttccttcacttggtagtgtgcctttccttcatgtctttccatggcttggtagctcacttcttttgggcactgagtaatattccattggatgtacctccgtttctccatccgctgatgggagaacgtcctggttgcttctgtctgggttttggcaaaattatcaacaaagctgttaaacatccacgtgcaggtcggttgtgttttctccgttgcacttattgctactggatttttggttcaacatatatttactgtcctccctgctgggatggaagctccatgagagtagagggactttgtctcttgtccatgcatgtgttctctagaataatccctgccatccagtcggctatgtgaatgaatccctgcccactgcatgcagcccaaaagtctgagatggctttccctccaggagacgaagagctgccagctgagccatgtctcgacgctgccagtcttctctccttgtcacttcagatgtgttgtgaccaccaggacagcctgcccagaacgtggctgtgggaatgtgaggagctcccgatggcgacagctcgtgggagccacgggatctcatccatctgccagggacagcttgtggaatcaacaccacgggcccccaatgtggggaaagaaaccagggcccagaagaaaaggaaaaacagaaaagcaggctgtgaccatggatgcgtcattattacagccacttactactcatattggtcatgtcgtggaggtggacagaatgcttccctcatccctttgagctcaaacccactcaggggcagcagctgacattttttaagcatttacgctgtgccccatgctttaccaagtgttttacataggaattgtgtgataaatcctcacagcagccttctagaattggtgctattgttatccccatttttcagatgataaatacaaagcttccaagcttcagtgcttgcccaagccccccaccctgccgccggctcccatacttttaagtgggaagtggcctcaaaccaggcagtctaaccatgcagccaatgctctcgaactagacaagacaccaccatgtccagaggtcttctaccaggcagatcattagcaaactcacatgtgacatcttggacattttgaatctgaatcactcacaagccttgcagatttaaaggccttgtgttcaggcaggttgcccatgtgtgtggaccatccctgtgtgagataacaggttctaagagcattaaaaacaatctacaacctgatttggcccctgcctagaagattgagggcccgggaatctgtatgtttgaagagtgtccaggtgactctgaaaagcatccagccttcctcctgtgtgggaatgttgtcagtaacacacctaaccaatgccatttggagtttttatgaaacagtacttaacatggcagaacatgtcaccttcaggtagttctattctcttttcttcctgtatggatggatgtgtgtgtgtgtgtgtgtgtgtgtgtgtgtgtgtgtgtgtgtgtgtgtagggggattgggagacctcagatatacatgagctgaattaatcatgttctccagtacttagtataccatgcatccacataggatttatttctttgttgtatttatttttgttcttttctgcactctccccctgccccctgcaatgagccctcctctcatgtattttatatccttacagcctgcctcttatgttattatatataaaaggatccttcaaacatatcatatgtagagtatgttttttcactaatggtattgtggcacggctgcatttatcagacaattcttcctgtgactcaaggaagcacctgcctttctgaaacatcctcctatttggtcctagctttgcccctgtggaactaaacagaaaaattctacactctctcccagcatgtgaatacaatcactgtggcccctcttcttcaggctcaacctaccccctctcctctactttccctcctaggatgtgggagtttcctggtcctccctgggatgatcccactagaaccaaccacccccacatctggatgttgcacttctctgcacctaagcagtcacctctggtgtggttggaagtgctgggagaggaacccgagaggtggcatgactgggccctagggcaagactgtgcaatgactaaggttgaatgggaagtgtggacttgattgctgtaggctagcaagcctgtccctttcacctttcttcctggtcatcaggacaggggaactgtaagccttgctgatgtaggggtaccttcaggcagggcatctctgctgtcactctatgttgggttctttgagctcagtactagaactctcatactcagaaagatggtggattcattccttcctttgacttggatggaaatttcctcagaatggatggcaggggttgcaaaccatgtgcctgccttccatgctgagtgagcccagcctggggagctgagggccctatatgctcacatcaaataatctgtcctcttcatcctctgtcccatctttatgagcacataatggaggccaatattatacttttcttttttgttgaggtgaaacataaaccgttttaaagtgcacagctcaaagccgggcgcgatggctcacacctataatcccaacactttgggaggccgagctgggtggatcacctgaggtcaggagtttgagaccagcctgggcaacatggtcaaactctgtctctactaaaaatacaaaatttagctgggtgtggtggcacatgcctgtaatcccagctacttggaaggctaaggcacgagaatcacttgaacccaggaggtggaggctgcagtgagccgagatcatgccactgcactcccgcctgggcaacagagtgagattctgtctcaaaaataaattaattaaattaagtgcacaattcagtagcatttggtccattcacaatgtgtgcacccacaactctatccagttcaaaacatttgcatctcaaaaggaaacctcatacccattaaccagtttccctccttctcccttcccctctgcctctggtcaccaaagacaatctgtgttttgtctcagtgtatgtatctattctacagataagacctagacatgtcatatctatgggatcattccctgtgaccttttgtgcatggttctttcaccgagcgtgttttcaggattcatccatgttggagcatgtcagtattgaattccttcctatggctgagtcatattccagggtatatacatactggaatttgtttatccattcattccttagaggacatgtgggctgtgtccaccctttggctgttgtgcatgatgctgctgtgaacattttgtgtacatgtacttgtttgatgcctgtttttaatccttttgcacatataccttagaattgcagagtcatatggtaattttatgtctaactttttgaggaactgccaaactatacatttcttttttaaatagcaaccttactctggtacttttcctgtatatacaaagagaaaaatgggtggaaaatccctggactaggagtcaagaaacctgggttctttttctacctttgccactaaccagctaggtaaactcaaaccagtcacttcccttctctcggcttttgtttcttcatctgaaaagaaaggggattggatgaatctagtgttctttaaattcttttcctcttgtaaggttttgttggaaaaactgggttccagagaggaaagagggagagaattgctacacagctaaatgtgattatcttgagattctttttccactctattgctaaatagtgaatttaaaatatcccatacaattgggcttttttttcttgccaatgtgtatctgatttaatgaatagcttctggcttcctaattctatcaagagtcccaaaataaaatatccgtctctttcccttcacttcctactgcttggcagctcctaaaccaaacatggtggtcgtggagcccggatgggagccatccctgctgcccctgctgtgccttcctctatcgcaggttccctcagcactaagggttcagttgcctgatctgagtctggtctttggagatgtataagccaaggagaggcattagtggattctttctgcgacagtataaggaccatcttagagagttgggaaggtgaaccaaagacctcctgtgatgccttctagccagagggtccctccttgggagattttctactctcttaaccctctttcagcttgttggtttcctctccagagagcaccgtctgtgtaggggcggattttttttgttccactaatgagtagccttcacagtatgccacccaggtccacagcatgtgctctcctgcgccgcctggtggttttctggggaaacgtgaggttttaaaaagcacatgatggtccaaatggcttcttatttcatccatttaatcattcgttcattttttcatccatccatatgtcgatccctctcacagttttgaggatctgctatgttttaggtactatggtcgattctaagaataaaacagtaaacaagatagggtaccttcccttataaaaaagctttcattttcataggggagatagacaagtggcttttggaatgaatacaaagtgaaatgtgccataatgggggaagtaaagggtgtgcaggagcacagatgaaggacacgtatgtcatacctggcaaatactaacgagagagggcagacacagagtgttctagaccagagcttaatggtgcaaaagtcagtaagcaagaccaagcatgatgtaccgagggagctggtagaagagcagtcttggctggaacacaggatgcaagggagagatgagcagtgagctagcagaggggatgcattatgcagggcctctgagccatgtcaaggacactacctttaactcccaagcagcagtgagctattgagagttgcactaggggagtagcacatttctgtttgcctttagaaataacagctttggttatgagtggagagtaaatcagaggggcatatcacactgcatcccataaatgcgtacaattattatgtgtcaattaaaaataataaagtaaaaaacaaaccacaggggggaaaagtggacctggagagaccacttaggaagctgttgcagtaactctggcatgaaatgttggtgatcaaaaccacggtggtggcagtgggaaaggaggcaagtggaggagtccagaaatatacacaaagttgaggtttggtgctgggcccagcttctgggaaagaaactgcaaaaatgtgaataagaatcctttagtttgccccatatcctggcacaagggaagtcccttgtcctattgcaataatcagtgacctgctttttgctccaggtctccagaaggatggccttgtctcccaggatctctcgccccctcagagagcaggcactggagtcctgttcttatcttctgcaccctcagtcagggtggataggagatggtgcatgtgcacaattgagagtgggcttcaatttgctgccgaataaaataggagcaggagaatgatgtgtccatctgataggtagctatgaatctaggaaaactggaggaattctggagaagccacctcctgccttcctctttgacttgccaccacagtagaataacaaactggaccaattttttaaagtgtatgtttcagaacctcaggcaatcttaaagcactctatttgagtctcagctgtaggccattcttgctcttctctttctagaggaggagaagaaaggtttgtctctaaggatccattctaggttccttggacaaccatttttaacaccatccctgtaagccctggaatgatttcttgtgcttgaggatgaacactgaatcatcatacatgctgtttactctaccaaccacctgaagcccgcttcttcctggtcattgtctcaccactgccgttatctataaaaggacaatatcagggaccactgtaccttagctgcacaaaatacttgcagaaatcattcatttttctacaaaaatgacaaaaagtcctttgtgcgccaagtcttcacttatctaacccatgatccccagtcctgccaatgtcaccctgcccccttcgtcctgggatcaaaggacatcagtgcgatctcatctctgtgcctctaccgcaaatatgctcaaccccaggcacactcagcacatgtggttcagagaggctgtgagattggtgcatttcttaccagatcggtgcatggcatcttctggttgctgggcctgcaggccaataggccaatgtttgttttcatgactgttctttgcagagttgcccttccttctctaacagtggttttcagctgggagttttgccctccagggaacaattgccaatgtctggagacatttctgattggtagtggtgaagggggtgggctgtactggcttctatcgggtagaggtcagagatgctgctaaacatcttacaatacccaggacagttccccaggccaagaattgttcagtcccacgtgtcagtagtgttgaggttaagaaactctgctctatctagaacattactctgtgaccaagggggctcttcggtcctccaaagccctgtaggattgctagagcaaaccacaagttcatgaaaaactcacttgctcttatgtttctttccacagctgagtgctgtccaggaggcccagttaaagcggctcgaggtgacaagaccccgagtgctggggagcagggagcagggccaggtgccgaggatggccaggcagccaccgccgccctgggtccatgcagccttcctcctctgcctcctcagtcttggcggagccatcgaaattcctatggatcgtgagtcctgccccattctcttctcttttttttcctgattttgggcagaggggtgggaggggagggaaggtcagaggaaagttcagataatccaaggagattgaggagaggggacgcagtggattctgagattcagagctgggtttctctccaaagaattgacacaggctcatgtttggaagtttgagactgtatgttgcagagccagtttctcagggctgtggctgagctgatgcttggggtgcctggagccagctgagtgggactagaggtggcggagtttgggattctgagtgccacttgggtttttccctctgctcacctctccaggtcctctgtggtcttgacttgcccatgaaagcagtccagggtcaagtgtggtggagcagttcttacttgcctttctaatgtctgatatattcaaatccacacccttcgggccctcttggctggagtaatcaggaggacacaggcctgggaagggctgggagcagaattatctttgcaaaagacatggctaaatgagacattaaaatagagccccattatcatgccgcatgggagaaccaggcatggattccttctcattgttttcaactttcctgcagtaaagataaaaagtaaaatcgctgtcattctgtttctcatagagggggcattatttgaccatcagaatcataaagtaaggggcttaaaatgcaaatctaacagccatgtctccaccaaccatatctgttgctgcgttcatcaatggcccatgtattggcagccaagctcctcggccctgcctttaggtgtgtgccacctttaccacaactctgacacttctggcaaaatgtcttagcatccccaggctaggatgtgagcatgccatctctgacccctgttccttgtgtcaaggaacagaggggacccacatgacaccaacattggcttgggctctctccagttaacagatgtctggggaggggggcaggagagtaatacaaactctaaaaagtcgtccctgagctctccaaagccagacccctggtcctggagttaccacagtttggagaagagttggaggtatctcagccctcctggcactctacttcacccataatagctgcccctgccccagaggaggggactttttggatgatagaacaccagtagtaactgtaagtcagacccagaggtaagatgggcaaagcccctgctgccctcccaatacccccaggcatgtggacttgaatgtatgtgtgcatatgtatgcatgcccacacacgtgtgcatgtgcacagggagggagggagggaggagaggagagttgtgaaaggacctgttcccatggtaactgtctgcgaggctggctcgaggagagtttctcattaacagtcccaggcagacagtctaataaggagcctggtaaggccaagtccccggagggagggtgtgcagaggaaattgggttatcagggaagtggtgaaggctcatttctcttctgccacttctcctctctcactcacctgctgctttgatccccagggccagtgggtgaggggtccctgcaaggtgagcctataaatagatggctttggtgtctatcttaagaatctggaattctaaagctctacaggaaacggagacacagcagacaccccaagcagtcaggctctccaaagccccacctgtagggtagagctgagagtgccctgatctccccaccatctccccattccagtgtccctgggacgacccccaccccacgttgtgttcgcggaaactcaagcctttgctagcttagagtcacacagcaaatggttggtggaaacaaaaaagaaaccactggaatcgcaggtgtcatgcaccaggaagtgagctaagtgctgcatgtgcctcatcgcacatggttctggcagctaaccctcaacataggtgttatccttagcctgcgggttagagacaaggaagcgacagagccgggataggaccacagcacctctctgatggagagggaagtccttctgcaatgccattccagatgctctggctgtgtcggggcaggagacccaggctgcccggagcatgccccacacacatggcacctccccggttgctgcaggtccagtggccctggcaacgtgtccaaaaagagtctgcagaaactgaacacactttcccagtggccaccgaagatgacaggggatgagggggcaggtcctggcactctatggccgaggccatctcctgggcctcctgtactgctgggctggaaggtggtggtcatgtacggcgagggcattggcatttctggcaatttctatagaaacaagttaaagtacctggccttcctctgcaagtggatgaacaccaacccttcccgaggcccccaccatccctgggctgccagccttctttttcggcagaccccacggggcatgctaccccacaagaccaagcgaggccagccgccctggaccgcctcatggtgtgtgatgggatcccaccgcccctgacacaaacaagcagatggtgatccctgctgccctcaaggctgagcatctgaagcccacaagaaagtttgcttgcctggggcacctgtctcataaggttgactggaagtaccaggcagtgatagccaccctggaggaaaagaggagggaaaaggccaagatccactaccaaaagaaacagcagcagaaacaggcccaaaagaacggggagaagaaaattgcaagttcacaggggtcctcaagacccatgggcttctggtctgagcccataaagactgtttattcctcaaaaacaaacaaacagaataaagaagctgaatgcaagacaggaggccagcccttcagagaggcccccggctgccctgggaagaggctgtcctcagcaggtctctccatctcactgggcccagcaccacagacctcccatgtgtgctgagctgagcccaccctccatccagccctgggctgaaggaagatcaggcattcttaacgttctcgccctgccaggtgttctttctactcatttgccccttcagtggacattatctgtgtctcgagggcaggggcactgcttctattctggagaggctgggcgccgcaggcctcctggagcagagccccagaccgctgcacaatccctcattgaaggcccagcctccagctcccactgctgtgccagtgaagtcacacgcacccctcccacccatcccctccctccctccctccttccctccctatccagccccaaggagaacagtatgacctttgaaaaaagccaagggtcgcctcatcaaccagagtgagtttgccaaaaagtgggtctgctggcccttttgtccctggccctgcatcaggggacagcattttcctcccagaagtggcagaaacaattccttcccaccttcatcacaaataacactgcaggatggcctcaactcatatgcacactctcacacatacatgcacattcacacatacactcacgctcacacctgctcactcatgcacactcacacccactcacactcacaccctcacatatcctcacatgctcacactcatgcacactcacacgtgccctcacatacccatatgtgctcacacttatgcacactcactcccactcacacacctcaatcacacgcactcacgtgctccatctcctgagggatgggtgccagaggtcataggtatcagagccagggaaagaaaagaggcacacgagtaaagaaacctcgcagaccgagcaggcatctgcctaactccctgcagagctgggctggaagagctatggaattcactttccactgctccatagaaggcgagtggtgtgacactgggtgggagcttggtcaccctcatccgtacaagctgtccccactgtcttctccctgtggcagcttgtcttctgggttggttctgtccctgtaagaaattccttagtagcacagtggtggctgcagacgccatccctatagtcaagtagattctccagaggtccttggcctgatagtatgggggctggggacagcatccaaccaactcttgctgccctgagagtctccagcacccacagtctcccctctcactcacccttctccagaatgtcaaggagagcagagtcctgaggccccagctggctcgctcacctctctggccaaggatggatttgttaaaaacaaaacaaaacaaaacaaaaaactctggaccaggcactgggagagctggttctccttctagctctgcagcaaacttcctgtatgatcttggccgagagacttcttccttggatctggagattccctggacaatgtctagggctctttccattgagtcagccttcgattctataaaagagaggcttgaagtcttgaataggcaaaggaggtcccttgtcaggcttgctaaccagggtgagaccccaaaaatgtcctgaatgaagaagctaagggcctgggctaagggccaaggggagcgggtcccagtgacagccccacctctcctaagaatggccccttctccccacccaagccaactggagttacctttcttggggccctggcaagaatatcacatatgggtgaagatgctgtggagacgagctccggggagcatgtgttcagaagccatagatttttgctttccccctggacttttcattcctttgtctcctgcccaggcagccctgggcaaatggcgaagcaaatgtctcttcagtcttctaggggccacacgaaataattattttggatcttttcatgagtcttagtctcaagattttccttcatgcatagcatgtacggcagggcccttgtcctgccacactctgcccctcctctgggatctctcttcccttccctgctgtggctcttcctgcacctcttgttctgagcttaactctggcttctccaggctgccctctctaagcccccagaatcctcgccacatctcactcaagtcaagtaggaaggcttcaaagtcaccatggctttgccctgatgctggcagctcgcagctccccacaaggagccctcactctgaaaaagtcagcctgcaacaacagtacagtagtctgcacctgcatgaaatgagaatgccatgttactttctgatatattcatcaggaaaaaacatttgaaagtcacagcaacacatgttcccttttctgcacattttaaccaagaccttgtccccacaaaaagcacaccatctaaaaccttcctatgcagagtgtggttcacacaccaccagcatggcattgccccagcacttgtcagaaaggcagagtcccaggccccaccccagcccaactgaatcagaacctgcattttaaccagcccccaggtgatgcatgttaaaatttgagaagcccagacctcagatacatacatccacctgcacaggagcacacctatacaagcacatgcacacttcaggtaggagctgggggagatttgtgccacctgcctccttaccttctttgtgaaaagcacagaaaggagctgtagcctctgcttcatctctggagcctcccattgagaagcatgatttctataaggcaatgtaccatgaatagaagcaatgtaccatgaaaggggcatttgcctctagagtcttccataggatgggaaaggaggagatgccaaggagagaaggtgtcgtgggagaaatgaggccttggagctttgctctgcagcagtgtttccaatccactcccttcctggcacctgtcttgccctcagcctctcctgttcactgttggctgaggagcccacttccctcagtggcatcagatggagggaaataccttcagggcctctttcaagcagcattgtcacttggggacatgtggacttcctggtgacactgtcctttgatcagagccagtctttctgcccaactctgtggttttggtcacccaggggaggcgtcaccttctccataaggcactcactgggtccgttccccaaccctgcttggttcttgcactgggctttgcagccaggaggagagagccctgtgctcagcgccctccccaggcacaccccgcccactccctgtgtgctggggcgtgaggatgcctgggcggttgtgtgcataacgatgttcttcttttctccctctccaatgctaacccgtcggaactaacagcaagcattcagaatgagcgtaagtgccctgtgtgcctctctgtgcctctgggagttgggagggaggaatgaggcatgaggtgatacctggggattagtggcctgctgggacttctgctggggcctcttcataccagagccctgtagtgaggtatcttactgcgggggaaggaaggaggcttgcctgcagcattctcttgctgggaaagacagaagggcacgtggtaagaagagggtcattggatcgaagctcatgtgcaccacagctgtttccccatcctccagtggctggcacaggaccccagggtagcacactggcacttgggacctagaaggggaggatctgggaagttcttggggactgaaggccctctctgctctagcctcaccatagtttggccgtttgttgagcctccagggctcagaaccaccatgacccctaagttctgaaaatctagctgctttttcttcctttattcattcaacagacatttatcaaaaactattgtgcactgtatgttgtgctaggcattgtaaggtaaggatgagtaaactaaaagtctggccttcagtttctcctcgggatgctatgggatttttttttttttttttttatggagtctcgctctatcgcccaggctggagtacagcagcacaatctgggttcactgcagcctcagcctcctggattcaagtgattctcctgcctcagcctcccgagtagctggggttataggtgctcaccaccatgcccggctaattttttttttttttttttttttacttttagtagagatggggttttaccatgttggccaggctggtcttgaactcctgacctcagaaaatccatccgcctcagcctctcaaagtgctgggattacaggtgtgagccaccatgcctggcctatgggattttttttttttttttaaaacagaatatcgctctgtcgcccaggctggagtgcggtggtgcgatctcggctcactgcaagctccgcttcctgggttcttgtcattctcctgcctcagcctcccgagtagctgggactacaggcaccctccaccacgcccggctaattttttgtattttttagtagagacggggtttcaccgtgttagccaggatggtctcgatctcctgacctcgtgatcggcctgcttctgcctcccaaagtgctaggattacaagcgtgagccaccacgcctggctgcctatgggatctttttaaagggattcttcttatgcttaatctttgacacccaccttctttcctgcggcaccatttaaggagctgggtctctagaatggggccctgttcaccgccccccacaccccacccacttgcctgcttgcatgtgtggcttctgaagctcttcatctcagctgttccccaagctggaccccagggaggtccctgcagccctgaccatgctccctgtgcactgttgcagtgacgcagccgccaaccatcaccaagcagtcagcgaaggatcacatcgtggacccccgtgataacatcctgattgagtgtgaagcaaaagggaaccctgcccccaggtgagtgaaggggaaaaagagtgcattgaaaccacccgcttgcctctgggcctgatgataactaaggcaaatgaggcagcaggaaaattggactcatccattccaaaaaatttccattaggcacctactaggtggaaggcataattgaggtaccaggaaattttgccggtaagcaaactggagaccagaaaacaagtggcttaagttcacaccaaaagccaggactggatgttcagttttctgactttccgtataacattctttcctccacgctgtgttcccatcatctgccccacgtttagcttataggaagttccttttccaagccaacttgagtctttcattctgagcttgcctctacctgtttatgtgctcattaagaccaagtaagatgtcaacagacatgaattaaaagcctgttgtgtgtgtgtccgggctctgtgttaggttctgttactcacgttttgttcgaccacctaacagtgctctggggaaggaccgatgtccttatgaagaggaggggaaaaggggtacaaaggtccaaggttacccagcttgaaaggggcagaacccagatttaaactcatgcatttctaccaaatgataagcatcggagacatgacagacgttattatctgcccccatccccatcctcaaagtagcatctacagactgagcctttcaggagcctcatgcaagattcagacccgtatgtgacaggaccacatctagggtgtgtctgtcagcaggagaaatgaggccaagcagaggcagccaggtatgcagcagctttattctggcctcctgggttcacacaagacagtctcaaacccagagctctgagcctgggaaccagcagggactctctcgctggccgtgggagtcaccctgaagggttagtcagggtaatggtaacctcacttgcttctgaggtttggtctttcccccatggttcctttgcagagacaataatcctgtggcactgagcagcccctgctgttccagctgctcctgctttccctgcttcttttacaagttagattgtgggcatctgaggatgtgaggccttggctgcagctcccaggaggagcagagggggccattctagtgctcttcaccagtggctcagttctactaggctgccatttctttaaaagctgccactgtttttttgtttgtttgtttgttttttctaattgagacggagtctcgctctatcccccagactggagtgcagtggtgcgatcttggctcactgcaagctccacttcccgggttcatgccattctcctgcctcagccctcccaagtagctgggactacaggcacccgccaccacacccggctaattttttgtatttttagtaggacggggtttcaccgagttagccaggatggtctcgatctcctgacctcgtgatccacccacctcagcctcccaaagtactgggattacaggcgtgagccaccgcgcccggccaaaagctgccactcttgggctacagggtgtggtcactgctatataatctgtactcactgagcagggcacaagtaacctaagccgtttcactttggctttaaaatggattgtaaaattaaggtggcaggaggagcagagccaactccctgaagtatttaggttgggtggaatatgaattcaagtttgcattcctagtagaaggttggaaatgtcctggggtggaagaagccacagattctagattctagaaatgaaaatctctcctcaataacgtgtttaacataacccccgagtagctacttcagtatctaacacttagagccacgagtcccagtcttaggtgggtagaaatactaacgtcaggcccctgccctggacagtcacttgggtgggacctgggactttgcattttattgagctctccagatggttcttctgctcagccaggctgagacctgttggtatggggtgccacgatgggactgagagagggaattttggtactgagccagggactagggatctgagatctgcctggagcccagagcccaccccattcgtcttggttgccactgctccccactctccacagcttccactggacacgaaacagcagattcttcaacatcgccaaggacccccgggtgtccatgaggaggaggtctgggaccctggtgattgacttccgcagtggcgggcggccggaggaatatgagggggaatatcagtgcttcgcccgcaacaaatttggcacggccctgtccaataggatccgcctgcaggtgtctagtgagtagcgtggggcagggctgaaatgccctgctcctgggtaaatggagagtggggggtgtggaaggccattccagaagggctgcccctgcccttggcctgcagttgccttggtgttctctatgcatcttccccacctcagaatgattccctggaaaggaagctcccaaagcttccttttgaagttgttgtctgcaacaatttcactggccactgcgggcacaggagacgggaaaggaggggagccttgaagatgcctcccttctcctgcctctcaagggcggccccttgagtaggctcacgtgccccgtccctctctcttgctccctccttctccaggtgccccttctgtttctcctccttgcatgcctgcctctgaccctgctccttgccccgggcccagccatcaccctcactttatcctctttgtccacttctctccagaatctcctctgtggcccaaggaaaacctagaccctgtcgtggtccaagagggcgctcctttgacgctccagtgcaaccccccgcctggacttccatccccggtcatcttctggatgagcagctgtgagtcttgggggcctggtgttgtgtttatatcttaaccttagggggtggggtgggtgtgttaagtggggaggggcttgcccaagctagaaggccttgatttgtgagaggcaggtgcaatgtggcaaccaggctgagaacacaggctctgcagagagaggctgcttgggcttattttctagcctggctgctgtgtgatcttgagcaagtgtgatcttgagcaaattgcttacatctctgggcctcagtttcctcttctggaaaaaaacagagctaatcatagtacttatctaataggattattataagaataaatgagtcaatacgtccaaagtgcttagaacagggccagacacacagtaagcacttggaaacatgataatgaaaatgaagagcaagacagaagggattaggggagaagaggagaaatggtttttccaattggccaattgaaagtggttgataccaaaccacctctttcaattattggccggtctggatttattctgattcgctcttctggtaggaggaagggtgaatggggaattgcaacctttcataaaggagtgatggggagatagggtatctgcagcagggacagagtagcatcattcagcgattgttctggctcaattttgaactgagcctcattcatcctctccggacctcagtttcttcccatgttttcaatttaaataaaagcagaagcattaatagaggtaaatcgaaaactgctatctctctgtgtgtccttctggcttcctgtcctccctcccttcccgcctacctgtctgcctcctctccccctccttccatccctcctttcccatctatccagccatccatcaacctatatctccacctacgtacctgccagtcatccatccttctatccatccctgaattcttagcagcctactttgaaaagaggctgccctgttgatgaggcagcattgtaagttattttgcaggttgaggatggctttgtgctcaatcactgtctctctcttcccccatcacagtgcacatttatggggaaggctgcctggccacaggctgctggcctcacttgttaattcacagttcaacttctcctctctcatctctcccacatcacattcaccatcaagttgtgttcactctgcctcccaagtagatcttagacccttgtcttctttctgtcctcactgacatctccccagccccggccaccatcagtttttccctgggttacaagaattatccataacaggcctccctggtctttctaaaaatgtgatacttaattgatagtttcattcatctgcttaaagcccttcactggctcctccatcacctcaaaataatggtccagatccctttccctggcacccagtcccattccagatctggccctctgcctctccagcccttgtctcccctcatccccttacaccactgagtggactatgtactcttagcctttatcacacactcttccagctccttagaaacctcagctcccctgtcttttctcctggtataagatatgcaggcttcaaggctcagcttaggaccccctagaatgcactgggttcttttttgcagttaatccccttctaactggtgtgttctgctcgccacgctgcattgcaattgtttatttatctgctgcctcttctactaaactggaagttatttgagggcagtaacagtcttgcccaacctttcaccagcacctagcacagtgcctggcacatagtaggcctacagtaaatcaggaatggtttgaagagctgaccagcccattatggggaagttggcatcattaaccttgtgctttaagaaatggtgacttaaaaaacaattgtggggataggaaggagacagctgtgagtagtcagctttaggtatattctaactaacctaacagcctggaaacctggtcttttgggtttacatcagatatagcacttgaaaaaaaaaagaaaagaaaatatagtcaacattttcagccactccagttatatcattaatcagacattttcatattttaacatctctaaaattgaaatcagatttaacatctcttaaaactgatgatgtacatcattgattggtatatatcttacagttataatcagtagtgctttcttcttaggaataaaaaacaaaggtatacattataattgatgattacatttttgttaaatgcagcaaagccaagttcaatttcatttaattcagcaaactgttgagtgactcctatatgccgagtcctaagacaggtgctggggcataagatgaacagatcatggtccctggcctctgagtgctgtcgctgctagcttgagaatttgaaccttggggagtacctgaaggtttgtgttccttctgctggtcccacagccggtgagatcttttgtggcgtgaacaggaaagagaaaagtgtggtcatagaacatggacatggtgggcaggcaggtctgcatctaaaatcctgctctcctctctgcctttgcaatgctggacacattacatcctctgctttctgatctgtaaaatgggaataagccatacttcagagttgagaggattagaccaagtaatgtcaagctcctggtcgccacctgaccctctgtaaagtgttctgtcgccaggactgcggtggtgatgattactgttattactactaacctgctgccgtacctctgctttcttatagccatggagcccatcacccaagacaaacgtgtctctcagggccataacggagacctatacttctccaacgtgatgctgcaggacatgcagaccgactacagttgtaacgcccgcttccacttcacccacaccatccagcagaagaaccctttcaccctcaaggtcctcaccagtaagtgaaggcccctgtcccggggctgggggccaaagaaagaagcccactgatcccacccagccctaggtacctgagtctatagggggagacttgtccttgaggctgacctagaaatccttccagctcatggtgcctgagccacttcagctgctcttaaacgatctctcttgattgtgaaaccttgagttaaacttggtcctactctaagtcaatcctcctcaaattctggtgggaatcagaatcaccttagaacctggcagcgtacccagaaccagcctatcgtacctcaacagccctgagcctctttgttctttatgagccctccaggtaattcaagtgcaccccagagtttgagaaccactgcttccagtggtcatctagaacccctctccggacacagcttgattatttcttttatttcttctcattgcttggttatctttatttgtataagaaacccatagcagaaaatatgaaaattagtggagacaccaaaataaattttatttgattctgtaatatgtatatgctgaaccatatggaatcgctatgtttgtaagttgcaggcttatgtttgagttttatttgttttcgtttctattccctgattctgtttggctggtacaaaagcaaatcagcatttcccgacccattatagtgttggtggctctcccttgaggagagagagaagcttagtcagaaatgttcttcttggcaaggacgaggcagcctagagcttttgctgcaaagtctcagcccactcaggacgttggaagttgtctatgttgatgtacaccatggatttgtaacacgccttccataaaggagccccccaaaaaacagaccttagtctgactcatgctgtgagtgttgtttctgatgctctggacagtgaggattgttggggaggccagtagagagcaccatgtgggtgctggcagtttgcaaaggtcagaaaaaataggctgaccctggcttcctggagcccctgcagaggtggtgaacaatggctccccgggtgggtgtgggtcaggagaggttcaggtgagatcacttctcattcaggacaggtagggggtgtgaccattatcgttctcttccttcctccctatccctgctgatggcagaggctggtggtcctgagagccaacacagccccatgctccatttccaccatggcacagaggtggatccaaaaggaagcagcttccttttctcttccccttctcatgtttttttttttctttcaccttttcattttcttcctttttctttttcacttccttctttatttctcctccctctttctttttctttcttcttttccatctctctgttctgtcttggaactccattctgccctcctctaatcatcgcctcctgccttgcagtgtccccacacactgatctgtgttggtgctgggctgccaaaggtggtagccggcaggttgcctgacacctgcagcaagcccctcgagttcctggcagggtgacctggcttcactccagttgctcccccgtccctgactttctcattcctgacccaagcccagggagaccccttggaggagaaagttggtttgtctgcagtgtctcctcagtccacatcagggtgactgcctgccagctggctgggctgggaaggacagtgtagtctgcccaggacctcggagtggcctcagcagccaggacaggactaacagcattggcagggggaggagcagggatgtcaagaacaagataacatgctcgctgagctgagcctggacagccatcagcatcaccaccagggcccctctctccttgcccagacgacgctagaaatcggcctgctgcttttggaactgagtcagttgaccttctgtcatcctgggcagagcccatcactgtcacacagagtagagcagaggccaagagactgaggtggtgaagagtcttcctctgtagaattaactaacttcctctgcagttagagatttaaacaacatgtagaacttggactttccagaaacactcttctctaccagaagaagtaagggatgtttgttaattcttcatttctaggtcctctattccactgaaaactctttcctccgaatggcgagagaccccctaggtgattggaacagagccccatcagcttcctggagttctcccaggggcagctctggctgggagcaagttctgggcatctgagccagcccagaattgggcacacttgcttaaaatagcacagtggtgctctctctactttcctgtctggagaggacacaggctttctcttgtaccttcagaaccaggtctggggtgggaggcaaagcagtcaggcaggggcagcttcaaaggccctattctcaccaggcactcctgtcacagtttgcccatttgggaagaaataaatctcatcatgtcccatttttattacctgcattgaaggaagttgacaatggtatgtaatgcaaaatactgggtaatctgaaatcatttttaaaacctgggatgcagtcaaagataagcagtggagttgggctacagagctgggcccgtcccactctgcctatgctgtaacaggtgctgggtgcctcctgatgcaataagaggcaactgtggtaagcgaggagggtcctccctaaggcagacaccagggcacaccccttcttcctccagtgtctaagtgacattcttggagcagtcaaagaagtttccgtgaatttctcacatgtgctccagaattcacaaaccacgaggtcagttctgggcgtgggctacttctctggagagagataggttacatttcacctggtgatatgggagcatgaaggaagggccctgtcatctgtatgtgccaccatccacccccaggagaggaacagagttgcctcccaagcccagctgcagcccccacctgcccttgggccaccccatctcttcgttacattgtggatttattcctgcctttagctccagatggacccaagcagacttcccaaacaggctgggtctttacaacaaaccccatcttaagagagagttctgaataatgaaaatcttcctaccaggtggcaagcagatttgggatgcaatgcaatgccagtcccagaaaaggactctcatacttcttgcaactagttgtaatgggattggatctgtcgacaaatatgcaaatgttttggcagagcccctgttgtccctcgagcagttggaccatgttcttgcctcctcagggccatctgcttggcttccagtcagctgtataccccacccccttttagtactgtcacaatttgaacccagttgctggaagggaccagaggtagagagggaaaagctccttcaggacgctggcgtgatgatgtgtcctcttctgaaatgtctttctcattaaggagtaaatgcccacgagtttgaattacctaacattggaactgaagccactgatcttgctccataaggaatgtcttcaatcctgcatagtctagagagcttcgaacctccagaacgttcaggaggactttcctagtctgaaatgtagaactcacagcttgcactttctcctgtcccaagctccaattctaaattctaaagcctgaacctcagggatgttctccccacctcactgaacctctcccggcatcctcacaaggagggctttctgccaacagagacatctccaagatcatagtggtgcccacctgggcagactccagtgacacatgttgctgggtgtggccagggccccttggcccaactcttttggtcaatgacctcctcccatttaccaccaacctcctgcagcttagcttctgcccaggcagcactttgctcttccccggagctcactaacactcctttctctttagctgctccaagagctagcctgacccagagtcctgggaactgaggattttgataagaaggagttgttcaaaagatggctacaggacaccactaatccttctctcatttgtttgaaaatatagcaggaccaattaattaaagttcaaacctaatttctttaattttaaaaaaaccattactgtattattgccttcttttgcaggatttaacctttttttctccttttgtgggctgttttgtgttgcttgttcttcactgagcgtattgcctttccaaatatgccgtgtctttcctttgcaaaagaccactgctgccctcctcagttgtttttctggctttgcatttgttttctctccccgtttatgcctctgtgacttctccgtggcctcctgtttgctcaccctcttttgtttgttacagaccacccttataatgactcgtccttaagaaaccaccctgacatgtacagtggtgagtcgcagcggtaaccttgggagtaaccttgcctgtgctaaccccagtttgcctaacttgactgataccacgtcattaactcctgctgggtggcagctggcccagccagggtgccaaggtgacacctccagaaggctgcctgccaggaggcagtgtgggggtttgaggtggctcacctggtggtgtggtctcctctaacaggcatgcctcaagttgctgaattctcaacaagttgttcaaaccagggtaggacttcaaaagaacttcttgaaaagcaggaacttttactgaaaaagtagaagcttaggaatcaagaatggatgaagggagactatcttaaaataggtgagttccatagtgaagagaaaacaggaagtctggttcctattggtagttgaaagaacacagaaagcttgttagtatgttcagttaactctagataggaattgcctgctttgtaatctcaccttagttaccgggagtaccatttcacagtgaggtcccgtgtctctttaaaatccatctgggcaataggagtaagagtccagctctgagttctctttcaagatgagtataaatgaggtgaaaccatccaccgtaccctctcacctaggcctctctcctcctttggtagtatatgcaaatcaaatgcccaccagtccacacttgcgagacatggaacaattacaatgaggcatggttttaactcatgacacagctggttgctcagtctgattaatagggtaattggctatttccacacctgagttacccctcaccatggctcaagaatgtcttattttccctgagcagccagaggcaccatcatttgctggctctggtgaggcagctggcccccatcattagttatgcctcagaagctgaggctgcaggtcctcaagggacctcactgtgggctgaaacagataggaagtgtctgcactgtgatgtgctaatacaaaggatgatgagtgactggagaaggggatgggatgagggagcgcgagccagggagagaggcaaaggctctaacttggcaccaagcagctagaaccacactgagatcctgccaaagagattcactacccaaggaatcaggggacctttgttggattctaagcattgtttgttttcaagataatggggccaactactattgtgttaagagccccagagccctggtatggaatgggccttgttctaaatcggattccaggtaatctgttataggaagtattctgtaagcctgagtgcatcagagccagaagttcccttagagaccatctggtctaagttcctcactttatgtaagataagccatacaggggaacgtacacatagagttgttttatcaatggaataagtttgagtgattccagtcacttaaaccagtttgtgaccattgatcaaactattattgcaagagaatgagtgggacttatgagatccatccaggactatgaaacaagcaaagcttacaagagtttacctggagattgaccccttgtcctcaatccagggtaggacggagctgacccaagtatgaagctgctggaaaggatataaagtcaaagggagacacattttgaacaaaagacaactaggctgatgcttctagcaagaaatcaaagggaaatggaaggaaggaggatgacttctttctggagtgcaggcatctggacagagagacttgatgaaaagtgcccagggcatctgtctgtttggctctgaaatatggcacgtctcttttgtagcaggagggccaccccatacttctattttgttttagtgatttctagagtggattggtatcctctgaacactgctaggtgccccctgacctgctgagtggcaggagaatctggtctgagattgtaacttgccgcttaggattcagccaggtgaggagaccaagtggttaagagtgtgtgctctgaggtagactgccttgaattaaatccagggtccgggacataccattgagtgatgctgagtaagtcatttagtgtctcagaactttaatgttctcatttgccaaatggatgtattacctgtctcataggattgttgtgaagattaaacaggagaatgtgcttatggttcctagtatgtgttgggcacattctcgatacttaacaagtgttacccattactggttttaaagggaatggtttagtgttgactgtatcctggatagttcttctatgcttctgaaattaagaaggacagacagaacttaaagagaagccaaggggcaaaaagcaggtgcaattataggaagaaagtaccatagagggagaaattgtagggcagaccagagaaacaaaagctgttcaaatcctcagctgtgctgagaactgcataagaagaaaagctccaactactgcatatgaggtttgggttaaacttacaggagaaatttcctggtactgaaaggtatcaaatattactagacaaagagtttttcctatcttctggggttgtttggtcagccattcctagagcaagagaggtgaatgagatgccaagaatctggccccatgagtctctggttctcagttctgagaatcgaaagcagcaaagtggtctggatgagggatacagatgcccctaaaagctgtttttggtagaggtcctcagatacgtctgattcattgaactttcttgtcctgctaacacatagcacttgacagaggggggcaactaaggttgtcaggagtcttgatgtttcctcaaaagagatgatcaagaggcatttatcgttggacctttaaggccaacatggttgaggcattgtcatctcctgttgtctgctagctgaccatatttccccagaaacccatggacccactctgagccacagcttacgagagcaggagaggactgactgtccctgggcaagaagtcaaatgagctggcgagggaagctcttcctgaatccacacagatatgagctttagcgtatggactctgagtttgatcaggcattaggtcagaccccactctgaagatcagggcgaataaccaatactctccagggatccctgcctccatgatgaaagagggtgtcccatgataagatgagacagtcatctgccaccatttagagtttcatctagtaatcactgttgtcttagagtcttcctgtctctacttctccagggaaggaaattaggcaccctctttgagaacagtggctctcaaagccaccagctctagtatccttcctagattttcatatgagttcctcctgctgcaattgactgcatttcttcataacctttcctttagggccagccatctcattccttaatgatattatgtcccccaaatcttcttcaagttttccatgcctttaagaatccaactgaggtgcctttagagctgctgaattccctcctcagcttctttttctccaccttgggcccgagttttttttaatagccactgaggagaggtgggatcttagctgagacagtgagaatagtaaaacatagtggaagagtttcaccagagcagctcactaagacagaaatatctttctcctttacctcttttgcccttgcattttctttggtttgaataagaaagatattcctgaagctgactgtcagaagtaggaacaagtgggatgcccatctttagacagagaggcaatgtagagtgggtggaaagcacacgtttttggtgctaaatggcacagaatccaaaacataactagcttggaaccttgggcaagtctgttgacttcactgagcctcagttgcctctgctgaaaatggggatacaaccctccaggtttgctgtgaggattaagcataaatggtggtgtggatggagctgtcagcacagtgcatggtccctagcaaacgttcactgaatggtggccctgattatgacctccaacttttaggatgctcttctctttttttgaactttggcttgtttccagtagcttctccttctttaggataattctattgttgctagcccacatcctacaaatgcaatattgctgtaacctctttatagtcacagctacagtgtgtcaaggcacccacagcagaactctgtgctaaattttcctccttcccatcattattgctttgctgggttgtgcgtgctggtggtgtcgcgcgttatggtgtaaattaaacgtccatagggtcacagattggtttctgcagatttcctcccagtgtggaaggagtatgacgacttagctgggacctacctcttccacagaatcccagggttcccagctcttgacggattcaccaacctgacaacagagccttctgccctagaatctcctttcctcatagtgcccatgtgtcttggttgttttggtgattccgtgatggtgggtgggaggaagctgttggtgtcaggcttccttggtgctgagaattggatgctacaagagttatagacatagatgataaccaattaaccacataatggattaaccccttcagtagtcactgttgtaatgtgtgtgctggtgggacagatgaggcatctacagaaagagaaataatatgggttaaactgctgccttattttttgttctcttcttcccctccaatccattcaccttataaaccttcattgagcatttgctgtatgccgtgtattgtatcatcagcctcgttaccctctgcatatgtttcatcctttcttcttttgacaaaaagataaaatagaagcaaactctatgaattgcactccaccagtgccgagggagagagttgagtgccccagaacaggagccccgccggtgcagccaggccccagcaaacccagcaagctcctttaggaagcaccagttacatctggataaagttcccccgcactctctcctcacgctaccagcaccgattaaaccctggataagtgtcttcatcctcaccccaggtgtctctgaggcctcccagctcctggcagctctgcctcccctccacctttcccttgtcctgctgagtctaagaccccattaaacccatgggtgggctcagcttctatttttgtttttagccattcctatgtacgatcgtacaccttggccagggggtacttcctccagtttcccttttgccttggggtttctggatggaaaattctcgttcttttcccttccatcttacccattcccctagagctatacaaagagctctgggggaagaggtgaggctcggggaaggtggaattcactctgtcatgggtgggcccatgctggcacaacccttctacagggaaacagccatcctgaaaatgccaatctctgtgagccacctggccttcaagacctgcatgaatctcattgatttcagacccatgactgttccggcctagttgcattatagatcatcacctcctccaacttggcggccacttttctcccaccccctccccgagcagctcacatgtaattactactctcctccccagctgtcttcccgagtcattagtgaggaggcagaatggtcttggccccggagtgatttcctgtcatctctgttcattaactctctccatgtctttgctaagccattaataactctccctgcatttctgattgattgtgcgggctttgtgactccatcccagcaccttgttttcagggtcctaaagagcaggttgtctgtcctgtggacccagtacatgccttctctgcttccagatccctgcctggggagaaggaccgctgctgagatggcctgccctgggggccacacagtggcctctgggatcccaacacaagctgctctggagtagatctcgcactgctcagacagcccctccccgttccagggaaggggagattccctgaacctgagggaagctgggctcctccaggcagatcctttcagaacctagagctcctctctctcatgtaggtggggctgaggagccctgggcttcctaacacacctcacttaatgatgcccaagtccttgggatggtttcagctgggaggatccggcaggggcggtgatgccacttctctctagcctgacagcgttggcctagtggggtctgccttctggaaggaggctcatgggagtttgttctctcctgtttcagcccgaggagttgcagaaagaacaccaagcttcatgtatccccagggcaccgcgagcagccagatggtgcttcgtggcatggacctcctgctggaatgcatcgcctccggggtgtatgtgcggtttgcagcccctcttctagccaccctccaggaggatggggatgggagcttgttcatgctcttgttaatgccacatttagtgcataccagtagcacagcaaaaagagaagcaaacagcctctagtgagcagggtgttgcaaaccatagtcatctccatcctatcctggccatctctgttttggataatgaggaaagaaggtgattaggcatcccgtagatgcgttagaatctcgtgggaccttagctaagccttcaggctctctgtggctgagcatcctcctctgcacaggaaagatcagcttttagaggacatgcatcctcctgggcccaagtatacttttaggccacctgggtgtccccagctgtatagaagaggagaaaggccacgtttagtgataacttgtttcctgcttggcgcctctcctagcccaacaccagacatcgcatggtacaagaaaggtggggacctcccatctgataaggccaagtttgagaactttaataaggccctgcgtatcacaaatgtctctgaggaagactccggggagtatttctgcctggcctccaacaagatgggcagcatccggcacacgatctcggtgagagtaaagggtacgttgtgtgtatttatcattatgattatgttgccaaccctgaacaccatgcccacccttccctctgagggtggttgggggcagagtgagtcggagagacttccagcccactgctcagtggcaatggcgatctgccatggatggtgtcactcgctggacgtgagagggtgtgtgcatgcccgtgcatggggcagggggtgttaaggagatccaccctggccatcatccaactctccttggtgccagcgctccctcagcgggtgaatttcctcccacggcccatttggatcattcccagagcctttttttcctttcgttttgcattcccgtttgtgatgtgtcacgtgagcccgtgctgtctgtgtacctatgcatgatgctgtgctgctttttaaaactggggagtggtcatggccaaaattattttctaaaatcacttccttccccccaaagcaaagagggcccacccgagtgattgcaggcaccagagcacgtgtcgtcatgggtccccaccgtgtgtggcaggctgcactggtcactgtttggcctggggctgtatggatggttgagataatgatgttcgagaccagagtatagaaactttcttagcaggcagtcagttgatcttgtgaccttggcttcagcaccatacacaaactaaggagttcttagactttgaggggtagggggtgagtatcaagattgttgataatctgatctgaaaggctcacttctcagaaaaatccacatttccacatattcacaaaattgtctaaacaactgaacaaggtggccagctgagaactgctctagctgggcgtggtggctcatgcctgtaatcctagcactttgggaggccaaggtggaaagatcatgaggtcagaagatcgagaccatcctggccaaaatgatgaaaccccatctctactaaaaatacaaaaattagctgggcgtggtgggacatgcctgtaatctcagctactcaagaagctgaggcaggagaattgcttgaacctgggaggcggaagttgcagtgagccaagattgcgccactgcgccccagcctggcgacagagcaagactccatctcaaaaaaaaaaaaaaaaaaaaaaaaagaactactctaaccaaaattcagtgcctaaagaaatgttcattaggcttttcctaaatggtctgatcttgcaaaacagagatccagagggaccaactcagtgcccactttaccaccttccctagcagtggagccattggatgcacacctcaaacactggtgacctctaaaagcatctgccacccaggcctcctgtgaggattctgatttagtaggtctgagataggccctaacatccctttttttaaaaaaagctcttcaggggattctagtgagcagccccagtttagaactattgttctgtgaactcaaaatagacagatcagcatctgtgcagccaagccagccagaaacaggctggaccaagttatccctgtgaggatgagccctggggcaggtggtgagcacgtggtgctgggactcaggggctcctgccatactagagggagactgcttggtttcttctgcctgtcccatgccatctaactcccctgcctgtgtctgtcttgtcttccagctgctccctactggctggacgaacccaagaaccttattctggctcctggcgaggatgggagactggtgtgtcgagccaatggaaaccccaaacccactgtccagtggatggtgaatggggaacctttgcaatgtaagtagcgagctgttgtcccatctgactctcatctctctgctgtcaaaggcttcagatccccatcactgtagccagtgctggtcacactagaagttcaggaagagagaagcccactggtggctgtttctcagctgcccatctcttcagacatctcaagaggcaggaaacctaccctctctttgtgtgagagaacaggaggcctggaactctgtggtcatattcccatgcttaagggatttctgctcccttggggttttttaaatctctgctttctccctctgaacaacttcagagcccagttgatggcctggggactgtggctgcatctctgggtggttgggctttgagtgatggctggggctgggaaggtagaggagaattcagtaacccattgttggttactcaagttccgctctctgctaagggcaaaagaagaagcagggttgtacaataatgtgaaatattatggttagatatgaggaagaactgcccccagaagagcagatgtacaagtgcactttatcgagtatgcttagactttggggacatttagtcctgcccaggtggatggagtagatgactccaagaccccttataatcagtggccttggtcaagttttcacatcatagactctctggttgcattacttttcaaaatgtcctgtccttactttctctaagaggtcagaggaaatgtaaacaatggtatcaaccaaatggggaaaaagtagatggcgagaactcagtctaactcaagagcagcagctggtagaagcaggtggagagggggggacacaggtagaggagagggtaagaatttacctatttagacatatattgtatgccacattctgtgctagatgctgcactccattgttgctttactttcaaacatttaaggtaaggaaataaggttctcctcagtgcaatgagttgcccaaaatcgcatggctaggaagtggtgaagttgtgggttgctgtgagtctgcaatacaactgcaccagctagtactgaacctagttatccccagtaaatgttactccccagctacaagcagagatatggacactgcctgccctctacagttctctccgtcttaataggactttgggggtaagctaggcaattgcgctaaactttacagcaccattcaataaagcagctcaggacttgcagctgagcctcagccctggaaaggtcacctgtcactctccccagggaacgtgtaaggagagtgactggggggattattggttgcacgagaatttgccaggcaaggaggtgtacaagtttctggcattgccttccttggtcccttttcactgagtggggacccgggcgtggatgataagggtgctaactttgtcttcctttcccatctgctgattccccggttctgggctcaggctggctatctgtggagtggcgcctgcagggcgactcctgcatcctccgctgacttcccctgtaggtctgagtcatcttgaatgcgttcatgtactctgtaagctaagtcatcagcttcctagtccagaaatcttaggaaggaaagtcactttctagtggttaaagatgagaaaagtggcaattctttacatttctagaaaatttttgtttttacagctcattattgttctcttatcttagcctttcttagagtaggggaaaggtggaagtgattcttccccatcttacagaagaaggaaatgaggcccagaaaggtttgttgatttaccccagatcccagagtgaagtgtggacccccagccctctccagcctctgctctctgcatcccaagccagcagtactagaactgtgggcaagaatatcctctctcagtttaggacacatttttggggaagagctgtgagctttgtcaaataaaatgactcattccattttcaagaggcattggcttatgggtttaactttatgaatgtttggagcatgctctctttggaggatgggaaggtggtaggttctgtctattgtatactgttttgtccttttcaaaacacacttaaatatatgcacattcgattaaaatgataataacagtatgtgttagaccttctgttcatcattttgtacatgcataaaatctcaggttatcttcacaaaaaccccatgaggtgatctgttattcccattctgcagacaaggaaactgaagctcacagagattgaatgatgctggtaggaagtgatgtggttagaaccaaaactcctttctgtttccaaagctaatgctctcaaccacaactgcccaatgggtaggtaggtcgaacaggaattcatattccatactctaggctagattagaaataaaccccaaaggttcagagaagggctcaaggtcacacacagcccagcagtggcaaggccagaagccctgtcatctggccccccatctggtgctccccacagcaccccgcttgttcctgggagccctggccagagccccaagtgcccttcaccctgccctccccatctctcatgaggagcgtctctttcttgtctgtagcggcaccacctaacccaaaccgtgaggtggccggagacaccatcatcttccgggacacccagatcagcagcagggctgtgtaccagtgcaacacctccaacgagcatggctacctgctggccaacgcctttgtcagtgtgctgggtgagtgtgcccttcgcagcctgtttccccctcctctccactactgcacagtcgccctggggcttggttatgtcgtggggcacactttcttctccggggattggccaagctgggtgaggtaagaggatgttggataggggaaacatggagatgggaaaaaatttgtgagagggatggaagggtcaaagctgggaggaagttagcagatcatctggatcaacctcctcattgtacagatggaagacttaaaattcacaaagctggatgagcagacagttaattccatcagagcagtcaatcttagtcttctccctcccctgatgagatagagtgggactgtcccatcgccttggtgtatccatgttgacttcccctgggttcgcagctggatctcacggtgggaaatggttctgagtatatttgctgtacccgctgggcagggagatggtggtggaggggtagctaggaaatgccttagggctgtgatggggcagctatggaacctgctggataatttggggagaccctttgcaaaagctggatttggatgtagggtaggttgagggcagaggacgtagtaagcttctccttccccacctaatccttaggggcttcctgaaggagggaaggttgataggggaaggtgtctcagtgcctgggaagctgctgtaagcagaaggcatgcagaggtgagaccgagggggaagagatggaagagtttagacttggcactcgagattgcttctctgggaatttcagatgtgccgcctcggatgctgtcgccccggaaccagctcattcgagtgattctttacaaccggacgcggctggactgccctttctttgggtctcccatccccacactgcgatggtaagttccaggagatcaggccttccacagcaggggtcacctgtctcatcttctccttcccatctggcccatagtaggtgttcagcaagacctgggaatcttaaagggtcaaagctgggaggaagttagcagatcatctggatcaacctcctcattgtacagaatgggaaaccaagaccttgagagggatggaggcttgccagggccacctggtggctagaggcagaccctccgaggctcagggctccagtctcctagcatggggctccttccacagcccccatggtctctcttgattggctgctgcccctgcccttgggctggtcctgtctcaggatgctgtgtgttctgctgctctgttgtgaggtttaagaatgggcaaggaagcaacctggatggtggcaactaccatgtttatgagaacggcagtctggaaattaagatgatccgcaaagaggaccagggcatctacacctgtgtcgccaccaacatcctgggcaaagctgaaaaccaagtccgcctggaggtcaaaggtaaaggagagggttcgccagtgggagtttggagagggacaaggaggccatgctggcagttatccacatacaatattcacattgaaaatgcaccacacctgtctttaacctggagtgggctgcccagtttgcacctgtggagtccttttaggatcagtgtggtccaaagagaattaggaagggaaaccttctgctcacaccaactccccactaccagcccagaaattacatcatatattcctgagccagatggagtggatttggggcattatctgctttggggattacccacccagaactctgctccgttcataccatagcatactgtttgtgccccactccatagttggcccaaggcctcgagggcagacatatgccactttgtggccgcatggggatgctgggcagagaacaggccagtggcgagtgctctgggcttctccacagaccccaccaggatctaccggatgcccgaggaccaggtggccagaaggggcaccacggtgcagctggagtgtcgggtgaagcacgacccctccctgaaactcaccgtctcctggctgaaggatgacgagccgctctatattggaaacaggtttctcttcccccttcccccttcctagtgctagtttgaggcgcattttcttttcccttgctgttggtgacacatggaagaacacagggacagggaacccgtgtcatgcatgtcaccaaggagcttctgcagagggggtgatggcctgggcaactcccctgcttcaggggagacccccccaccgaccctgtacaacctccctctctcccaccagctccctgcttctctctcctacacctcctctctctccctcttctcaatctcttcacttctcctctccctgtctcccctcacttcgcctcttttccctttcatttttgcccctgtcttctcttttcctcctttgctgcatcccaggctccagcctttcagccctatttgcagtacccctaatcttcagcagagggcagggttgatctgagccagctctcagccctgactgaacctggcatgcttttaccacacccacgcctgccccgctcctcagaccctgatttcattggtgtagggtaggacttaggacactggcagggtttaaaagtccccctgggggttccagtgtgcatcagggttgagaaccactgttccgagcctccctccccagggcttactttgctttaccttcttccaccccgagggagcaaagttgtgcagggccctgcagttggacacggtaccagcggtttctagccatcatttgactttttgcagagggtgttcccctctgtaaaccttctggcactcagtgctgacagctctacagccccattctgctctgtggcctcccctctctataggagacagttcccaggagcctggggtcaggctggcctgagcatgggtgcagaggagacaagtctgggctgaagacagacaaagctacaagtatgagaggagaaggaataccaacctaccttggggtcatgggcctcatggtgccctcatctgggaggggtgcacagcacagtaaaggcacagaggcaggcacacgtacagaatttgaaggtggcaaacgtgcttcacagccacttgagctccgcccactctctgttcccctccatcaagtatgatgagtgctccaggtgactgtgaagacctcacctctgtcaaagcattgagagggagcctcatacccccagaaggagcttcccttgccctcctgactcgagaaccccctctagggagaaagcaatgggcaggactcagcactcccctaccccctcctcccaacccttcctcggtacctttgcaggatgaagaaggaagacgactccctgaccatctttggggtggcagagcgggaccagggcagttacacgtgtgtcgccagcaccgagctagaccaagacctggccaaggcctacctcaccgtgctaggtaactgcccatgctcaccctggcactgaccagccccaccccctccccagcagccagagaagcagtggcccggggcagttccgagggcagtgcctgcagtcaagtggccgggtcaggcgtggtgatctcttcttgcctcgtgatgtcagggttagggagctgccagtttcagaacaagctgtgctggacaggttacctcctgagtggagtcattaacttccccacgtctcaactgaaaggggcctgagtgatatagagaaagtggagaggggtttctcgttgtgatcattttacctttcttacagctaactccaccactaagtcaattaaaacaatccatccttaaagcaagactgagtttgtgtttgtgcttccaatgacctctgccagccttcctttccctcccgctccatccctgggttttggtagcgtttcatcacatgctatgcactaagcaagatgacgttgtgtcttcctgtcctgcacccaggctggactgtaaatactaagctaacccaaaccaagaggaaggaggcctctcccttccaggcaagcaggtcctctgtcacctctgcctccccgtgggtgccctactgccactagcattggcgcagtggagaggcacagttgcagagagggtgggcccagacacgatagtcacattgggatggtaaggaaacagaggtgccgcccccagctgtggaggaaacacagatggcctctataagggtaggggattccccatggaaggacggggacagccctgcctagaacacctcagcccagaggcagctgtttaagcctcggctgcctacccccatccttctagaacacctttaatgctggataacctgctaacctggataacccgtcttacctttgcagctgatcaggccactccaactaaccgtttggctgccctgcccaaaggtaattcccactaatcacagtcccctgccagtgccctctcttggcacccagggtgtggagtctgggagaaggaagccactttgggaaagggcgacagtgtgtaggtttgtgggcagcactcctggctacatgggacctcctttgagttgcccacgtccacctccccacggccctttgctgggcttcctgctccttacagggtgagctcggaagttctcggctgctgttttaccccatcccttgcctccatccacactcaccgctccctcagggtggcctgtcctcccagcagtctttcaggtcctgtttgcagggaatgcgaaagcctgctcccttcacatcacctggaaactcattgttcagcctccctgcatctattgctttctatccatttacaatctacacacacatgccacacatacgtgaacgtgggcctgtaggactcaccttccaagtccttctagtgaccatctgaaagatggaaatacctggttcagggagtcaagatggagagaaaatcttgcctacccgtaccactcagtagccgatgtctttatcccaggccaggatggcacttagacccactaaagcagtcccagtgagattcatgccctaaaaaaggtgctgccctcacccctgtttgcaagcctgctaggcttctgtcctgctgtccatcaatgaaatgcctaagccaagtctccatctcctccctggtctgatcccctctctttgttgcccccactcccctaacccatctgccatgttcagcaggccaagccctctcctgggttcccatctcctcagagccttggcacacaaagtagaggacaattaatgtgagaaaatgggacagaatcccacactccctcatcagccttcctaagtgtcgtgagcatgggtctgatgacgggtggcattcctgaatgcttgcactctcagaagatccaccaagacggaatggcgttggtcccagttctgtctgcataagcccctttatttccttgttccacacccattgatattctttgtgggggggggctgggatttcaggagtctcctctttgttttcccttgggcccctgtgggaagggagtggtccctgtgctcacccctcagggcaggctggggttggatccagctggtagcgaagacagcccgtcagggagctgtccagggctagggccatcacaagggtggacctgctctaactcaggaggcctgcgtggtgtcttctgccaccaggacggccagaccggccccgggacctggagctgaccgacctggccgagaggagcgtgcggctgacctggatccccggggatgctaacaacagccccatcacaggtagctcagggccttgcaccccaaagctggaaaagagggacggcaacacccttaaaccgaaggcctttcctggtttccagccccacttctgcctcgcttgatgtgtgtcctgggctaacctcagaatgtacagaggccttggtgtctcttcctgtgccttgggaagaattctccttgtgcctttgtgtgagagagattataaagatcaatggaagccaagaaggaagtgcttttaaagaagaccactgctaactgagctcccgaaacagctctgttttccttgcccactcagactacgtcgtccagtttgaagaagaccagttccaacctggggtctggcatgaccattccaagtaccccggcagcgttaactcagccgtcctccggctgtccccgtatgtcaactaccagttccgtgtcattgccatcaacgaggttgggagcagccaccccagcctcccatccgagcgctaccgaaccagtggagcacgtgagtacccgagggctgccagagaaggctccggaaccccgcaccccaaactcacactgagatccccccattcccagccatgtgaacttaggttacttaacttctccaaggcccggcctcatctgtgaggcagagagtaataataacacctacatcacagagctgttgtgaacatttgagaatgtgtgccaggtacttactatgatgcctggcatgtagtgagcacatgataaatgctaacttccatttttattattagtaattcttgattatctgctttaaaggggagagctgtggcaaagaggtacagcagaaatacataattcagtgtgagaaatatataaattggtattacatcagatttcttttcctaacactcttgggtaatatttggatttctgaaatcacaccagctcatagagggtagagatgctgcccaaaaaaaatgttaaatgccagggataagccagtctggtatgaaacacatttagtggataatccacaaaggagctaatccacattgagttggcttactgaccacccacagtgtggaaagccttatgataaatgctgtctggtaaaggattaaaattcagaagaaattagccctgctctgggagtttaaatctcagctcaaaaggcacatcatgcacagagtaagctcatttacataccagaccaagcgtatacatagatgccgaggaaagacagagcatagaacagacccatcaggtaggacagaggaaggttccttaccttgccctggaaaggcacaaattggacttgagcctgtgtctgtttgggttccagcccccgagtccaatcctggtgacgtgaagggagaggggaccagaaagaacaacatggagatcacgtggacggtaagaggccctcccagccccagtggagcagctcaccttgccgcatgcaccgggagcccctctcccttgatgccccgacactacgaggccatgatgtggttcagactctctggctggtcttggtggccattcttctttgagaaaccaagctcctctctgagttgggcatccagaaaccaaacaggacaaatgtctaagtgtaagatttcagagaggagacaggagcagaggggaccagggtccaccgactgccagtctagcaaaacgcatagaggatgcagcaaaatcaagcagacttctcttgaaggaggagggactggggttagactttagaaaagatctaagcacaacaccaaaccaagttctggtgtgtcctagggccctttcactggagatttgtgggagctggggagagaccaacatctgagatgtgtccagtacaggctttcttttggtccaagaatggactaggtcattccaaagactccctctggtcttagaaaatcccatcttcatgctggctcactgactacattttccaaaccaaaactggagtatgtggtctcaaaatgacttttttcccaaaccacttcccagtctgagaatgcaaacgcagccactgaaatattaacatttctgagcttctgccatgagtaatggaaactgggagatgcagtgtttgggatcatgaccttccctgtctttctgaaggctgctcccacagcagccttggccaaacagggcaacggcagctgggctgagcccagattcaggaccctggtctgtggctctgtatagcaggctccaagaggactgattcctgggccaggcccttagaaaataaagagcagaatcacacccatgtttaaagaactctgacctcttgggaaggacaggacagacacacacaaattcggtagaactaaagtccattctggaattttgagttcattagcaggagccatgctgtggttaaccacaactcatttcttctgactttggagaagtttaccttttgtctatattttgctttattggttgctcctgtcacaggaaggagttttgttgaaaataaaacctttgcacctacaaatgcgggtggctctcagagtcagagtaactgggtctcaggcgaagcctgtgtcacagaaaatctgcatgctgctgggttcacaggaccttgggcttttgggggactcactggggtgggggatatggtcttccctaccctgcaagggggcaggccagtgttgggcacatctggaagggatgcctggcacagcaagagagggcaagctgtgggtggatctgggcccctctctggcagcctctccagcctgtctgtccctctgcccagcccatgaatgccacctcggcctttggccccaacctgcgctacattgtcaagtggaggcggagagagactcgagaggcctggaacaacgtcacagtgtggggctctcgctacgtggtggggcagaccccagtctacgtgccctatgagatccgagtccaggctgaaaatgacttcgggaagggccctgagccagagtccgtcatcggttactccggagaagattgtgagtagtctcctccccgtccccccatcaggacccttgtggctaggtcgcacgaggccacgctcacaggccaggaaccttggggtgggtatgggaggacagccagttcccaggaaggaaaaatgttctgtagtgacctagagcagacaggcacccagtaatgtcaggagtggaaatatcatccgaacgtagttggaattactgaatgtcatcacccagtccagaattctcatttcacagatgtgaaaactgaggcccaaaaagggaaaaccctcggcagtgttccatagtcatcaatgtcagtcttgagaacagagcccaggtcttccgatcccctggcagtctgccttactgctaagccatactagtaccaagaaaaaacatcaggactacccatcctaaagagctataattagacacttctgtaggaagcagggcagctggccagaggttcccccggggaagccttgagggatcaggaggcctcctcagcaaccagacaggagcaccccagaccagcccctcctggtgctcccgctgcggctcccagccctgggaactgagcacagaaagagaaggtctttgggggctggcccctggtaaaacaacaagattctggtcatatacatggacatatatgcctggcttcccagacggtggtggcctctctgtccccagcacatcaatcctgtaggctgctaaacaaagcaggggtgtcggggagtcccctcctggttgagggcctttgcgccctgttgagtctgggtctgatcggagaagtgatcatgtaggtggatggagtgggcagaaggaagggaggagggacagtcttgagtgggggaacttagaaggagcagtcaagagtacggccagtggcattcctaacagtgagatggaggaagggagggctgggccctgggccccactttcccagaggtgattatggattggactcacaagggagatgagcagagagggtcagcaggtcctctgtccatcccactcctcacctccatggtggtgggcacttcagacaggagcccgatgggaccactggatggtaagtgcagaaagggtggcatctggtcatggattttatggaccagcccacagtttccattgcacgcttctaccctgcggcccacgctctgatggattagaagggacgaggcagagctgcttttgcggcagagtggagaaaacagggacaagaatcagttatgggggagggaggggccttccctttccaggtagtcgcagggtcagaatcacttcctgaactagattagggcatcttcaacctgtgggtaatgtttcctgccaggaaacagatgcattctcaaaaggaactatttataacgtgtggagagagttggagggaaaacggcaagatacgtgatccaccttaaaggctggcagcagcaggaagccattatgccactctgagcctccatggacggggatagatgagtccacagcaagcaaggaccgcccttaggagccatggccttaggtagaagagtacaaggctgtcaacctgtagcccagcaaagaggaacccaggggaattgatacccacccttcctcttctcctgccctggggcctcctgttggcacctgctattggttaaacccatctggaagcctgagaacaagggaaccccgctgataaggtccagcgagggcagccccccaggagacggagcagggtgaggaagggtggaggacaaaacgaaggggctgatggaaactacccagcacaggagggggcaaatgagtgccctctgaacatgtaggcagagtctcttccacctagactgccacccttttgtcctgagccttccccaccactttttcaagtactgtctcatggaggagatatggcccctgccctcatggaatgcccagtgttgagtggagtgcaggtacaggccagcagagaacaagtcagaagcaactgtagagtcctgcctgcataaccagctctctgtcccaacacattgcagatcccagggctgcgcccactgaagttaaagtccgagtcatgaacagcacagccatcagccttcagtggaaccgcgtctactccgacacggtccagggccagctcagagagtaccgagtgaggaagccagctccggactcacctaactacccagctcactaaccagggccaggggtagcaaatgcgggctataagatatttgaaagaaaccctagcgttgtttattgaatccagggttgactcaagaagataatgtctagggttagatgttcaaaaatatacccagaaaaaaaaattatatatatatgtgtgtgtgtgtgtatatatatatatgtgtgtgtgtgtatatatatacgcatatatatatatatatatatatatatatacacccagatgtgtccaacagatatgctgagagattctgctcagcagaaaatcacgtgaaaggtggtgggtttgggttggtgttgcatagcacgttgcgtttggaatacatgcgtgagtgggcacacatgtatcttcagagcagtgttgaggcaccgctgagctactcccctcccctctcccaatggcccctactgggctccttatctcctaagccacaactaacaggcaaagccactgaaagcatgcaaatgccctccctgttgtcgcagccaactccagataacccagtatatggactatcaaggctcttggcttctcttggtcctccctgcctgagagcagtttctgctctatcatccatcctcttcaaaagggtgagctcagatgggaagaagagagagagcacccagggtatacacggcgctcccttctgagtagcgctaattaaaagttggctggaaagtgagggaggcagtaactgtgattaatgcacgttctgtggcctcagaggtcatcaggagttggctgatggacagttggaggcagagcaagagaggctagtctcttcccaggaaatgaatttggccagtaggggaaagaaggcaacgtgatgtgtacacttgaatgagctcttccccacagatgacttgcacccttaacctacttgcttagagatttttctggctaaagcttccccatgggtccccctctaagtctggaccccttcctaccttgccacaggcagcctgggagacactggcgtggccaactgacctgtggcttcttacccactgctaattagagacttcttgttgcccaaactcattccactgccccctccaacaccaccatcttccatagctgtcccttcccatccaagctctgctaccatgcagcctggcatcccactgacttggacatgtgactgtctcatccctaaagatcttccaacaatatgaaaagaagtcattttacttcaaaggattaaatcaaccctttctcatattcagacttccgggggtaacttgctacctttcaactgctgcctgccgtcaatctaaaccatactaatccaattcaaggtgatgtggtctttgagcacagagtggagctttccatgcctggacccttggctcactatttttggttctggcacggactccctgagcaacctggtacccaccttggaaatcagtctcatgatggagcagctcagatgtaagtttggccaacttgctcattccccaaagacgtggcatggatcagaaaataattggaaccaaaacccttatttcttgtttaatataaattcatgttcaggagtggctaatgagcggggattaaaaggctgcttcctcagcctggataggactgatgaggtcatttgggacttggaggctgtagcaagcaaaggaaagaccggtcactaccaccaccactaacaactaacccagccctgcctgcctgacccctcaccagcctgcctctgtcccgaaggcctactactggagggagagcagcttgctgaagaacctgtgggtgtctcagaagagacagcaagccagcttccctggtgaccgcctccgtggcgtggtgtcccgcctcttcccctacagtaactacaagctggagatggttgtggtcaatgggagaggtgatgggcctcgcagtgagaccaaggagttcaccaccccggaaggaggtaggtctggcctgcagctcttcagggtggggcaggagaagggtggcacacaccttgggcctggagaaactccagcgtggctcagcatggatggcacaaggtgacttctgcgaggcctccaggagcggatgacctgcaagccgagccactacagccattcccagaccaccatcgccaaggtgacctgccctgcgaggaggttgtatctcaagagaagacctgtgaggtctgctgacataattccagacgggttatgcagactgatccccgagggcacggcgggcacctgggccaccccaccaccttccgaggcagaaggcagcacgtccatcctgactgcctggaaccatctgatttgtttgccagcacccaacaccttcacggttctccccccacgttctcaagaagccgtcactgaaatagtcggcctgtgtgtgcggtggctctgcagagggatacccaagtatagccccgccttctgcaggcctatggtttcacatggccctggggtcaaaacccctattttttgtttcacataaattcaagttcatgaattaacagatgactgcaaagttcctggttcatctccttgttcttgccagtcttcttttatctgctttgcatctgtttcatcctcctccgtttctcctccctccctctttaattgttattttccccatttttcctcttctcttcctcctgtcctctgttcttccctcttgttctctttatccctgtctttccctccccttggtttggttttcatcattggcctctccccaacactcccaccctcccacctcttccggatgttccaccctggctttctgtctccttacccctgaacccaacattctcagctcagaagcctgggcctgctgcctggacccagtgatgagaatccttatctgaggatagggaactgcagcctctgtacaaaacagctgtaagtggttctctacctaggaatggctctgcccaatttcgaggtatctttgcagaatcagagcctaacatgtgctgaatccagagtagttgctagaagaaaacctgatttacttcttcctctcttaaatagcagagtctgagctatgtttgtcctcagacctgaaggaaatagcatcctggatggggcaatgggctccggtcgtctcacggttctcccaggcttcagtttagcagtgtcgagcatgggggttgtccagaggtcaatgccttcatacttgtgctttgttttttgtgttttcctcatcctccctgccccctccccctcatctcccctgctctctcctccttccccaagtacccagtgcccctaggcgtttccgagtccggcagcccaacctggagacaatcaacctggaatgggatcatcctgagcatccaaatgggatcatgattggatacactctcaaatatgtggcctgtacgttctgcccttccctttctcttagataatctgggaaccagaaaccccattctcaccacttttcctaaggactcaaggtagaaagcctgtgggtgcagatggcattgtggagggatggaggggccaacgaaacagttcccaataggattaggggaggcagatgggactcaatccctgctctcctttcatagttctgcctgcagggagcttctagtctcactgatgagacaaagggacctccagtctaatgaagcagacagccatgcctttagggatcttttgtagtctccaacacgtacagagtctaggagagagagttcctcaagctctggagcttccacctgatggggtagatagtatactcacaggagtccacagtcaggacaccccttgacaagatgtcatttatgataaggcagctgcatgtagagctgcccggtgactgtggggtgacccgaatcaggagcctgggttggaaagaccccacctcaagagctcagcatcaccatgcagggacaggagtgccattacatttgaaacactttaggccttcaaaagtaggtaacgtacctcgttaggaaactcaaagagccaaatgttgtgttgttagcaattttaatagccaactctgtgcttgtatgctgttctgaattgatctctggaccagaccctttcaccctttgaggtccattgaataggcactttacaaaggaggcattaagaatcaaaaggcctagtggcgttgtcctagttctgtttgaaaggaagaaagaaagtgaagagttttgtccttgttgaaagggcttaagaatataaacggaatctttctgaatcagccacataactctgcagtgagctagagacaacaggatcagtgaagaaggattaaccctgggtgtaatcaaagagcccggagggagttcttgccgagtgttctgcctttgaaccaagcctttaagatcaccaggcaggtgccatcatttccctttccagcaaagtcaggaaagtgttcttcctccagcttgcagattatataacccatcaataaatgttgctaaagtttaattccacttacctctctctccccagttaacgggaccaaagtaggaaagcagatagtggaaaacttctctcccaatcagaccaagttcacggtgcaaagaacggaccccgtgtcacgctaccgctttaccctcagcgccaggacgcaggtgggctctggggaagccgtcacagaggagtcaccagcacccccgaatgaaggtaggtgcatggcagcagcccctggggtaaaaggtcccagctaattccgaggcctagagaaacactgagatctgtagctggctgcctgggatggagaggaaatgagacttgcaagtcctcaagccctcggaaggtgagaacccatcttatgtgtgagaggtaggtgctggcattgtatctggagctcagctctccttggaccactgtggtcacacctgggtccccacttgccctgacttgctcagtcacttgacatctatcatctttccttcttgtagaggaataaggaagagagcatgagttgagaaatgagagaaatcataatgaactccaaagaacagtgagtgttcacctcttgagggaggcaggaatatgattgtgagtgctcccatgagggctctggggacaaccttctttcttcgaaggcacatgggttcaaggaggtaggggaaaccgtcaggatgacgctgttactggcatcatgagtagagcagagaatgtggtccttccttgcagcctgaattggatgcgttgtcaggctgcagagaggaggaggagttaggaaacagccatttgccaagccagcttcacaaagagcaaatgagttcatcacctgggtccaggcgtcatctggcagcatttcagccccaccagagctgcacctgcctgaggactccactagagggggctccaggctcacccgcacacgcactggcatcaggggaatgtgcagtctgggacctctcgaggaggcaaggctgcaaaagcctcaatactggcacaccctctgggaaaggctggggacccccgtgtgtctccagagatacaatggtctattcaacagccatttcttgagtacccacaatgtgaggtgccagacactgccacacacaagggatatacaaaggtaacaagaagctcacaccatctagagggggagtcatctataagaatatctaattgcatgtctaaatgagggggcgcagtggctgggcagagaaggggattcagtcttcacgggaagactccagagaagaggtgatgtgagtgggcactctggaagctgacaagtcatcgtgtctggtgctttccacagaagggtcaggtcccgtggcctggcccaggcccagacggggtcttctgaataccacccctacccgcattccaggagagcatcagtgctgccttctctggggctaccaggcccgctgcgtcaccccgggatcccaggcagcttcacaagctgcccacatccttccccagcccaccactctagccagtagaccagcgctgaggcaggagaagaggggccaggcagaagcagagaaaggctgacagcccgctctgcatccctctctggtctcagaaaccaggagtgagtcacacaaccagctctccctcctgctgtgctcttctgcactctcccaagcccctgggcactcgggaagtttattagggcagggggacttaggttagtggctgatgtgtgtctgtcaccaaaggccaggccaggccaggccatgatgcactttcttgattactcaattctgcaaatagatagataaagagagccccttcttccctccctatgtgcaccccaatacagaacatcagataacaaagccctattgtccagccccagtaaccaccacagagaatgttctgcagccccaggggacaaaaggacaaatagaggcttttttcttaacttagggctttgcagaaaattcaagaatttcacttagggctctcagtccaaaaaaaaaaaaaaaagaaaaagaaagaaaaaagaaagggctctcagtccaaacttgggtttctaacttcataaagtccaactggaggggaagaattggagtgacggaataccaggagaggggctccaggctccatccttcaaagttcccgccttccaaggttgcgatggtgtggagtgggtgcagctgaacatgctccctctctcctatccatcccactattcagcatcttcccccaaagacaggaaccatccttttgactggagttggtgtcctcccacaccacctactccttatcccctcaattcctggcatcatggagcgtcacccagcctgctcaaaggtcatgccaacctagccagagcaggacatgctgttgaggacagagctgggaacataatgctctgagtggactgtccctgcagccaccttttagatgtccagtccttgaatcgaggtagaaacagtgtgttagaaaggtctccaaggcccaggtggaaaggtttctgtaggaacatgcctgactcaggtggagttgaccgtgaaccctgaatgccagttggcatcctcaggccagcagccagcacctggccacgccgtctgcataaggtttgggctggaaccttccctgctttccttgtcctgtggtctcacttgtgctctgttttctcttcccttttccatcctttctccctctgtctggccatcttgggcgctgtgttctgaagctactccaaccgcaggtaccgtaccagccgcggaggtaatgggcatggcatggggcagcgcaggcggagcccagcccagccagggcggacaaggagggagaggctcaggctgaaagcatgctccagactcaccctttcagtggttgggaagccagactgtcaagagggatgtgtgtggaggatgggaccagaggagagcaagcccactttccccccttcccaaactatttgccccctgctgagtaggagaatggctcagcaggggtcacacacacaccggccctgacctgctctctggagctgcagtttcattctgacactgagtagattacttcccgttaaccacctgagtccttgcctgggcttgacagctcagagcagtgtccccagctgtggccctagaaggcgcgctgcagcaggagcagggacagctggctcctggtggggctgccatctcctgaaagggtgaacatgctgtgcatgccagcttcgcatgctgcatgggggcccggcaccggctctgccagccaccacgggctctgctcagtgagaacaagcaagcatgtccatggatagggccaggtgctccagttcctggagtctcagcaggcaccgtgggctgattatctcctcacccttcagaaacccagcttttccaagtctttatcgttaagaacagtctccactctcggggtatgggaggtagatctacagtggactaaggtgctgggcagctctgggcttaggacctgctaatcaagttactcctctccagtcctcatgtcatgggtttgagggtcatcaaagggctcttcatcacagttggcctgtccccaggctggagaaacgaggcaggggaccccagggttcctttccaggccctcctctgagcctgaattacatcagatgggaaatgagaacaggattcaccctggcagagcaaaggctacaagcaagtgctcagcagagcctccttacatgccaggcagtggagggagggctgaggaccgggccaggaatctgagggttggcttatgaaggggatgccaccttgcccaattcgatttcctcctcgcctttgcttattcatccccacccccatcctaggttgattctatttctgttgcataccctgcttccttcagtttgtgtatgttttgcggccagatctgtggatggtgagctgccatcatccttccctctctccctcagtcctcaacattcacccaccaccccagtgcctccccacaaggtctgaacacccctgtgaagatgtgaggcagagaggtgatcccaggcctggggaacagggtgagagccatccttgccacactgggggcctccctgacttcctgcttgaagtttacgtaagtctctcccgtgacgaagaggaaacgcagggagggcaccaggcgaatcagctgcaagctcaatggggaagcagctccccgtccacctcccctgttctggcaccctgggacccaaggcaggtgggcctggtggcaggcagtctgtcttgttcagtgggcatctgtgccggcctgtgctgtccctctactgagtgggtgagaggtatctttgcaatcaccccacttcctacttcccatttagaaaagatctacactcatccagcatgagctcacggtctcaatcaaatgtttcctgggctccagcttccgtgtgacatggcagtggaggcagattgcacttttttggaaatgagatgtgctgataacatcagctgttctcagctttaaatgcgtaagaaccttctgcacaatgagcaggtgccaagcaacgaaactcgggttccatgtttctgacgtgggcctggcgtccggcccactgctgtcttccctctcgtcctctccaaacctgggcactatttccccaaactgccctgttcatctctcacccagtgaagataatccctctcatccacctgtatctgtagtctcttaggattgctgcccgtctgtctgacaatctgtgatttggccggggtagtcaacacgccatgtggacatttttggactaaaccttccaccttggaatgtaaggaagtgctgttctcttctttgacccagctcaggtctgcaaatgtttggtgggctcttgataggtgccctgttccgtggcaggttctgggacagaaagatgaatgacacatgtcatctctcctcagtgttctccatctcatgcatggtgctccctgaaacccacctggaaaacccttggccgcagccagggtgccttccagtgtgcattaggtcacaaacctgtgaggttgacgctgccatctaggaagggccttgtgcttccagccgaagcccactcaggatccccccttagctaacagagagtctctgcccgctgtccttggtcgccaggctgatggtctccactgagcactggccaggattgcttccaaacctgtagctcctattgcggcaggaaatgacatcctagcccagtcatgtgtctgcccagcctggtgctgctctgttggtaagccctacttctcagcttcgttgctcttctatcctctcctccacctcagccccaggggatgaaataatctgaatctccttagacctgagcagtggaaggttttccccatggaacacttgtcctcctctcgttcccacctgtactagccccctgacagctcactgcctgactcttctgcaccttccctcggaggcttttcttctttcctccaccctccctagctctctggaggccctgtcttgccttgggacaatagacacagctaatgagtgggtcggagatgtgccagcagtgaccttagccagctgaggttgtatcctctatggtaacttcaatggtgggagccccggggaggctgccggaaagtgacccctttcctctctctcatctcttgctccctcttactaagcctgagccagacaggaagcagctaggtagccatcatcagagaaaaatgcttcctttctgccacacttggcagaagtggccatcaggggaggggacaatgcagtgtagaaacatcttcagagccatctctcatccttacctctgcccagcagggccggtgaggaaaatgctgtcacctgggctctcttgacacctctgtcccccagctactcactggaacatcctgggaagtgtgtgcccccagctatggccctgttggggtatgagtgtgtgtgtgtctctgcgagtctgagggccacatgagagagtgtaaagctttggggaagactgacttggattctggggcctgggaaatgtagcaccactgcacctgtaggaagggaggcccaggctcctgcactacgcggtgtgatgattcaggttaaaagggagtgtttgcttttttgttttgttttgtttacttgaggcagagtctcgctctgtcgcccaggctagagtgcagtggcttgatctcggctcactgcaacctcctccaaagggagtgttttctaatgatgccttttagatagtcatgagaagggctaccttgtaagcatttgatttgtcagaaattattagaaaatatactattgataaggaactccggcaggtgcacactttgggaggctgaggctagagaattgcttgagcctgggagttcaagaccagcctgggttccatgacaaaaccccatctctacaagaaatacacaaattagccaagcatggtggacctgtagctggacctatagtcccagctactcaggaggctgaggtgggaggattgcttgagcctgggaggtcgaggctacagtaagccatgatcacaccactacactccagcctgggtgacagagcaagatcccgtctcaattaaaataaaaaaaatcagagcagtcctgcccaagtagacaaaataattgctccaggtctgtgccagcagcacagagcagcggaaagagcccatgtgtgtctatggccatgagagctgcagggagcaggcctgggagagaactgacctttgccccatgggtctctcaggctttcccatgtatgatgtgtgcacagtgtgtgtgtgtgtgtgtgtgtgtgtgtgtgtgtgtgtatgtgtgtcggtgggtggggataagtgaattccctcttgttgagtgtttttagtgctgagattatattccaggcctgaggccatcctggactgagcacagccctaaataaagaatctgagagggagagttgccccaccgctcacccctccgcacgccgccctgatgtctgtgggttgaccggggtttggggagtatagcattgtgagctttgagcctgcccaggaacctctggaacgtatggggcatagtcagctgcccagtgtgacttcggtggccagcaccctcggggcacagtagtacctctgatcttattagcagggaagcaggagtattccctccttctccaaagagggacttgtaattttggagacccaagggaatgaaagggcttttgctgggcaggctctggctgagaaggcttaggatcacttcactctcccttaaaaaaagctctctggcaattctttctctggcatccctccctgccctagcccctttctcggggatattattttcctgagagatttgaggctgggtaggattccttgggagtgagagttagctgcctgtgttttaaagtccctgcctactgccccattagcgtcaacactagaaagtggagtgctgtcagatcacaggagatccagtgcaaggaggagagggggctttgtctctctctgcttggcctcattctcatactctcagctttagcaaatattagatctgcgggtaaggatagggcagccctttccatgaccttctatatcaggaaagaagacctgtgaaaaagttgtcacatacataagcttagccctcccaagctgaccaacatccaaggatagctttgggtgggagatgggtgtcatgagagggttagcccagatctgaacaattctgtgccccatgaagatttatgcagaaaagaagcccagcatgcgcctcactctgcctgggactcctctgtctgctgtgggctgggaaggtggtgctgctgagtgcgggttattccattagctccctcttcccatgttctcatgtgaatagaaagcacctggggtacctggacccaaagttcctagagagaaaggcagttataagaagtgtcactttggattagggtggttgcaggaagggctaccactgagcagagaagggaaagagagggaggagaggcaggggaatgaccgaggagagccaagaccggaggagggcgagggcaggcagaacgccgtgcaaggctcacccgcgcagagtggagattgttccctctctgtcatcgggtttgggtggctgtttgggctcatgcaggcatgacaaagggtgattttggagtgattggttgggaatggcaggccactctaggcctctgctggacagggccccaccgcctgcccacctctaggctggggctccagggctggacccaactggtgctgcttgggcctgtgtctgggtggcatctggccagtgtttggcctggggctccatgccatccctggggtctgagcgattcagcccgtgcccccttcccgtctcatcctcacgcatccttggctgggtgcatgctgggtgtttcgagccacgcagaccatgagaagaaaatgaaacacacacagggcttcattctcttcctctcccatggttgtgtcttctgttgctgcgacccgtctgacccagtccgttatgcttggggaggctcctgatgactaagccccgtctcctcaccgggctgcctgccttgcacgcgggggccgtgtgtccaggctgggcacagccaaaccaaccagactcggctgttttacatttccctctcagctcctcccacattgcccccgactaccgtgggtgcgacgggcgctgtgagcagtaccgatgctactgccattgctgccaccaccgaagccacaacagtccccatcatcccaactgtcgcacctaccaccatcgccaccaccaccaccgtcgccacaactactacaaccactgctgccgccaccaccaccacggagagtcctcccaccaccacctccgggactaagatacacgaatccggtactgcgcatcgcccatgctccccatcccctcctggcccgcctccccagcggcctccagacgaacccacaggctcccccagcgaggaggtggggtctggggtggtgtttgccaccacctccctttgtgtttcctttggaaactcacccgtgactggatgctcagtcccgtagcctggaggcccagatctccccagcctggccctgacacacacacactccttgggtggtcctccaccactcagtaccccaaattctagcttcagatccctgttccttaacagacggccaagctccttgggcagggcccccaggttccagatgttaggaccgcctccagctacatgtcaggcagtcagctcagagccgagcactccagaaggaagacagcgtgaggaggggaaaaggaccagatactgtacagctggcctgagggagtttcctgccctggccacgtctgcgtccggcctagaggctgagcagcagggagtggctgtgccaggcagctctgttcccagaacccctgtcccttccttgcctctccttccgcgaggaacacttacagacttttcttttacaaagtcagagcttccaggaaactgtattgccaaggaggcccttaatgccaaactcacattccccaagccctcaaatgcaggcatggagggaaaattacgggcattctcagagcccctggtaagaatcgatcccagggctggtacgctgagccacgagaatgcactgttcctgtatcatgcagccaggccaggaagctctgttcttccagttcggggagaccccaggggaattcagcgatacttccaagcactgagcatcagtcttttattaccaacaaggggaaggtctgtagcttcctgagctcacaggccagctataaaatcagcgtgaggcagccaggaagcacccagaactcttctgccacagttgtagaattgtaggacccagtgggcaccacctttgtctcctgggcaagtccctttaccttccaaggcctcctttctcccaccctgctccacttttctcagcctcctgaatgaggatggaggcttaatagacatgagaggattttgttttcagttcaatgacatagagttaagtgagctgtcagggaagacgagaggcatagctgctgtgagctcctgagaccctgaaaatgctggtttgcttcacaggtgccatctagaacttaacaggcactttcggaaaaagttggctgaggaggaacctgctggggtattagaagctgccaccagcgggttggtgattgatgttctttggggccacggtgaggcatctttttcattaaaaagtggggctttgtgtcctacaagtgctttgagttcagagaaaagatgaaccaaaaatgaagaaaggaagtggctcttgcttccccagcaaagagttacttgccttctgaaacacaggccttgttgccacataggaccagcccctccagagtctcactcctcaagttctgtgagacgctgcagaggacctggccatggccttgatcttatctagaccttgggaacacccctcaaccatcctcacctcacttcagcagaatggctgtctaggactttaaaaatgaatgttcacctttatcgtgccttacatcttggaaaaagatgtttcataagtttactcttctcagggtgaaataggcctttttatttgtccttcgcctgtctttttcagatttccagggagattccttaattcttacattccaggagtcagtgagacaatctatgcttcccctccctgaccctttttgtgtttctcggtgttgatatttcacatgcttggtccttctctttgaactttttagtgcttccgggtcatcatcctgatctctctgtggcaatgccttcctccagctcccacctctaaatcatcttggcttcccactgcctggccttttctaaaagaaccccaatcttcattgcctttaaaacagccagatttgagtcaatttcatattggtggccagactgtttaaacacaaattctctagctatttacagggctcagagctgaggaggaagaaactcaagtccccaaataatgactaatcacaattcattctcaccagcaagagccatgaaattctaaggagctggaatttgggatggcttcaagtggccagtacaattgaagcgtctggcagacaggcaaagaagcctaccttctcccctccccacggtgccatcaatggaatcactttcttggtccctcacttaatatgaatcatattcacctggggcaaccaacgcctgacagagttgtagtgcagaaggcacctctttgaagtgaaaaccaggagatcttttatcacttccccagccctgcaggctcagtcacatgtcaaatagataatgaataaatgcatcgccaatgcactctattcatttatttttgacaagtgagttggtgacagtgcccccttgcatgctaataaaatatacagcagccacacttgtaaagtctttgaaatacgaggcttcatgcaagtactccactattaaatctttgctggaaaatggggtaaccagactgctgggactcttgcaaaatgattacgtttgaagattagtgccattctcctctacacaggctatggtttcagacagcaccatggctttgataaagtggctcccagctcataggaacttgataattaatgtcctctgtgttgcatagagatcaggcatcaaaaactcggtggtgctgagacgccaacagaacaggattcttctggtgtctggaccactgagggctggttgtcaaggagttatcttctcttggtcgcacctagtccacgtgagggagaggaaggcttcacattgtctttacttgggcccctgagattctaggctttagacaatctgaagctgttagacctatcagccaggcttctctctgaccaaggacaacccaaggggctccttagaccagcctcacctgtctggatcaccattctcctccagcttcaaaagtccatccttcctgcaaatctcatcaagactcgcggctcttaaagataaccctctccttcctgcagcacttctatgcttgaaggggaaggggctggcacacatcttctctgtgtggcctcctcctcctggccacacggcctttttcctggcccctttccttacactgttgacatgacaagggatctgaaaagggaataagtccaggttaaagcctcaaatggcacagatcaaaacccactctttctacaaaaatttgccgggcatggtggcgggggcctgtaatctcagctacttgggaggctgaggcaggagaatcgcttgaacctgggaagtggaggttacagtgagtcgagatcgcaccactgtactccagcttgggcaacagaacaatactccatctcaaaaaaaaaaaaacagaaaacaaaaaaactctttcattcctaacgctacctatgtggacacagtcagtttccagctctccctccgaagtcctcccgactgtacctgcttgtccctggacagcgacctctggcctggccaccaaggctgcagcttggagctctgtcaggccctgtgcacagccatttctgactctcccctttcctagatgactgtgtgtacatgtgtgcgtgcgcgagtgtgggcatgtgcgtgcatgcacacgcttgtgtgtatgtgtgtgtctccatatctctggtgccactccctcctcatcactaaccccttttctaacccgtccaccagcccctgatgagcagtccatatggaacgtcacggtgctccccaacagtaaatgggccaacatcacctggaagcacaatttcgggcccggaactgactttgtggttgagtacatcgacagtaagcattgctgtgcggggtggtggtggcggcagcggcgtcggcagcagcggcgggtagtggtagatgccattaaagagctcctgtgaactcccccaggctcagagaggccttttagcctggcttaattatggcttaatgaaatcgatatgcactcaggcggcagtgaggtgggaggaacaggctcaaggaaaaggaagggggcttctcaagccattagtggaagtctaggattgcatgtctgtggaggacctgggtaaaggggcccttcattcatttcctgcccaggatgagggttctgaatagcccccaaatgagccaaatctgtcctctgcattgatctccttaactcaggctccacttgactgggtgagccagttcacagacttggactataaccctgctttgctcccagaggaatgccagcggcccccagtcagagccacagaccagagccatttgtcccagctggtggcttgagctgagttgctcaccctttgctggagcttgggaccaagggtacagattcgttggactgcagagtgtggcccctgagtgaaggaccctgttcctacagggtcaaacccaccatcctggcatcttcagtatgtgctctaagcaattaagccaactaacccagccagcaaatccacctgggatagcctacccaaagaccctctcaggagagagcaaagctgacttagttctctctggttggaggaggagttcacatccacagcacctggactccatagtttggtccatactttttcaggctcctactacccctattcaccctacagcctacatgcacaggcacacactttttctgatgtgggaattcaccacatggtgagaaatgagaggtgaaactaggaatgagagccaagagacagagtcccagctcatctctggttttcaggagggatgctaactggcttttggccctcaccagccagatccatgtgaaaagttaatcgcttccagggcaacagagcatctgctgacaagctgagagtttaaggaagtaggttataatatgtctagtgtgaagactgtggtgaggaaagcgaacttcaggagagggaacggtgtccccagctgaagggtcgtttaaaagcgttagtattgcacagacaggcatagggaagctgcctggaaacctcctggtctgtatggtggactggacccgcggttccctggtcccttcccccacactttctacctttgacaggtgaccaggacctaagcactggctctccagctcctggtgcctggctctaggctgattgaggtttctgttccccaggcaaccatacgaaaaaaactgtcccagttaaggcccaggctcagcctatacagctgacagacctctatcccgggatgacatacacgttgcgggtttattcccgggacaacgagggcatcagcagtaccgtcatcacctttatgaccagtacaggtgagaggggacctggcctggccatcccctgcaagcatggggcatttcattctcatcctcagcttcctgcttgcctctctcctcggaaagaagactcatcccccaccccatttcccaccttgcatggcgtgtctcagctcttattatgtatcagctgaaggctcccaggaagcctagaggagcccagtgtgcatgcgtagtggagaggaaacagtgattgtggccccgtgcgggtcagaaggaaacaaaggatgtttaatgacaacagagaacacttagccccctgctctgcctggtgtgtgtgcacatttggtcactgtctgtgggtctgggggctgcaggagagtagtgcagcctggcctgtgcgcacaggggctggctcccttcatgcaggatcaggggatagggccagcgcagggccttgatctagaaatcgctccaggagatcagtgcatttgttactcccttgccaccatcatctattgttaaaaatttcaaagtgagtgacacaacttgtttggggctttgtttttgtcccaaatttgtcttggcctaaaagtaggtgattttttgtcatgcagggagaggggaagaagctctccagaaccggaaaggttctggctctatagcggctttagctgtggatgaagaaacatcttccttgtgccaaatgaacaggccaactggggctcagcaaagggtacaaggttcagcaatctctgtgctagtaggggtagctggcagtctggatacttacagggcactccctggtctgagtgagtgtagctttaaactcagccgagcaggctgccaagtggccggtatgctaagccctggggctaagggtaagggtggggaaagagattaagagagaaaaggatcagtaccttgcccccaggggatatcctaatcagatgcaggtcattagatacacagcatagcggaggggaaaaaacacacagtgatttacatgaacttctgaatgttgacttaaatattcattactcctcctgcacctggcctggcgaggctgatcctggtagcttgcatcttgggagtccctgcccatctgtgtaaacgtctcaccccaccccttctatcctagtccttcctggtccagcatcctgtcttcctccgtgtctccgcctgtcctgcacatttgcatgccatcaaggctcagagggtctgagagtcgggctccctgattgaggctagccaggccgactcaggcaggatgtctgagtggccagcctgtcctgtaacaaggggagcaaggccaggcaactggacagtggactgagcagagcaagtggctggactctgtctagctcagatgaggtcccaagctgttgctcactggtatgtgcatttgattttgcttcattacatatttgagtccagcacagcagcaaaaagcaaagatgatatttgaaaatagagttccatcctagggaagactgccaaaaccagggcagcctgctttcagagtttgacttctccaggtgctaagccctagggctgtgggtgagggttcaggccctgccctcagggatgtcctaatctgatttgggatattaagcacacgacagaataatgattgatactgggtatgcttctgaacctaaatactcatttctcttttcttgcacttggtggaaaggctcatcttgatagcttgctttccagtgatgaagcactcagccctggcaagtcttcccagactcctcccagcgagagctggagtgggcaggttgatgagcccagctctgagtacatattgtccacttctctcacaggctggctggaaattactgtctgcaaaccacatagggaaaggaagtattttcactttctgaagtctgtgggtgtgtgtcgatatccttcaaaaatacacattctctttcctgtggatggactccagagccaagtccatgcaatccacagatctctgtgtttcattaaagcaagaactcgtgagcatctctgggccctgaccactggtcacttagacaaccacaggcagtcactttagtctgcagacttgagtgcgctatagcagttcaggaaggaaattgaaggaaaccactgggaaggctgacagcctctctgaccctcaccagaaaaatcccaatgggaagttaatcacctccttgaagtgtctgaagccaaagagacctgaggggctacaaacacataaccctggactccaagaggcccatcagcccttctgtgctgggggcgggatggggtaaggcaggaggatggtggaagcttagagtgggccagcagtcagatagcagcctgcctcggacctcaggagagcagggagcagggcctcaggggccctgaatgcagtcagcttctgctgtgtttgggagaagcatctctttggtgggccaggatggggcaaggggtggagaggtgtcaaatggtgcttaagtgagaacagccaagccaaactgtatttggggaaaatccatccccgttatatttgttaatctatccctatttctagaacataattcttctgcagactttgagtgactggcctttcttccctggccaaacccaattcctcccagttagaattaggagtcatgagagctgtctgctttgcaggtgtattgcccgcttctgagtgggtgttgccgggagaggtgtggaaggcacacaaaacacgtcttctagtccagtgtaagaggcgtgggggccggacgagaggatgctgttctggctcccgtcagttacagctgagagtggcaagtgtaaacgcaccctggtctttgcacacagatattactggatccgttaggaatcttgaaacaagtttaacagaccgattgagtatggtgttgacagtcaaatataattgctctggggccttgctaaaatgccttcctctcagagtccaggtcatggagtcccattataagtgtgatcattatgtcctaaatttcttttggtccttgagaaactaaatcactttgatgggatgtggttgagcccaccttaccccagatcccacttggttttgaacagccttctgtgtccaaacttcacaggaaattctttcaccttttcggtaaggacggaaggtaacatttgaacttcacctggtacgtcaggaatgaaaagccacatttgcttcctaattgcccatgtggcccctttcccctggaatgatgactttctttcccaagaggaaggaagtcttgtggagacagctgtcagggtgcatcagaacaagcaccaggaagatggtggtgcaactaggccattgactaggtcgttgcagacgcacaaaccaacctccttgcaaaaggtgggtagaactatccaaacacatgttgaagtaattccttcatcccagtgcccagttctagcacacgggcaagccagtatccatatgacccctagctgatatcaggggaaaaacctaaatcagtatgccaggttaactgtattatagtaagattaaattcacccattaatcaataagtagtcactgactacttgttatgtgaccagcattgtgccaagtactacgaggctaaaagagatcccccgttctcaagactttaatagtataattggaaaccaggacccaggaaatagaacaattaaatgttccactgcatggcgcagctgggggtgaaatcggagtttggagatggtgtgagttggagcaaggggagattcagggaggaggggtagagtgtgcaaaggtggcagtgagctaggagggcgacagcctgggctttcttgggcaggaggggcaggatgcacggaaaggagactggagctcccagaaggccaggctcagaagctgagcccacacagtggagagtaatgaaaggtggcaccattggaagcctcctaggaaggtggtaacgggatgtctcattgtatccacaggaagtggcaggcaggcacaggtgaggggacccctggaatagaatggaacagtgagaggaatatgggaagtgttttggaagaagtggcagctcttagagatgggcacagtggtgtggcctgtggcagcagcaggagagctgggagaatcaaggcagggggcaggaagatgcaggttgaatttcaagcgcatgcatccaaggagagctgtaggaggaggctctgggcttacggttgtggaggtggctggagggatgatggggatgaataaagggtcactggtgctgatgagagttaaggaggtggaggtcagcttgggagaggcccactcagtggtaacagctgaagcgctaagaatagaggggcttgaagtcagcttgctgggggtacagaagagttgtcgggagctggagggggtggaagagcatagagcgtaccaattaagagggcagcatgtgagctggagctgaaaagtgtggcaagttcctcaagggtttttttttttaagacacaggaacacttaggactttgagaccagcctccacaacatagcaagaccctgtctttactaaaattaaaaaaacaattagctaggcatggtgacatgcactcgtagtcccagctacttgagaggctgagataggaggatcacttaagcccaggagattgaggttgcagtgagctatgataacaccactgcactccaacctgggcaatagagagagactctgtctcagaaagagaagagaagaggagggaaggggaagggagagtaggggaggggagtgggatgggaggagaaggggagaggattggggggaagagaaaaaagaaagggagggagggaaggaaggaaggaaggattaaatagataatgatagatctatatatattaaatggttataaatgctatgaaataagagatagcagctgggtgggagttggggagaggggctttgtttaagctgggaaggttcaggaagacctctctaggaggtgccagttgccaaggcagccattagaagaaaaagcagcagatgcaaaggccctgcagtaggaatgagagcggccagcatggctggagcataaagcatgaggacagggtggtgggaggtaggactagagagatggccagggcctgctctgatggagcccgacaggtcaggataaggaatggagagttttcttcaataacaataagaagctttggagggttaaagcaaggaagtgattcagtcctacgtggggggttggaaagatcactctgacactgtggcgggggcctgctgggagcaggagtggaagcagggatgggacttttctctgcagcctacctagatcatggtactcacaagccttgttctcgcaggcctcacctgcttttcagcccggggcgccctgggcaaccagagtgcagaggacacgtgttcatcagtcttcaccccgtactggcaactttcttggtgcaatgcccttgactgggcactgggaaggctgtaaaatcagtcttcaccccgtactgggaactttcttggtgcaatgcccttgactgggcactgggaaggctgtaaaaacagtttctgcccccaagaggagcaaagggtgggcttgcacccagataactgccccacaaatggcatgtgctgaagacctgggggcgcaggtgctgtggccctcatgcttttccccgtgctcctggaaggaggctcagtgccttggcgccagctccatggttcttggggctcctgctgttgtgtgcctctccccaggtgtctctgggctggctggttccagggttactctgggtgtattcagttcctttgatccttcccttctgtcacagtctcacgttctgtgacaggctgcatttcaggaggggtcgcttttgttctccagccggtagaaaggagaagggtgagttggtactgaccacaccccccctcccaaacccaaacccagccattgggtcatcaaggacaccctcaggtgactccttagcacctgtacttcaggccgtcctgcaggccttttaaatcacaaagggatctgcccactttgaaacaggtctgcacatacgctgggcatggacagagagggactcactgtcacaggggttggagggggaacatcggcttgtcacagaccaccgggggggtcaccctgtgtggagtagcctggaagtggcatggagtgagcagaaggcacagccccagccccacatcgctgctggcctggctaggggtacccacaccaggattgcctttgctgtcaggaagcgcaggatccactagagagatgtgaaaagatgacagggcatcctgggcctccacttggtccagtccccaccctcaggaagcctggatggcttcagagccatgctggtgggcagggatgctgccgtgtgcctgtgcaggcctgcgaaggtgttctcatagcaggtttttgcaacgtggccacggcctgcactccctgatgggtagcttgccggctcccatttctccaccctggactcatccatggggaatcatacttccatggccaatccgtggccatccctcagtccccattaggctgtgaccagccctctggtttccaagaatgccgtgcttcatccctatgacactttccccttcctaaaggacctgttcaaccttctgcttatttgctccttgtacccctttcctttgcctcttttctgatcttttgaccttggctctttaattattttctttttgtcctttagcagggtagtttgggccagggggctgctaggtggtagtgttaggctccaggagaaacatccacatgagatagctgaagttcttccctccatctccctcctcaccatctcccccatgaaatcattcacgggtttgcttccggccctccccgccagcttacaccaacaaccaagcggacatcgccacccagggctggttcattgggcttatgtgcgccatcgccctcctggtgctgatcctgctcatcgtctgtttcatcaagaggagtcgcggcggcaagtacccaggtgagatgtgcaagaggcgtgggcttgcagggtggggcacgtccactttcccgtgagtctccaggtctccagccagatccggggaatgtgttctctcagtgaagccagcccttgcccggattggaaatacaatcctcttgcctgtgcatcttcagactgccagcgagcacttgagttaattaagttcgcctgagttgggcggatggcacagtccaggcggcctcagagaggggatggaaggaaccctggctcctattaagaatgacctttcctccccttgactcaccacccatctgttctataaattggctttttttcagcctgaatctcattaggatcctgtgtcccagggaaggagaaaggaagagaggcattttccctaaccgtgtcccagagaatggggagaggaggggcctgggcagaagcagcacccacatgagagagttccagaggtgggcgctcagcaggacaacagtgtaactgccaataccactagcaagggtcagaagcgaggagcagggagaggctgaagatgggtggcactggtagggacccccatggccctaaagcactttgggcttccctaaaatcccaaggatacctcaagatccttcagcccctagccaggcacaatgactcacacctgtaatcccagcacttcgggaggccaaggtgagcaggtcacttaaggtcaggagtttgaggccagcccaaccaacatgacgaaactccgtctctactaaatatacaaaaattagctgggtgtggtggcaggtgtcggaggtcccagctattcaacaggctgaggtgggaggattacctgagcctggagaggtcaaggctgccatgaggcgtgattgtgccactgcactccagcctgggtgacagagaccctgtctcaaataaataaaattttttaaaagatcctccaggccgggcgcagtggctcacacctgtaatcccagcactttgcgaggctgaggcaggcagatcacttgaggtcaggagttcgagaccagcctggccaacatggtgaaacccaatctctaccaaaaatacaaaaaattagctgggtgttttggcacgtgcctataatcccagctactcaggaggctgaggcaggagaatcacttgaacctgggaggcagaggttgcagtgagccgaaatcgtgccactgcactccagcctgggcggcagagcaagactccgtctcaaaaaaggaaaaaaaaaaaaaaagatcctgcagcccagacataaccaaggtcaaggataaggacctctggcattcttgtttctggaaatattgactgttttttacacaggagcaagagagccatctgtctgtgatggggtgggtagggacaggagacaggataatggatgaccctgaaagcaaagatctggctggaccacagaatgcaatttctccctgctccagaaagccccatcaccaaacacaacccatgctccccaaatgcttccttctccccatctcttagaacaggtcctcccccaggaccccccccaaaactcaacacaaaggaaatagaagggagaggagactggattctttttcattccccatgcccaagtacccacagactaggactctgaagagctgtgccttaagtgagggagggcaggaaatgattgtcccttactggtgagcgatgttttctttcactctgttctgctgtgctgggcctgtctggttctgtaacagagaaagcctgagttagggaaaaggctgcctcctccgtctgacagtcagacttgggtggactgagttcacgcccattccaggtggaagtggaatactggaagaacccagcagatcaactctgagctgccctttgccctttcagaaagtatctcattccaaacagttcttcgaaactaacctcttgccctccagctacagagtaagcccctggtcccttaaaaagatgagtgaaccaggagctacaaggcctggttgctagccttccctccagtcttcattcagtcactaattagttacgtgacatgctcttcaactctcaacggttcggtttccctcatctaaaatggggatgattatctaccttgtgtctcaaaaaggacacataggccgggcgcggtggctcacgcctgtaatcccagcactttgggaggctgaatgggtggatcacctgaggtcgggagttcaagaccagcctggccaacatggtaaaacctcgtctctactaaaaatacaaaaatgagccaggcgcggtggcaggcgcctataatcccagctatttgggaggctggggcatgagaatcgcttgaacccgggaggcagaggttgcagtgagccaagatagcaccactgcaaaaaaacaaacaaaaaaagatacataaagaggttttcatgtaagtgcccgctgtgcatccgcctctgtgctgtgcactagcgatactggaggaaaaatgatctctcctcaagggcaccgtagctgacaccgaaagaatgagcacagaacaaggcagagcctcggctgaatgctcacacatcacagaggaagtggaggaaagggggcacgccaacaagggggtcacagagaagagacactttccatcccataggtgtgtacggcgtgtcttctctgctcagggcactctgctaggaactgtgaagaagcacacagacccccacccttgaggaaagaactagccttctgtgataggcatgaaaaaacgtccacaaatagttacaccacagagcagagtaagaaaggtgcaaacagtggagtgtttgcctttggcaaaggaaatgatcacatctgtttggtcttttggggagacttcatggagatgtggtggggggagcttggtaggaggagatttcagttgtcagtagagatgtaaagagacccctggggctgagaaggaggaggcagagtcaacttggcaactgattgagtacaggaagcaaaaacaagggaggcgtggatggtgccttgttaaaaaagagtgtcagtgagcccagggcggtgccttctggccctgcattcagtggagccctagagagcaggggcatgtacttaatcgtcgtgtctgtgtctttgcttctccttttgaccaagtacgagaaaagaaggatgttccccttggccctgaagaccccaaggaagaggatggctcatttgactataggtgcgtgatctccctcctcctctctcaggcaggctgtcctccctgtccctgaggcaccaccctcccctcagagtagctccgcttggctgagaggccatgagtagctgtccttgcccattgggctgtgactctgcctctctggtggcgctgtggtggagagtgcatgctgctgagtttactcagaggcttctcatcctgagagtgccagacgaggctgctcccccaggagtcactgcccgacacatgcgtgcattagtttgacgaacagcatttcattcattcaactgcacaactcaaatgtatcaagcttgctatgtatgtctttccaccttttcactctgaacatgagccccaggaccctcttgccgtgagatgagctcagctctcatgctgattctctgcccacactccattcctaaccctgaagataatgaccctgggaggctgtgatgtcttaaagcctcaaggaatgaaggtggggtgattccaggtcgtttctccttgaacttggcgatatctttgggctctagactggaatgggccttggaaaggcttctggtccagtgccctatgccccagatgagaggactgaggcccagaccaggaagcgaattgtctaagactcttccaaggtccccacccagtgagttagtggcaaagctggaaaggccaggtcccgcatttccagctggtgctgctattctatacttctatacccatgctcctgtcctacctggatgcatctttgtatgtgggcttaacaacattgttgtgggtccatggagatggcgagtatgttctgagctgaaggatgatgcagagtgggctgtggagtgtcattcccagaccaagtgctatgggagggaatgtctgatcagagccctccctcctcatgccacccagttactgcctgggcccaggtccccttgtcctctgctacagtctccttttcctgtcctgggcctctgccactctgcccatcagcctggcaagcacaatcagatcaatgtgtggtggagccactgcccacacaggagcctgtctgcaggcttatgggccatgactgtccacctagtcccgacattcccagaagcatcctgaaagggcaggcacaagagcccccttcccatcttccctggcagggcttccctgacacagcttccctgtgggctgagacttccctggctttttgttccaaaagccacagggcttctcctcccccagactcttggtgcagccagagaggaggagcttggacctcctccaatacaaggctgggcagcctgtactgcgaggagttgcttccttatgcacctctcctgccccagacaccaaagctgtcaggcaaaaacccctgcctcctccccgcagacactgaccctgggtctacacgcacaggagcatgcctgggcctgcacccctacacgcacacacccctctgctttggctctggaaggtccgcagcatccatcctagagccctcccttggatgagtctaagagccctaacctgggaaaaggctgaaattaatacatcagagaaagaactaagtttctagagaggataggcctaggggcgaggagtgctgttctctcactccagtctgtggctaagtggccgaccacctttcccatggggcaccctctgtttttctcccctatatccatccacctagaccttgaagatgtctcagaagtgaggctgacaggtggccagaccagggccacccctagtcattctagtttctttcaagcttcccttaggagaggtctgttcggtctgttcttttcagacctagatcccccgtcccctcaacagcctggcatgctacagatctcttcccccgccccttccactggctgggctgttgctgcccagtggctgcacttagcttagctgcctggaaacagaggaggaattcccacaaatcccatagcacagtcctcatgcccctgcacatgggatagagggccctggaaaggagtgcatgcgaataagacctgcaagtggggtgaggagcctggcgatttccctcctccagttggcaaacagtgacttccgcttcctgcacaaactcagcacagccccagagagctgcctccctcacaccatctcccaacccacggctgtcccacgaatacagttaggctgtattcgtggggcagcactgtggggagtgggctaatagctttcaatcttctaacacagccccggctctggctcgctgccctcacctgacagctgtctttgcccgacactgctattagaagtgagaacgcactgcccactataatggcaactcagctggttgtcttccccacgtccaggaaggactgggggtgggtggggagctgggggcaaggcagtgtgtggtgtgtgtctgctcagaccgcctggcaccgctatggtcccaccactgagacccagactcccactgctcagacccagactcccactgctcatcctgagctgcctcctgcccaggaactgggctaacctctgaagtgcagccagcaccacctggtccccactctgagcctttccagccaagggaagggacatggtgcctgaacagacgctggctcagagagcagccccgcgcctcctcaggagcacagcagacatcccaactgggtggctgttcccagcggcccgtgcagctttactcggcagcctcccagctctccctgcacaaggggagcttagggtcagggcctatgggcctcagaaggggctgggcatgatcctctgagccttgctgtcttctcacgtttgctggcatcacctgcttacctgtgtgcccccccaccaccaccactcttgcgcacctgtgcttgctaggcccaaagcaataacatctttttatagatcaaccagatagctcagcgaaagacaccaagacagacaagcagagaggtgagggagaggtttgttcctttaaaagccttgcttgttgtcaaggcgagagtgtttccctacagagtcacaggtcttgggagatcaaagctgggccagcccctcttgatggacagactgaggcccaggtcacaaaaccacacagtgacacactcgggactagaaccattccatgtggtctcacaagcagtggctctgcctcaccatggggtggccatcctctgtccacttccaccacacacagggacccaatctcatggaaaagacccagaacaggagcccaaaagcatgggctccactccctgccctgccctgacctgcaacctcaccttagagaaggtgcttgtcctctctaggcctccatttcccttctgcaaagcaggctggacaggggagggtgaagcgggggctggactgggcggtctcctggatcccatcctctctgagctgtgtagggcatgtgctggcaggaggccagctgccccatctcaccccacctgagattctctgtctctctttggccagtgatgaggacaacaagcccctgcagggcagtcagacatctctggacggcaccatcaagcagcaggagagtgacgacagcctggtggactatggcgagggtggcgagggtcagttcaatgaagacggctccttcatcggccagtacacggtcaaaaaggacaaggaggaaacagagggcaacgaaagctcagaggccacgtcacctgtcaatgctatctactctctggcctaacggagcccacccaggcacagccaccactttgcaagtgggaggaggggagaaggggagacaaaaccactgcagacctaccacgaagccaccaccaccttcagtaacaagggtacgatatgggggtctgccaagctgtgaggaccagtagccaccaagccacccacaagccccctcccaatgaccccccttcagccccgggtgccaccagtgtgggagagctggagccgtggctgagctcagctggagggagcctggccccttgcccggtctcgcagccaccccgagcgttccaccacactgtccgcccttggcctcggcacacgctcaccttttctgttggttacgggacttctcattgtcttaatttcgctttgtgcatcttcccctccagacccaatgtctctgttttcttttccttttgaaaaagagtccctggaaaagaaagaataagtggattctcccccaggagaatcctttttgcaaagataggcaaaaaggattgaatccataccagaacacgtagacaggctgtaatattcaaaccacctctgggccaatgcatttccaaaggatgcctttctcgccatatgcctcccctggcccccagcccctctgcctcggccttgtcagttgctgagctgggcttggctcctttctggaaaatgacagtatttttggcagggagaaggtgcgcaggcctccttgctgctctctggtttggttgggaggtgtgtttacctcttgctcctcattcctcccctgcccttttctctggaatatctaagatgtgagctgcattgactctgaagacgtttgaggaacaggagtgggcactgatagaaaggacttcaacgccagtgactgtgtacctccagcagaagaaaatcaggtgtctggtcttgggggcactgtgctcacttctagagagaagaaaaaggctgggtttggacttcatgcctcctcactggtgaaacccaggatgtagatagagggccacacccaccctgtccagagtagagggcacctgtccacgtggccagggcccatgctgccaccctcgaggagatggaaccctgtgatgcaaaagctttgctggtgtgtttggggcataaggcactgctccccttccatctctagcagatatcatcttctcagccaattctgtaggacactgaggctcttgtttgacatggtgtgtggatggggacttgccccaagactgagcaggtctgccctttcattggggtgtatacatatcaggggaccctgaggtggcaccgtactcagtgttgtgatgcccccacctagggaggactcaatgctctttgtatgccttatgcagcgctgatctgtccctggagttcccaggttcccagctccccccctgcaagccttgaagcctccagcaacgtctatctccaggagagcagggcagcctatgcaagtgttccggcaggaccagaagtggccactcaacacacgtcctcaccagtcaccccaaatggagacactcgcagacctgcagttctcagaccgaaggtgctgccttcatcctccccacctaatgcatttttgaaaccaaaggtacctagcctcagagacagagaaggagagggggagatcttgagtctaagaggaaccctttagctgtttctgcagctgaggtcagtttcaggagggtgaagctgatccccaggaatggatcagctgccatgggcacagcctccgatttgagcctctccggctgccagccagggggcctgggccagaccagggctctgtccttccgtgactttattaaagcaacatttgccacatgtttaagccgcaaaggtattagcaatgcttgcatcattaataatcattcagttgaaggtcaagcccatagacacacactctctgctggtaagaaaccatagcccagaactgagccaataaggttgtttgaacctgagagtgtgtaatggtcatttgggccaagcctcagctagggctgctgcctggacgcctgaggggcagcttatcacagtgcaaggggacagggtaaacagcagggggtggggtgtgagcttggagggcccctcccctggatttcctccaacacctgcttggatactaggcccactgtccctgaagggaatgtcagggaagtgtgcctgtgagctgaattaaaggactggcctttccagaaaacgctttggatctgagcagagtagtcagtttctcagacactcattccatactgcaccgtacatgccagcgtacccattgcaccgaaagcaggcccttagggcaggaagggacgatgagcaagtctgccacaccacctggtgactgggaagggctgcttctctcgtaagggtcttggggagaagtaagcccgcagcctgcctctgcacctcgttccagtgtcctgccaggctctgtactgtcctttgtgtatgaagaaaatgctgttagccctctctcaggctgctgttctgtgggtgctgagagctgccccccatcaccacgccatcacacccctctgagcagaagcaaatctgaggctgaagaattaagttttccccaagcaaggaaggcaggtggtcagagagatcaaacgctgaggcgtggggattgcaggattcaggaggcagcccctttggggaagaggagggtgcattttccatggagcccatgtcagagtccactccagctcagcaggaaagtggaattgcccagtactgcctgccagctgggtctcccaagcaactaccccaagacataccaacagtgaagccaggacagcaccatgccatcggcgctccagtctgtctggctgggaggaaagtgctgggcatcttacagtaactctagaagttcctttgactaggctgcaatcccacctatatgctcagccctaagagctgtggtttcctgtgctctcatttgtccattcattcattcattcattcattcagcaaataatctgaaatccagtctgaactaaggcctgagctgtggataccatggcgcgtgagttagatgtggtccctgccctcatggggctgacagtcctaaaatcaagtgctaggacacagtggccattgagctgggagcattcttccctctaccgcttaagccactgatggctgcgagcttgaagagagggattctgagggagagcttggtccatctggtcaccaaggctgggcgggacagagcagtcaagaaccacggtgtggcttgagaaacagtcctgcttcctgagcctctttgctctgcctcttggggcaagctccttaacctgtctgtatttttatgcctctgtctcccattcagttcctccttgaatacctctttctacagagaggcacgggctcccctgaaggattgtcgaggccagggttcgggaagtacactgccatcggtcaggggacagctgcctcccaccttgcctgggtgatggtgaatgggactcatcttttcctgccttgcttttgaggagatggttgaatttaagctaacaggaaagccaaaccagcaccctcctttgtgctctgagaggttggagacatctggtccaccccattgcccctgcccctggcaagccctgaagtcgggagaggtgaccacaggtctgaaaatcagccagtgccaacattgcttgccctgcaaggtgcaactgagcccacatagcgcattcatagtttccctgaccacagccttgggaagacggtggaaacccgaggatgtgtgggtttcccagctaacggacaagctcccctgccacacccagtgcccacgcatgctcacatacatacagcagaccacaaccctgttgccaagcagtgcttccaagggatagcgatccagattccaacattgtcttggagagggttagtccacatccaagttgcgtgagataagatgcaaagggctctgtgtggatgaggaacgcaccttagaggagtgggaaaggccaccagggttgggccctgtttaggtaattcctgttggcagcacctagagagagcatctgagctgaaggagtgggaaactttgcccaagcaatggcacgggcagcgggctctttctggcgccctgtgctggagcagggccaagtcttagggcatcacaaacagcccatttgatggagggagcagggacatagcacatttttgtctgtctttgtgaggctgctttgctaactctctgaggagaggaagcctctcgggctttccgtcggctggggctagtgccagagaatcccttctcagtggccagcaggttcctgggaggccggcacaaggcaccgctccccactcatgacaccttggtgcagagtgacctcctgcccagtcaccactccggccagccccagccaaacacacaaaagcccatggttgcggttgcatctacaccgttagttggcaaaggatcctgcttgagctctgcgtggtggccaaggagtagcatggaggagggccctgattttaaaaaggaaaaatagagaggcctcaaaacaatgaaacaaagagcttgatatgtcaagaggagaccaaggccctgggaggcataggcaagccgggcagagtcagaccagtgccctcccttgaccatctcctagcattccttaacctagacaggggctaccccatgtgagtccaagccagactttgtggctgtccccagcctgcacagcccaagcccagggaagtgtcctttctttcccttccttactaataatgggccttcctgagacacattcagagaaggatcagagagaaaggagaaccatccaggagagccacaagcgtccaccaaacagtgtctcaggcctcacctgaagctgctgttcctcctatcagcacactagtattaaatgggtgttccataatgaggagaatggaaataggtacaaggcatctagcttaggacagaatcggatttcggcatgtgaaggaatcccagagctgatctcattgaaatgatctatcgtacagacaaggatatgcaaatccacagaagtgaagggatttttgctcaagatcacatagctggtaaactaaggtaaggttagggcttgaacttgggccttctgactccttgtccagtcagtgttctttcatctcaccacagctgcctcctttgaaacagaggtattaagatctgtccttctggttcaccctctcatacctctttactgcgtctcccacatcccccacatgcctcccaaaatgaaagacaaacaggattgtttctgagaccaagatcagtctgtctgtgatcagcctgtgtgtggttcacccagtcatgcaattaagggcagatctgggccagtggaataggatagctgattggtgtttgttactgtgaaccctagaccgtaccccgtagaatggtgtctcttgctttgtaacacatcgggccttcagtgtgctgtattcctcagaagtgagggcatctcggtccattctgcccatggccacagggtgcagagaggcagcagggcccatgcaagctgccaccctgggatttgctgggctggagttcaacagatgtaaagacttcagtgaagcaataaacacaaaactctgggagaagatatccagaattttgtacattactctgtttctttttcaaaaatgaggcagatcagatgcccctgagctgcccctttttttctgattcccaactgcaatgtcctcagtcagtgttgtccctctgcccggctccccagctctttgccaacctcttcacactccccttgagctgagcatcagtcgcctgtgacgtggccaccttctgtcctgctcccactcccgacccatgctggaccccggaggacctcctgccccgcccccaccacacacccatatcccccaccattccaatttgttctttcccgtggggaattttttttcccagcgtctccatcccttcctacatatccacacacacacaaattggtctgatcttttttccattggttaaacatttaactccatgccagaccttgttttaacccctctcacatcatgttctttccttttttgcgagttattttgcattaaccaactttgtcagtgacagatgcgtatctgagggtgtcacacacgaccttcagcagggaagacttctgggccatggagggccgtctaatacatggacttataaactgactgcatgagcaatgaaaaggccaaattattctgaattttttttgaatcactgtaaaaaaactgatttcttttgtatagagaacactaaacgtataataaaagttgttcaaaatgga

SEQ ID NO: 17 - DNA, 15560 bp, Homo sapiens
agtagcgaggccgggtctgaactatcaggcgcggcctctgcgagctgggggcggggttctgcaccggcgggggcggggttgtgagtggtgggggcggggtctggagcagcaggcgccgcgtttgcgagctaaggtcggagttctgcaccggcgggggcggggctctgcgtggccggggcgggctcgggatccgcggggcgactcccggtctggcttgggcaggctgcccgggccgtggcaggaagccggaagcagccgcggccccagttcgggagacatggcgggcgttaaaggtacatcgcggtccccggctcgcttgtcgtgtggtggggttgccacctccgttccggtcaagcctggggctgcgccttccgcgcgccgttggggaacggcctcaccacccttcccgcctctccggttcgggaggcgatcgaccgctcccttcgtcccttggggtgtgggtggagcggcgtttcgggggagccttggccctttttgcaaggccgctggccttcctgctctccagtggcggcaccagacccctccccagcctgagccctcggcgagagcggcgccctccacctctcctgagtttttaaacaaggtttccacttcttgacgccaccctaacgcctttcttctggttttctgcccctccgcagtttcctatttgccacaaaggaccctttgtctccagcgttcttagcattgggaaacttaatcctctttttcctaatgatttttccaactgggcagagttgaccgcgggcgggtgtcaatggaaagcacccagaaagacggtgtttctcgcagtcgtggagagtagattacgtgtaattttaatactgctttcttcggtgttttctctgtttatggacagagaagaaaccagtgtgtgtgtagtatgtgttttttgcatggggcagttggtaaaaacaccgcgtcccttatctgtatggcttcagagcaatgcgagacggaaaaggttttttgcaaggcttcctgtattttggtaggaaaacattccatttctaatctgtcgaatagagtagcatgacttgtttttatattggcttttatatcatccttgaaatttgcacccaaagatatccccagttaacatctgctataaacatgtagatagtatatatacgagtacgcctctgttcactatgaatttatccgagtatgtgagctgttagcagcagacattttatcgttatttctggctgacttttatacttaatatcagtttagtaaacatggtttacttggagagtgtcgactgtgttatatatccatttgaagccaatgccgaaaacagatgaaaagtagtgtctcagtactacacatgatcagaaactaccaaatcatgatcacgtttatgtgtgaatgtgttagaaaattgtgatgtagtgaaaaaaaaggaagtctgaaatggaaacggactaagggaaggaagcattttacagattgttcaacttttattgaggaactactgtatgccagagacttaggatacaaagataaatgagaagttattggtgggtgacagagctggaaataattatattactatgtcagtgtttatgttgggctcagatgcggtgggagaacagatggtgggttggattttgtcctccaaaaagatgtgttcaagctctaattccctggtacctgtgaatgtgatcttatttggaagtagtatctttgcagatataatcaaattaaaatgataactggtttaaggtgggccctaatccaatgactggtgtccttataagaagaggggaatttagacatagagacatacagggagaataccatgggaagacggagacagaaattggagtgatgcagctacaaagtcaggagcaccaaagattgttggcaaccatgctggcaaccactgagtgttaggaagaggcaaggaagggtgcttccctacagccttcagagggagtgtggtggcgctgctgacaccttgatttcagaagtccagcctccagaactgtcagaagataaatttctgttgttctcagccatccagtttgtggtactttgtaacggcagccctaggaagctgatgcaggtgggattgattcccctgctccagagaaaggactgttttcacagaagaggcgatgcttgaactgaatctgaagggatcaatgtggcttcccttggcaaggcatggagtgaaggtggagtatatcccaagtggggaggacagcacgtgacatggcgcagggcttatgaaacaacatgccttcttctcttcaggtacttaagctacattagtaagaccagaacttagtggtgagggttgaagctggctggacaggcagttaggagtgagtcaggcgatggtgagcctccgtgccagaacaacttgtaggctgtggaagcaaccgcaaagggatggcagcggtgatatatatagttgaaagatcactgtctgctgtgtagaggatggattggaagagtcacagaggcaggaataagaggttaagggcctgcaccagggctgtagcagagagtttaagaagtctgggagattgagtcaccttgacctactgattcattggaaggtggaatgcaatcatggtgtcagtcctctaagataggacctttaaagtgtagggatagtggtttggttttacacgtgttacacatgttgaatttgaggttcttgttggcggtcaaggcagagaagtccagactggaggtggaagtacaggcctagttctttaggacctactctgggctggagcatcagttgcggccgggcccttgtggtagtaggagctttgggttgaacataagttttcagcaggagtgcgtggagtgaaaagagagatggggttggatttttggtcaactccaactttaagagattcagaggatgtgattcctgaaaaaagaggaaaaaaaagaccaaaaagaatcaaacagaaagatggttgtgaacgttgagaaactggtatcagaacagaaggaagaggtctgcagtacctagctttgacaggcctcatggaggagggggtactgccgatggtcaggcacagaggagaggagcaaagcctgctgggaaaagatcatctgaatgaaatagtatgtggtatttgctttccatccacacatgggcattttccattaaagagtggaaatgtaaaaagatatgttaaaattgacagtgtttctttgtcccttaacatgtgtatactttcagatgttttttaaaaagcactttggcaccttcctattaaagagtctctctaaatcttctctcaagtaaaaggaagcaatcaaaaatgttcattggcttaattaattagtttaatactaattatgagtattatggacttttttcagaagaaaatttggataagatagtctcctatgcttttgatttctacctttatcaaagaacattgctaaaatgagtagatacctgagtcagtcagcatttatttggctacctccttttgccaagcactttacatagattatctcatttaattcccataagctcaataaggtggcaccattatttccattttacaggtgagaaatcaggttcagaggattagcttctacccaaagtcataagaccagatggtggcagagttaagatttgactcatgtttgtgactcagagctcaagattttgtaacaaccttgatactctgtttctcactcagcagcacaacaagggcaaatacgttcctactcccgcagagactagtgtccaatagatacagggaatacatattttattcagtgcacactagttgggaattgtttcctacaaagacatgaaaacaatcttcaaatacttgcagtactgtggtttggggaggcaaaatgatcaaaggtatatattacagggaggcagttctggatataatttaaagaaggagggctttcaacatttagaagctgttggaattaaatgacttgccttgggaggtagtgagttttccttcactggagttatgtggaccaactggctgccctctggtgacaaatacagagggaattcatccattggataggggttaggtactggaattacttgagacctttgtatactttatgatttcaaggtggcagacatgggtcattgtcttaatcagtttgggctactataagaaatatattttagactgggtggcttaaacaacaaacatttagtttccacagttctgaagactgggaagtccaaaattgtggtgcagtcagatctggtgtctggtgagagccagcttcctggtttgcaggcctgctttctgctctcacattggagaacagagggagagaaacacagagagagtgtgtgctctactttctctcttcttataagggcactcatcccatcgtggagaccccaccctcatgacctcatctgaacctaattatctcccaaaggtccacctcctgatagcatctcacggtgagagggatggagccgggaaggtttcaacatgtgaatttgaaagggacacacataatgcagtctgtaacgggtcaaatgtaacctcaataaaatgagtaaattgctacatttgcttgaatttgggacctttttttctttcttttttattttagtaaatgtttttattgataaatgattcacataccataaaattaacattcttaaagtgtaagatttcatggtttttagtatattcagaaggttatgcagccatcactactatctaattccagaaaatttactcatccgccaaagaaactctggacctattagaagtcactccccatttccccaaaccctctagtgcctgacaacctctactgtgggaactttaacttttggctttatttttcacagctctcgtggcattatccttcagtggggctattggactgacttttcttatgctgggatgtgccttagaggattatgggtaagttatcatttcaaaaagaactattcctctttctgtgtctttgtcactattagtatgggtgttagagagttcggtcaatttagcaccaagttctaaccagtgagttagtggagcccagtttatgaacacagtccctttgtgggtcaggtgtacttttgcagagggctctgttaaaaattgatgtattcattccataagcatttgtttaacacctactctggactagctggggacacacaaatgaagagagagtcctgtcctcaaagaggaggtaaagttctagttgtgagtgagagacaggcaaacggtctagtcagtaatctggcagctgcagtggagatgccagcacagtacgctggagctcggataaagtgcacctgagtttcagtgggacagtcagggaaggctgcatggcagaggttgtatctgagccaagactaggtggatgaataagagtttttcagggtgatgagtcaggggaggacattccaggcagagggaacattctacacattttttcattcaaccattgttggttgaatgcttcccatgtgccagctactgttatgggaactagggattaagacataagaaaacaaaggtcctgctctctcagagtttgtgtttcagtgggggagacggacagtaaacaacaaaagtatgcatactgtcagaggtagaaatggtacaaaagatgaagagcacagaagctgggaagacagtggtcagggagggcctctcagaggaggtaaaaagtgagaagaaatgtcaagaaaatcagcaagcaggccatacagatctctagggaaaaagcactttaggcaccaggaaagctgaatgctaaggcccggagacatgaaagtgtatatagccttttcaggaaaccacacatggtacattatggtacagcataaattgtagtggagtggcaaaagaagggttagtcaagagtgtaaaagtcagcacttagggctctatatgcctgccgtgtagaggaggttccattttatacatcagacaatagaacctgggaaaatatcttgagaatgggtttggaggagggggttatgttaaaatgtcattcttgccataacgtgagactagataggaaagagctgagactgcagtcagggagaatagtaggggactactatcataaatcaagcaaaattgagggctggggcagtaggaatggaaagaaaaggagagtgagttaggaaaccaaaccaaccaacaggttttgttcatcgatgtcaggattcaacaaggagggagagttcttagatgtctcccaggtgattggcttgaacaactagatagaagatgatgtgattaggccaggcaccatggctcacgcctgtaatcccagcactttgggaggctgaggcgggcagatcacgaggtcaagagatcgagaccatcctaggcaacatggtgaaaccccatctctactaaaaatacaaaaaattagctgggcgtggtggcacacgcctgtattcccagctacttaggaggctgaggcaggagaattgcttgaacacaggaggtggaggttgtagtgagccaagatcgtgccactgcactctagcctggcgacagagcaagactttgtctccaaaaaaaaaaaaaagatgatgatgatgtggttaagacctattgaagtgagttattatgacagtgatgaattcaaatccatcaccgcagtcctggccaactattacagaaattgtttaaacccaagagggatccagatataagcggtcacttatatttgtttagagccttcacagcaattactttattctagcttttggaatgtaatacggtattattatcctcatttctcgctgggaaaccaaagcccagggtagttaaagacttacccagattgaacagcagtaagtgacagagcccggccgtggtggctcatgcctataatcccagcactttgggaggcaacggtaggaggattgcttgaagccaggagtttgagaccagtctgggcaacaaagtgagaccccattctacaaaaaactaaaataagccaggcatggtgcctgtagcagggttgggaggctgaggtgggaagattggttgagcccaggggttggaggctgcagtgagctgtgatcacaccactgcagtccagcctgggcgacagagtgagactttgtctcttaaataaaaaagtagaaaaaaaattaaaatggcagacatggaaatggagctcatgttctgacgcccttgaccaaacgtttttccactattccacaaccaactgtaaatctaggagttttaattctctgtgatacactgtctttgtaaggtaagaaaatgactcattactgctactacaaataagtttgttttctatctttattttaattttttgttttttagagatgccacaacacccagctgattttttttagaagtttttgtagagaccgagtctctctgtgttgctcaggctggtcttgaactcctggcctcaagtcatcctcctgccttggcctcccaaagctgtatcttgatagtgaaccaggattatcatctatattggaagtcagcaaactgccacatataacctgctacctgtttttgtaataaaggttttattgaaatacagccatgctcatttgtttatgaattatctttggctgcttttgcattgctctgccaattatctttggcagagttgagtagttgagatagtctttatggcttgcagatcctcgttatttactctttggccctttatagaaaaagttggcccacccctggcctatgtatttattgaattgtatatatttaatatttacattttatatataaacaaggtttcttgtacattaatatttctcttagttggatatcggtggcttactatgaatgaaaacatagagtcagattgtttttcacaaaactgtcactgtattccaggaaaaattaagagttcttggctgtggatatgtaaggtgacatatctattccaaaccccttcccctctctgtgtctcctttctcactgttgaaagaagggctttgaagtagagaatgtctaagggctacttcccacaatattgtttggtgattcttgaaacatactatcatccctctagtttaaaatcaggggtccaaatccactgtttccatcctgagtcctcttgaaggacacattcccttcttgccttttggttgcctagatctgtggctggaatgggaggctttcattagtgtggcttcatcccaactcctgcttgtaggtgctgtctgggcgtatctgtgtgattacagtattgtggtgatatgaattattgtagtgtatatataaaaatgagcagagactttttttttcttaagaaatgaagcataagaaatgtctgatggagaaaaaaagattatttttgaagtactgatagagaaaatactgttggaaaccagatggcaattttttttttataattgcaaaatgttgaaatttgggaggaaaacagttttgttttgtttttgcattacactattaattgtgagctcttataatgaagatcaaagtacatctaagcttttcactagtgagcatatttattttcatgccttccgtacttaaaatttatttattattttattcatttaacaagtataaatggagtacatcattctaggccctggagataaatggcgtttgatcaagactaatctatcagatgggaataagtgttgtgcagaaagttcaaagagggtggtatgttcgagggtgacctggggtacattagaatagatgaccagggaaagttctgcttttagaaaggaatctgtcagtttagatcacatggtatgaaggagtcagccaatgagaagatcatggggaaggacattgcaagcagggggcacagctagcgcaaaggccccaggataacagctatgagctcaagagtgttcaagggacagaaaaaaggctggtgtggctacagattaagcaaatgaagggaaaagagtacaaaatgaatggaagaagtagataataccagaccataaaggctttgtaggctagggcaaggaatttagggtttattctaagctcttaaaaggtttcaagcatgcgtgcactcaaaagatctttaccgaactagcttttgcaagacactctactatgttctatagggaaggcagaaatgaccaagttaaaattctgtctttaaagaaattgtggctcagtggtacagaaaacagtaaagtttctagggtatatattatatagtggcttcttaacacaatataagctacctacatagtaattttaaaattatcactacttatctatccctggtagaaatcatcttatgttctaatattcacaattaattaattttttgacctaaacatttaaaatagcaatgattttgaaatagtagtatgtctttcatttaaaatgtaactgttacttttctttttggattttgcctgggtccaactgacagcgtttactggcccttattcgtcctgattttccacgccatctcccccatcccccatttcattgccaaaagagtcacctatgactcagatgcaaccagtagtgcctgtcgggaactggcatatttcttcactactggaattgttgtttctgcctttggatttcctgttattcttgctcgtgtggctgtggtaagttttattttctattgttttgcccaaccgttgctgagtttacttcagaggcctgtgtctgggacctccatttcatgctcattacttaggctttatactcaaggccgtgtgtttttagtttctctgttcctctactttagacctgcctaacagtagttcggccatgccttcagagtgctttctttatttctcttacaacttttagccagacgatatgatttcttactttttctactttaagctattctctggaattgttcttaaattcctgcctcttaaatcttacagtaatccacagatactatgctagcagtacttttctagttgcaagatgaagatatttcaaattcttctcctgcaaatgggatcatggactcaactctcaactcagtataataggtatatgttgagggacaactgtgtagcttccagaaaatgcagtgaataagttgacatcttcacttccaagacaaaaactttctttttgtcttcagagtacacattgtaggtataatttattcaattatttgctattcactgtctttcctactatttgattttattccctccaattacgttctattttaattttatgaaactcttatttgaggcattgaatatcagataagcgcaagtcttgttcattcaataaatatctttgcaacaactgctacttgtaaaacaccagaaataagaaataggtactgtctctgctcctgaggaacacagaaactagcttgctgggtaagtatactataagtgtactaagtgagacggttgaagcatgatcagaatgccataggggcaccaagaagagagaaattccgactggcatttgatatgggcctctaaggataaatagcatttgtattgaggtaggatggctgttgtatggaatgacattcaagtgtaagaatgcagtatatagaataaagaagaatccagtgtggtagagctaaaagaaagttgttgaggttaaggctggaagggttgtgaaacctgattagcaatggtcttgaaccccatgccagtttgatctttgtctagataatggggaaagattgaaggtttttgaatacaacaagattgtcatgactttatttttcttgtgctttagaccagcccttcttaagcgctgcagtaaatatttatattttttcctttcaatactgccatcatattttgtgaagaaactttcattgatgtttctcttgcttaaagtaaaacaaaaaatgcccactagagggtactctcacccccaaatgtgcttctgtaaaaccatctacaaaccatctactaagctggaaagcagttttcagttgtatgaagactattatttaaagtcttttcttgcctagaaaagaaacacacaaatttataactctacaatttttattttccatgaaagaagttgatgtgtgcagaactttcagtacccaatattgtaattgcactatttataatcttaccacttgagttttacttaaggcaatcattgtcaattaaaaacaagtagagaaatatgtctaattgggaacatgttaaggatgataccagacttaattaacaagcatcacagaagtaattagactcattactgaacagttcattgtctcctgttacattattaagccttttagcagctttgtgtaacatttcattggatgtttctaatgcagaaaataatagggattgcaaagagtacaatatgaaggaagtaaggatttaatccttcttttcttgtctttcagatcaaatggggagcctgcggccttgtgttggcaggcaatgcagtcattttccttacaattcaagggtttttccttatatttggaagaggagatgattttagctgggagcagtggtagcactttattctgattacagtgcattgaatttcttagaactcatactatctgtatacatgtgcacatgcggcattttactatgaaatttaatatgctgggttttttaatacctttatatatcatgttcactttaagaaagacttcataagtaggagatgagttttattctcagcaaatagacctgtcaaatttagattatgttactcaaattatgttacttgtttggctgttcatgtagtcacggtgctctcagaaaatatattaacgcagtcttgtaggcagctgccaccttatgcagtgcatcgaaaccttttgcttggggatgtgcttggagaggcagataacgctgaagcaggcctctcatgacccaggaaggccggggtggatccctctttgtgttgtagtccatgctattaaaagtgtggcccacagaccaagagcctcaacatttcctagagccttattagaaatgcagaatctgaagccccactctggacccaggacattttgatgagatccaaaggagttgtatgcacatgaaagtttgagaagcatcatcatagagaagtaaacatcacacccaacttccttatctttccagtggctaaaccacttaacctctctgggtgttacctgctcatttgtttaaaaaaaaaaaaaaagtctcacctgctttcatgctgaggacaagttcagatgttcaagcctataatatttaggcagttcctcaaatttatgaaaagtgttctcagaattgggagacagtcaaagggtacaaagcctcagttaggaggaataagtgtgatttttttttaaagatcacttgcacagcatgctaaatataggaataattgaatgtatatttcaatattgctaagagagtaaatttctaatgttctcataaaaaagttaaatatttgagatcatatgttaattagtgtaatcattccaccttatattcaaaaatcataaaaccgtattgtaccctataaaaatatacaataatttgtcaatatataatcaaaataaaaaacaaaacatactctctcccccaaaaaaacatctcagtggggaacagatgtatcttttcatctgaaagacaatgctgggggaagagctccactgagatgcgggcagggaggctgggctcgagccagcccctgcgttagcaggagggggagaacagataggtaactcttttacatttcctttatgatctggcacttctccccagctccttccctctgccccccacccctactcctcaacagttctggtttgccctgacttctctacggctctggcttcttcccgaagagatataggagccatgtaagcacgcagtgggtgaactgcttaatttcactacgtgttgatgtacttgtcttccgtcctgtaggtcttttctatataactttatgccacccttaaatgaatcattgggtatacctgtcatgttggatcctgtaatcacagttttccctgctcacctttttgtctaagatctattgagaaagggaaatatgggaaggagaaccatttgatcagaatacaaccaatagtctttaagcattgttaaagtatgaaactgaaatacattcaaaacacttaatccttgaggcttgtgatctgagtaattagcaggtatgatgctgggactggaaaatagaaagtaataactaaagggttaatgtgcaacgttattttttggccttgttcatgattttatgttttcagtgtcctgtgtacatatagaattgttaaagttgtcatttccaatatttatattagaaaaattatttagatactttataattttaaccggcatttttaataatgacacttgcatttattgtattgtaataaatttcacttttaactttaaaagtttaactttaaaatttttttgtgatgttgccttgcctgaaaagataacaaaaatgagagaatttcttgatgttttaaaatgggcagttttgagcaataatctgtcctaacagaacagtagcaataagttttaggataccatcttgaatgtctagttggtgtgcaatagcttttctttctaagatggcaataatgattcatttctactacattttgcaaaagtgtttttgttgcttatacacattttcaataaccaaggtagccttcatatgtagccttaaagcattacctcttgattgtatctttagattgatataaagtacttgcatatagagtatttgaagtgatagattattagatttgctctatgtctgaaaagagagctattctgcagtgcctaaatatcatttaaacagtaaatattaataggaaatattgctatatctgaatatataatacaaaagtttgatcatggtgacacaaatgttggacatttttttccttataaaaggctctttttttatatattgtacaatatatttggagattcagagcatagtgactatagtcgaaaactgagattgcacttccaaaattggccacaagtaaataatcttatgaagggattctttatcatgtttcaaacaagtgggttacaagcagactttgagacacttttccacagaaacaatactatgaattggtgattgagttcccaggccaagcctccctcaacaggttcaactctaatatacctaacctgtgatactgaaggtgcctgcctgagttttgggtctctgagacagggtagtgtgagtagtttggaggaaggacagtgcaactttccaccccttttcctaagaacaaggtctttctccttttaatttttccactcattttcacctcctaatgcccttgagatccaggtacactcctgggagttttgttcacctctcccaactgagaaccttcccactgggctccatcctccctcctgaggttcttcatattccagagtcacccacccttctcctcccattagtcagttctctaagtacagctgatgtcatgtggtgctgagaagaaagcagatcacacttcatcacagaaagaatgccttgtgattatcttctccacatctgaaattccttttgacacctgcattgggccgactgccattcccatgactgctgcacctgcgtttttagagaatgcctcataacccactgattctcattcacagagaatgggagaacggaatgaagaaagattccagcagcttatagaaggatagcaatattttgggacagggaaaatcctgtcatacctcatctcttcctcaggaggagttctgagctggtcctgcttttcatagttgtttcttttcttccacttaagaactcatagatttttcttactgtcctaaggaagtccttacctctgaggtatctcctcaatgaatactgttttcaaggctgaaatagttcattatgttaataaccttctttatgttctcagggaaatgcttaggtggtgtcacaaaatgtgccttttcttttctttttttttttttttttttgaggcagagtctcgctctgttgcccaggctggagtgcagtggtgcgatcttggctcactgcaagctccgcctcccgggttcacgccattctcctgcctcagcctcccaaggagctgggactacaggctcccgccaccacgcctggctaatttttttgtatttttagtaaagacgggtttcatcgtgttagccaggatggtctcgatctcctgacctcatgatccgcccgcctctgcctcccaaagtgctgggattacaggcctgagccactgtgcccagccaaaatgtgcctttgcaaagtttgcgaaatcagattttgtatcccaatagaaccaaaatatttatgaggatgctagcattttccaagcatagtaattagttcacaactgagaaatattatgtctgtagtagataaatattagttgtgcattttaatttaattctcctttttccattttgtctcatgaagtaccttattgcaaaaatcccactgagtaatagctcataaattataatctttcaaatagccatgctaccagcgtacaacagtgatacatgtaaccccaaatgtgatgtgagaggacgattactttgtaaataaaacttgttattgacattttaa

SEQ ID NO: 18 - DNA, 71540 bp, Homo sapiens
gcagggtgcacacagagccgcctttcagccgcccgagaactgcccgccgcactccacgactgcggcgcctgctctcgggccggggtctgcgcgcaccacgcggccggcagaaagggtaagagaagggaaccccgctttgcagggctccaacttcggcggacgcgttacggcgagggcgaaatgagtcggccgtgaacggtgtttcctgttccgaatcccgagagccctggaaagttttgaaggaggaggcatggcccggcagccttatcgttttccccaggcaaggattccggagagaggatcaggtgttttcaggttaaccgtcaggtgaggagtctgggcttcatctttcaggatgctggactggagaaatcttcctaaagtcgatggctttactttcgtagactagagcttgcttgctgccttgggaatgcttatattaactgcttgcagttagttaaataaggctaggctgtgccttccagaacaaacaggcctttccctcaggtgggagggttgtagtgtggctaaccccagttcctcggcctttatgaaaaggcgcacagttcagccggttggcgctgccagcgggcccctcctccgtggtcaaacctccagccaccccagcacagttgagccaaagttgtgagtacaaacagaccttggctcccccgtttcctgctctccaaacatatatatatatatatatatatatatatatatatatatgaaatatatacgtatgtgtaagtgtgtgtgtctctggttgaacggtacttgtgggaaacaaaattgtgtgtcattgtaaactgagaatggaagaaaaggttagtaagagaaaggtgggagaggtttcttatgggtgtcaggatgtagactctgatattttatgtagagggaaccaactacgtagttctccccagaaatgggatgtgggtttcactctcaggagctgctcatcacctttgtgatgtgctaaccaaaatcgcacaacttttgggaaatttgatagctttcccctattgagtcagaagtttcttgagactttagcctgtcttcctcttcataccttaagaggagtcaaactcccgttgccgtgaactttccacaggcacacccttctcctttagaaaaccgttcataggtcagtttctgtggccggaactctaaaaacgacacattttccatacagaggccatcataataccaattttatttaacctcctgtaataaaaaatgagtgaatcctaataaagtgtttgaggtagccacattcttttctgtgaaggaggaacatatcaaaagtgtttttttttaaaaaaatagagtaatagatataaaatattttaatgaagcaagtgagaagaactgagagacatagtttgagcaaaggggcacgaaatacagaactgaaagtcaagaatgatcatattcacaagctgatctctttggctatgtctctgtcagtgaagtgaaacctagaacaagacaattttaaaaccggcggaaaaagagatggcttcttgtgactatagctttcaaagtaaaagtagtggccaaagaaaactcttctggctgtaaaagtaaaagtggactttcctgaagctgggctgttttctttaaggcctagggtctaagttccgtgtgtcagttctgaagaattaaatcactctttagtgagctcttgtgtcacatgttaaggggttcatagaaaaaagtgcaggcataccttgttttattgttctttgctttattgcactttgtagatactgcatttaattcaattttattttattttacaaattgaaggtttgtggcaaccctgtgtccagcaagtctattggtgccatttttccaacagcatgtgctcactttgtgtctctatgtcacattgtggcaattctctcaatatttcaaactttttcatcattattattatatctgttatggtgatctgtgaccactgatctttgatgtgactactgtaattgttttggggtgccatgaactgtgcccatataagacagggaactcaattaataaatgttgtatgtgttctgactactccaccgaccagccattcttctatctcttttcctctccccaaccctctctattccctgagacaccacaatattgaaattagcccaactaataaccctacagtggtctctaagtgtttgagtgcaagggacaatcacaggtctcttactttaaaggtaggagtgattaagcttagtgaggaaggtatgttgaaagctgagacagaccaaaagctaggcattttgtgccatttagccaagttttgaatgcatatgagatgttcttgaaggaaattataagtgctactccagtgaaaatacaaatgataaggaagcaaaacagccttattgctgttatggagaaagtttttgtggtctggatagaagatcaaaccagcaccaacattcactaaagctaaagcataatctagagcaggcccaaactctcttcaattctgtgaaggctgagagaggtaatgaagctgcagaagaaaagtttcaagctagcagaggttggttcatgagctttaagaaaggaagccatctctataacatgtaagtgcaaggcgaagcagaaagtgctgatatagaagctgcagcaagttagttggaagatgtagctaagatcattgatgaaggaggctactctaaacaacagattttcaatgtagacaaaacagccttctattggcaggagatgccatctaggactttcctagtagagaggacaagccagcatctgatttcaaaggtgcaaaggacaggatgactctctagttaggaactagtacagctggtgacttttaagttgaagccagtgctcatttaccattccaaaaatcctagggcacttaagaattatgttaatctactctgcctctgctttgtaaatggaacaacaaagcctagatgacagtacacttgtttacagcatgatttactgaatattttaagctcatggttgagacctactgctcagaaaaaaagatttctttcaaaatattactgctcattgataatacctctgatcattgaaaagttctgatggagatgtacaaggagatgaatgttgttttcatatatgttaacacaacatccattctgcagcccatggatcaaggagtaatttcaactttcaagacttattatttggccgggcgcggtggctcacacctgtaatcccagcactttgggaggccgaggcgggtggatcatgaggtcaggagatcgagaccatcctggctaacaaggtgaaaccccgtctctactaaaaatacaaaaaattagccgggcgtggtggcgggcgcctgtagtcccagctactcgggaggctgaggcaggagaatggcgtgaacccgggaggcggagcttgcagtgagccgagattgcgccactgcagtccgcagtccggcctgggcgacagagcgagactccgtctcaaaaaaaaaaaaaaaaaaaaaagacattatttaagaactacattttgtaacattataggttgccatcgaaaattattcctctgatgaatctggacaaagtaaacccttctggaaaggattcatcatcatggatgccattaagaatattcatgattcatgggaataggtcaaaatattaacattaacaggagtttggaagaagttgattttatccctcatggatgactttgaaggggtccagatttcagtagaggaagtattaggtcagtgaaaaagtaattgtgggttttgtccttacttttaatggcaaaaaaacacaattacttttgcagcgatctgctaaccacagatgtggtggaaatacccagaaaactagaagagaagcctgaagatgtgacagaattgctgcaatctcatgatcaaactagaatggatgaggagttgtttgttatggatgagcaacgaaagtggtttcttgagatggaatctactcttggtgaagatgctatgaacattgttgaaatgacaacacataatttagcatattccgtaaacatagttgataaaacagcagcaaggtttgagaggactgactccaattttgaaagaagttctactgtaggtaaaatgcaatcaaacagcgttgcatgcaacagagaaatattttgtgacaggaagagttaattgatatatcagacttcattgttgtcttcttttaagaaattgccctaaccaccccagccttcagcaaccaccaccctgatcagtcagcagccatcaacaaggaggcaagaccctccaccagcaaaaagattacagcttgctgaaggttcagatgattgttagcattttttagtatgaagtacttttaaattaaggtggtttttttagacataatgctattgcagacttaatagactatggtatagtgtaaacataacttttatatgcactggaaaaccaaaaaatttgtgtgacttgctttactgcagtatttgctttattgtggtgatctggaaccaaacttgcaatatctctgaggtgtgcctgtaattttatttccagacttcatcttatcaaactacaatgttctgttcagtattaaatgtttacagccatgtttttggtttgtttatttgtttgctttggcaatcatctgaatttttttttcttcccgttcttctcagcctgcctatagctgagctttctactctgttttgagcttgggcctcagccccttttttcctggtatgagagactgtgtccagcgaatgttgtccatattccttttccctcagctgggtgggctgtttcctttcttctcttttgaaggttgtgttttgttttctccccttgaatacatctctgtaatttcagcctaaaacatctgcgaggcaataattgataactcatgaggcagaagattcttgaaaatagtctttggtgtaattctagaagacccacaatttaaatggtggccttaaaaaattgtactacttatgccaactacagggattttctagagatagctagaatgtagggattcaccaacatgaaactgagttgggcttgtccaaaattaaggtaacctcaatgctttgaggaaaaaatgattatttctttataatttcttttccttagggagagtcatcagcatgactctattaagttgggctcttactgaaaatattggagaaagaaaaatgttaggaaatgtcataattccagtcatcttcctcagttttaactgcatgtggaatcctttattgctgagaaatggagtttccctttctttatctcttcctcagagaactgtttcttctagtttccaaaggagtgtggcttgtttagaagaagcactttaaaagtatgcagccctagttctgctttcctggtgttcagaggcagcaaagtggtgatcagaggtgatttttaggaacttggtggcacggttgtctgtaggaaaactcctgaagggttagcatgttcatctttcatgagtggctctaatggaaaatgaaaagcccctatggcctttcttcagggggcttcttagggttagaatgaccatgtcatttatgttctgagagctgtgctgagaagggaaccaaagttttcttctttgccttttttcccctcaacttcacttaattgacatctgcctgccctactcagctacctcaaaacctcagttggctagatatttttctttcttcctctcttgtgagactagcagatcacgagaaaatttgttcatcgtaggaattggagtgaaaaaatgacgtgcgagttgttaggaatggtctaaagcattttatctgttgaactgcccctggtattatcctggggccaacacagtcattactgtagaaacattgaattttagtctccgtatctatcacttcttccaccctctaccccaaaccagtcgtgcacaaactaaggcagggaaatacctgactagctgatacataccagactctttctttttgaaatggcccattttaactcataataataactcaagaattcatacgttaaccaccaaaaatgaaaaaaatatggaaaacttaatgaagaaaattaagattacctataatactacttcacagagattataaaaatatggaggcttttttggctggctcacatgcttctagactttaaaatgtctatatacacatataaatgctagcttttttttttccagcctgggtcgtgttctgtcacccaggctggagtgcagtggcacaatgacagcttactgcagcctcaaacttcaaggctcaagcgatcctcctgcctcagcccccccaagtaattgggactacaggtgcctgccaccactcctggctagcttattattattaattattattattatttctagagatgggggtctccctatgttgctcagactggtctcaaactcctgggcccaagggatcctcctgcctcagcttcccaaagctctgggattacaggcctaagccaccatgcccagcttatgctgacattttttgaaaaatgagatctcactatatctattctgtaactttaaaaaaattacaatatgttatagacatcttcaagtcagtgcaaaggtacgaatagggccgcaattaacatttctataactaactcattattttaaaatttgtattataaatccatagaagtttgattcttttttttaattattattatactttaagttttagggtacatgtgcacaatgtgcaagttagttacatatgtatacatgtgccatgctggtgtgctgcacccattaactcgtcatttagcattaggtattttttttttttttttttttttttttttttgagatggagtctcattctgttgcccaggctggagtgcagtggcgcgatctcagctcactgcaacctccgcctcccaggttcaagcgattctcctgcctcagcctcccaagcagctgggattacaggagcacaccaccatgcccggctaattttttttgtgtttttagtagagatggggtttcactatgttggccagacttgcctcaaactcctgacctcgtgatccgcctgccttggcctcccaaagtgctgggattacaggtgtgagccaccacgcccggcccagaagtttgattcttaagtcacttttatagatactgcccaagtgccaatccaaatttacatttcttttaatagtttgaaaatcattcctcataaataaaaattaagataggtttttaccaacctgattgttagtaaatttttattgttcaatgttcactggcttgttcagattcattgcctattacattggattgtctttttcttaatagtctggagctctttacagatcacaatagatagttaacttttgcctgtgtaaatatattgcacatttttctccaaatctctttgtcttttaactttttgaagtcttaaatttttatgttaagatctttcagtcatttttacatcttctaaatttttttgtacttaaaaaggcatgttaaattattttaaaaatcctatatattatactactatcaattttgttttaaaaatatgtctaaattttatttttgcactcagtttgagagaatactctttctctttcccaaatggatagcaaattattttaataacaactcattgaataatttattctttggaaagactaggaataatgagtaaaacaaagtagggtttctatcatcagcaaaccaggcaactaaattacctacaacttgctaatgtatcttgactaagtaagacttacttttaaatatatttttaattcactttttaatactaatattttagactttctattatttttatcatgttattaatattgttgttattattatttgatcacaaaagatattaaccaaggaaaagttcgtgtagtcaagattgatgtctcattattgattcatttgttttttccaacagattttcattgaacacctattatgtgttagatactatgctgtatgctgggctatatggttataaacaagacccacccttcatgaagtccattgtaggggagaccaataaagattgtgattgcaattatgaaggaaataaagtgatgatagaggcagtggggaaggccacattaatagagtggccagagagccctctctaccgaggtgtcatttgtgctgagagatgaagggtgacaggaagaaaccagacacacaaagagctgggggaacagcagtagggtggatgaaatggtgagtgaaatgtgcagagcggggactgtccacacccaggaaggaagtcattgtgtagtgaggaaggggaagagggtatgggaggagtgggcaggagtcttttagcagttgtaggaggtttggattttactctgagagaaggggaaagcccctaaagggttttcaacaaagaagtgatatctgacttatgcttttaaaattacccctctggccactatgtgaagaattgggaggctattgcagttgggtaagagatgacagtgcttggaccagggaggctgcagtgcatagacagtgatggggaccactccttgtggttttgaaggaaaacttgataaattgaatgtgagaattgaatacaaagggaactcaaagtatactttagagcagtatactttagagcaaagtatactttgctacacattagaatcacctgagtaacttataaaaatcttgatgcccagttcagtcatcctactaattaaatcagaatgtcttggggctgagaggcaagcgctgaaatattttaaaaatcctcaggtgggctggacacagtggctcacacctgtaatcacagcactttgggaggccgaggtgggaggattgcttgagtccaagagttcaagaccagcctgtgcaacatagcaaaacctgtctccatttaaaaaagcaaaaattaaaattaaaaaaaaatcctcagatgattctgctgtgcacccaagatggagaatggactaaggattgcagctgggccactgattgcactaaggattccaactgaagcattttttaaaaatactaatagcaatgcatttcttttaaaaaaattatttcagtagtttttagggaacaggtggcatttggttacatgaataagttctttagtggtgatttctgaaatttttgtgcacccatcacccaagcagtgtacactgtacccagtctgtattcttttatcttttacgccattccaaccctttcccgagtcgccaaagtccattgtatcattcttatgcctttgcatcctcacagcttagctcacacctataagtgagaatatatgatgtttgtttttccattcctgagttacttcacttagaataatggtctccagatccatccaggttgctgcaaatgccattattttgttcctttttatagctgagtagcattcaatggtgtatatataatctatatacatctatacatctatatatctatatacatatatacatatgtatgtatatatttctatatacatatatacatatgtatatatagattgatatacatctatatacatatgtatatatctatgtatacatctatgtatacatagatgtatacatctatgtatacatagatgtatacatatatacatatgtatacatctatgtatacatatgtatatatgtatatatatctatatatacatatatgtatatatgtatatatctatatacgtatataggtatatacatatataaatatatctatatacatatgtatatatctatataaatatatggatatatatctacatatatctatatacatatatctatatatctatatacatatagatgtatatgtatctacatggcatatgtatatagatatatatatacatctatatgtatatctatatacatatctatatagctgtatatatatgccatatatatagatagatagatagatagatagatagatagatatgcctatatatatcaccttttctttatccattcattgattgatgagcatctgggctggttttatatttttgcagttacaaattgtgctgctataaacatgcgtgtacaagtatctttttcatataacgacttcttttcttctgggtagatacccagtagtgggcttgctggatcaaatagtagttctacttttagtcctttaaggaatctccacattgttttcagtggttgtatgagtttacattcccatcagcagtttaaaagtgttgccttttcaccccatccccgccaacatctattttttgattttttgattatggttattcttgcaggagtgaggtggtatcacattgtggttttgatttgcatttccctcatcattagtgatgttgagcattttttcgtatgtctgttggctatttgtatatcttcttttgagaattgtctattcatgtctttagcccacgttttgatgggattatttttttttcttgctgatttgagttccttgtagattctggatattagtcctttgtcagatgtatagattgtgagattttctctcactcattgggttgtctattctgctgattgtttcttttgctgtgcagaagcttttttttttttttttttgagatggagttttgatcttgttacccaggctggagcgcaatggcactatcttggctctttgcaacctccgcctcctgggttcaagtgattctcctgcctcagcctccctagtagctgggattataggcatgcgccaccaccatgcctggctaattttgtatttttagtaaagacagggtttctccatgttggtcaggctggtcttgaactcccaacctcaggtgatctgcccacctcggtctcccaaaatgatgggattataggcgtgaactaccacgcccggcccagttttattcttctacatgtggcctgccaattattccagcaccatttgttgaatagggtatcctttccccactttatggttttgtttgctttgtcgaagattagttggctgtaagtatttggctttatttctgggttctctattctgttccattggtttgtatgcctgtttttatatcagtaccatgctgttttggtgactgtggccttagagtatagtttgaagtcaggtaatgtgatgcctccagatttgttctttttgcttagtcttgcttcagctatgcaggctcttttttggttccatatgaattttaggattttttttcctagttctgtgaagaatggtggtggtattttgatgggaattgcattggacttgtagattgcttttggcagtatggtcattttcacaatattgattctacccatccatgagcgtgggatgtgtttccatttgtttgtgtcatctatgatttcttttagcagtgtttggtaggtttccttgtagaggtctttcacctccttggttaagtgtattcctaattttaaattttggttttttttgcagctgttgtgaaaggggttgagttctttatttgattctcagcttggtcagcagctgaagcatttgaataagtgtgtacagatcactgctttgagcagatgggtggaggagcaggtggagggcaggtttgagagaccaattagacctgtgggtggagtttcataaaaagggttggataaggaagtctgctcaagagagagatttgctggagatgcaaatatggaaacccacatcatgtagagagtatttaaagtcataggattggacaagctgttttagaacagaagatggagactagaagaacccatactgtgccccaaggcactctgacatcaagaggaggggggtgtcctggaaactgacagaagaggttgtcccaaggaggtagtggtcagctgtatcaaatgctgctgagccaataagcctgaaaagtgtttattagaatctatagcaagaaatggtttaccctgagcattttaatggagtaatagaaatgggaacccagtgtttgttctagagaatctgtaccacaaagtcagcttgaggaggtaaatgctgggttcgttccatcagatggctttacttttttttttttcctcattttgataatatgaccatgtagaagtttcttgaatgtatggactaggatggctgtttgccaaaatgtcacacatttttaattttatttcaatttttctttgagacagggtcttgctctgttgcagactggagtacactggtgtgatcacagctcactgcagcctcgacctccctggacttgagcaatcctcccacctcagcctcccaagtagctgggactacaggcacgagccagcatgcccagcaaactttttgtatttttagtacagacgggttttgccatgttgcccaggctgttctcaaactcctgagctcaagtgatccaccgccttggcctcccaaagtgctaggattacaggcaagaaccaccacatttggccatattgagttattttatcctttggtattaatatattgcttgctttcaacaaaacaggaagagaggaatggatactgcgcaggcaactagtagtgtctgtcacaggaagtcttaacaatttacttttcaggcttcctttcccaggaagggattgaagaatattctccacaaaatgagagagtaaagaaagaagcagacatgggatccaagagatggggattccaatttaggaaggtggtgaaggagttcccaaagttatggccttgaaaagtgattagaaagcaaccaggtagatttgagcaaaaggattgtgcaaaagcattgatgtctctctgtggaagaaaggaattgacagggtacctggcttgtgtgtatttaagggtgctgtcagattcagccagagtttggtgataaagttatagttggtatgcagaaaactaaacaaatggggaaaagggcagttaattccaggaaaatagttggaatgatgaagaatataacattacagtatgttaatagctcaactctgaagaatttttacatattcacttcataaaatctaatgttaatttatccaaaatttgcattaaaacttggttgggaagatgagtagggaggtgaaatgtatgttggggagcagatataagagctaaatccatattttccaagggaggattcaaattgataatacctaaaatgaaaaaatagtggcataagtattatttagaaattttaaagtagggctgggcgcagtggctcacgcctgtaatcccagcactttgggaggccgaggtgggtggacataaggtcaggagatcgagaccagcttggccaacatggtgaaaccctgtctctactaaaaatacaaaaattagctgagcgtggaggcgtgcgcctgtaatcccagctactcgggaggctgaggcaggagaactgcttgaacccgggaggcggaggttgcagtgagccgagatcgcaccattgcactccagcctgggtgacagggcaagactctgtctcaaaaaaaaaaaaaaaaaagaaattttaaagtaaatgacttttaaaaagacagataaaagtagttgcacctaaggaacagaaatcggaggtggggtttattaataattcatttaaaattatgtacagaccaggcgcagtgtctcacacacctgtaatcctagcactttgggaggccagggggaaggatcatctgcatccaggagtttgagaccagtctgggcaacgtggcaagaccctatctctacaaaaaaataaaaaataagctgggcatggcagcatacacctatggtcccagctactctggaagtgaggcagaaggattgcttgagctcaggatgttaaggctgcaatgagccatgattgcatcactgcaatcccacctgggtgacagagtgagatcctatctcaaaaaaagaaaaagaaaagaaaaacaaaaatacagttgtgtacattattaaatttgggggaaataaaggtggtggggagttaggtgagaccagattgtgcagagccacacagatttgggttgctggtgtggagacctgggaggctggcttaccactcactgtgatgaggataaaaatgaaggatagatttgggaagtgatttgccctgcctaccctgccccatcccctgagactggtaagatatacttgtgaattaaaaaaaaaaaattcttccggactcagtggctcacccctgtaatcccaacactttgggaggccagggtgggtggatcacctgaagtcaggagttcgagaccagcctggccaacgcagtgaaaccctgtcactactaaaaataaaaaataataataataaaaaattagccgggcatggtagcaggtgcctgtagtcccagctactctggaggctgaggcaggataattgcttgaacctgcaaggtggaggttgcagtgagtcaagatcgcaccactgtactccattttctgtattttctgtttgtttgttggggtcaggggaacaaacataaatttctttaaagctaacaagtttataatagcagttaggacaacaaagaacaaccacagctaaggggtggttggagctctgaaacaataaggaagtagttccaaatattttttataacttgttcccaacagttgaaagaacatttaccctctctaaatacgtattcatttacatatcatatgctgaaccatatgtatattatgaaacagataaaatgaacattttaaggcatgggatagatgaggatattaaaaatgaattgccaggctggacatggtggctcattgcctgtaatcctagcattttgggaggccaaggccggaggcttgcttgaggccaggagttcaagaccaacctggccaacatagtgagaccccatctctatttttttattttaaaaaattaaaataaaaaaatgaattgccaaatgcagcaactttatgttatgacttcatagtgtcattagcaaatatcttatggtactatatatttagagccatgcacctcatttagcagtagtagatttaaccaatattttaaattgttttcttgataaatctgcttccccccaccccagcttcttttcaaatcagatacacttttcatcttttttttaaaaaaaaaaaaacccatggctaacaacatttagagtgttagctctcctattttttgatattaatttaggcttacattagttttacaataaacgtaattttttgcaataattttttatcttttatttttaatttttgtgggtacattgtagatgtaatatttatgggatacatcagatgttttgatacaggcatgtaatgcattataatcacatcatggaaaatggggtattcattccctcaagcatttatcctttgtgttacagacagtccaattatactctttaattatttttaaatgtacaattattattcactgtagtcaccttggagtgctatcaaatactaggtcttattcattctttctctttgtacccattaacccatccctactgcccctttatcccccacctctctgccacactattcttcccagccgctggtaaccatccttctactctctctgtccatgaatttaattgttttgatttttagatcacacaaataagtgagaacatacggtatttgcctttctgtgcctggcttattttacttaacataatgatcgccagttccatccatgttgttgcaaatgacaggatctcattttttatggctgaatagtactccattgtgtgtatgtaccacattttctttatccattcttctgctgatggacatacagattgcttccaaatcttagctattgtgatctggtctgcaacaaacatgagagtgcagatatctcttcgatattactgatttcctttatttttggcatatacccagcagtgggattgctagatcatatggtagctctatttttagttttttgaggaacctccaaactgttctccatagtggttgtactaatttacagtcccaccaacagtgtatgagggttcccttttctcaacatcctcaccagtgtttgttattgcctgtcttttggataaaagccattttaactggggtgagatgatatctcattgtagttttgatttgcgtttctctagtgatcagtgatgttgagcaccttttcatatccctgtttgtgatttgtatgtcttcttttgagacataacgagtctattcaagtcttttgcccattttgccataaccagattattaggttattttttatagaattgtttgaactccttatatgttctggctgttaatctccagtttgcaaatatcttctccctttctatgggttgtcttttcactttgttgattgtttcctttgctgtgcagaagcttttaaacttgatttggtcccattcgttcatgtttgctttggatctgtgcttgtggggtattgctcagtaaatttttgtcctggagattttccccagtgttttcttgtagtagtttcatagtttgaggtcttaaagtctttaatccattttgatttgatttttgtatatggtgatagataggggtttagtttcattcttttgcatatggatatccagtttccccaacaccatttatttaagagactgccttttccccagtttatgttcttgtcacctttgtcaaaaatgagttcactgtaggtgtgtggatttgtttctgggttctctattccattccattggtctgtgtatctgtttttgtgttttgtatctgtgtaataccatgctgttttggttagtaaagctatgtggtatattttgaagtcagataatgtgattcctccagttgtgttctttttgctgaggatagctttgactattctgggttctttgtggttccatatcaattttagggtttttttctatttctatgaagaatgtcgtggatattttgatagggattgcattgagtctgtagattcctttggagtgtggacgttttaacactattgattcttccaatttatgaacatgaaatttctccatttttggtgtcctcttcaatttctttcatcagtgttttacagttttcattatagagatctttcacttctttggatgagttaatttctaggtattttatttgtggctattgtaaatgggagtactttttaattttctttttcagattgcttactcttgcacatagaaatgctactgatttttgtatgttgatattgtgtcctgcaactttactaaaattgtttatcagttctaactgttttttagtggagtctttagtttttttccaaatataagatcatctcatctacaaacaaggataatatgacttcttcctttccaatttggataccctttatatctttctcttatctgattgctctagctagaacttccagtactatgttgaataacagtggtgacagtaggcatctttgttgtgttccagatctgagaggaaaggctttcagtttttccccattcagtatgatactagctgtgggtatgctgtatatggttcttattatgttgaggtatattccttctatatccagtttattaagggtttttatcatgaagcaatgttgaattttatcaaatgctttttcagcatcaattgaaatgatcatattgtttttatttttcattctgttaatatgatgcatcacattgattgatttgcatatgttgaaccatccttgcatcccagggataaatcccacttggtcatgatgaatgatctttctaatgtgttgttgaatttggtttgctagtattttagttgaggagttttgcattaatattcattagagatattggcctgtaattttttttatgtgtctttgtctggttttgatatcagggtaatactggcctcataggatgagtttggaagcattgtttcctcttctatttttcagaaaagtttgagtaggattggtattagttcttctttaaacatttggtagaattcaacagtgaagctgtgatggttaatatgagtgtcaacttgattggattgaaggatacaaagtattgatcctgggtgtgtctgtgagggtgttaaggagattaacatttgagtcagtgggctgggaaaggcagacccacccttattctgggtggacacaatctaatcagctgccagctgggctagaataagcaggcagaaaaatgtgaaaagagagactggcctagtcttccaccctatgtctttctcccatgctggatgcttgcagccctcaaacatcagactccaagttcttcagttttagaactcggactggctctccttgctcctcaacctgcagatggcttattgtgggaccttgtgatcatgtgagttaatacttaatatatgtattatatatgtatatatgtatatgtgtgtgtgtgtatatatatatttatacacatatacattccattagttctgtccctctagagaacctgactaatacagaaaccatcaggtcctgggcttttctatgctgggagacttcctgttacagcttcgatctcattacttgttattggtctattcaggttttggatttcatcctggttcaatcttggtaggttgtgtgtgtccatttcttctatattttccaatttattggtatatagttgctcatagtatccaataatgatgtgaatttctgtagtatcagttgtaatgtctcctttttcatttctgattttatttattggatcttctctctggctaaagttttgtcaattttttttagctttttgaaaaaccaactttttcattgatcttttgtattattttctttatttcagtttcatttatttctgctctgatctttatttatgtttctactaattttgggtttcgtttgctcttgcttttctagttctataagatgtatcattagattgtttatttgaagtttttcctttttttttgaagtaggcagttaaagctataaaattctcttttagtactgcttttgctgtatctcttagattttggtaggttgtgtttccattatcatttgtttcaagaaatttttaaatttctttcttaatttctttcttgacccactggtcattcaggagcattttatttaatttccatacatttgtatagtttccaaaattccttttgttatttgtagttttattctgttgtggttagaaaagatacttgatattatttcaattttgttaatgttttaagacttgtcttgtgacttaatatatggtctgtccttgagaatgatccatgtgctgaggaaaagaatgtgtattctgtagccattggatgaagtgtcctgtaaatatgtattagatccatgcagtctatagtgcagattaagtccagtatttctttgttgattttctgtatggaagatctatctaatgctgaaagtggggtgtttaagtctccagctgttattttattggggcctatctctcttattagctctaataatatttgctttctatatctgggtgctccaatgttgggtacatatatatttaaaattcttatatcctcttgctgaattgacccctttatcattatatagtgaacttttttgtctcttcttatagttgttgtcttaaaatctgttttgtctgacaaaagcatagctactcctgctcttttttggtttccattggcatggaatttctttctccatccctttattttcagtctatgtgtgtctttataggtgaagtgtattttttgtaggcaacagatcagtgggtttttttttcatccatttagccagtctatgtcttttgattggagagtttagtccatttacatcaatgttattattgataattaaggacctactcttgccactttatttattttctgattgttttgtggtcttctttctctccttctttcttgtcttcctttaatgaaggtgattttctctggtgatatgatttagtttcttgctctactttttgtgtatctgttgtatattttttggtttgaggttaccatgaggcttgtaaatactatcttataaaccattattttgagctgataacaacctaaccctatttgcataaacaaacaagcaaaaaaaataactaataaaaactctatgccttaacatcgtctccccaactattaaactttttgttgtttatatcttattgtactgtctatgtcttgaaaagttgttgtagttattattttttattggtttgccatttaatttttctacttaggataagagtagtttacacaaggaagttacagggttataatattttttgtttttctgtgtactttctgataccagtgagttttgtaccttcaggtgattacttattgctcattaatgtccttttctttctgattgaagtactctcttcagcattttttgtaggacaggtctggtgttgatgaaatccctcagcttttgtttgtctgggaaaatcttttttttgagatggagtcttggtctgtcacccaggctggagtgcagtggcatgatctctgctcactgcaacctccacctcctgagttcaagcaattctcctgcctcagcctccccagtagctgggattacaggcctgcgccaccatgcctggctaatttttatatttttagtagagacggggtttcatcatgttggtcagactggtctcgaactcctgacatcgtgatccacccacctcggcctcccaaaatgctgggattacaggtgtgagccactgcacccgaccttgtctgggaaaatctttatttctttttcatgtttgaagaatgttttcaccagacatactattctagaataaaagtttttctccttcagcactttcaatatgtcatgcccctcactcttggcctttaaggtttccactgaaaagtctactgccagatgtattgatgcttcattgtatgttatttgtttttttatcttgctgcttttaggatccattctttaaccttgatctttaggagtctgattattaaatgccttgaggtagtcttctttggattaaatctgcttggtgtcctatataaccttcttgtatttggatattgatatctttctctaagcttgggaagttctttgttatttccctttgaataactttctactcctgtctctttttcttcctccttcttaaggcaaattactcttaaatttgccattttgaggctatttcctggatcctgtaggcatgcttcattgttttttattctttattcttttgtcttctctgactgtgtatttttaaatagcctgtcttggagctcactaattctttcttctgcttgatcatttctgccattaagagactctgatacattcttccttatgccaattgcatttttcagctccagaatttcttttagattctttttaattatgtcaatctctgttaaatttatctgatagaattttgaattttctgtcttatcttgaatttctttgagtttccttaaaagagctattttgaattatctgtctgaaaggtcacctgtctctgtttctccaagattgggtccctagtgccttattaattcatttgatgaggccatgttttcctggattatcttgatacttgtagatgttcatctgtgtctgggcattgaaaagttaggaatttattgtagtcttcactgtctgggcttttattatctgtccttcttcagaaggctttccagatatttgaaaggacttgggcattgtgatctaagttctatctgctttggagggcaccccaagcctagtaatgctgtggttcttatagactcatggagttaccaccttgaacaagatctagaagaattctttggattaccaggcagagactcttgttctctaccctttttgtctccctaacaaatggagtctctctctcagtcctgagccatctaaagctagggatggagtgacacaagcacccctgtggctactacctctgtgactacactgggtcagacctgaagtcagcacagcactgggtgttgcccaaggccggctgtaactactccctggctacttcctgtgtctgcttatggctctggggctctatagttagcaggcggcaaagccaaccaggcctgtgttcttccctccaggatgctgagctcccccaggaccctcctgggtccagaggtgctgtccaggagtcagggactacaataaaaaaccttagaagtctacctagtgttctattgtatcgtgcctgagctggcactcaaattacaagatgcagttcttcccactcttccctcccctcctccaaaagcagaggagaccttccccatggtcatcaccaccagaagcccatgggcagtactgccagactaccactatgttctcttaaggcccaaggtctcttaagtcagcttgtcatgaaggttgtctggcctgagactcatccttcagggcagtgggctcccttctggcccacggaaggtccagaaatgccatccaagagtcagctcttagaactggggactccaggagcccacttgttgctccaccccccaatagccgagatgaacctgaagccagcaagtctcagaggctcacccaaggccctagatgtagtacctgggtatcgctgctgattattcagtgcccaagggctcttcagttagcaggtgatgaatgctgccaggaatgggttcttcccttcaaggcagtaggttcccttctggcccagggtgtgcctagaagtgttgcccaggagctagggcctggaacagaggcattatgactctgaccctatcatgctgtggctgagccggtatccaagatgcaagacaaagtcctccccactcttctttctcctctcctcaagcagaaggaagggatcttttttggagccactagttgtgcagcctggggttaggggagaggtgatgtcaccactcctttagccaccctggtagtttggtagattgcatgcccctctagtccactgtttctgggcccagttcagcactaggactcgcctagagttgcagtccttgtggcctaaattgcctttcaaattcacttagacacccagagcactttagcctgcagtggtgaagtttgtgggaactcaagttccaaccacaaggacctgtgattcccctctggctagggctggtttaaatgttccctccgtgggtgggcatcagctgaatttggtccagttttcctttctgctctaaccgggcagaaccgtttactgcctcacaattgctgtgctctccctcccacagcatgcagaggcactctgcgcaccaggtggccactgctggggctgggggaagggtggtatcagtgcttcaggactgttttttctacctcttcagtgcctcttttagcaatacaaagttaaaagcaggtagtgcaagtgctcacctgatttttggttcttatgaaagtgctttgcttacatagatagttgttaaattgatgtcctcttgtgagaggatgatcagtggaggcttctcttctgccatcttgctccaccttctgggcttttgcaagaatctttatgtcctttgcctatttcgcaagggttatttccacggaaactagatgatacattctaaaaatgcttaagtgggcccacataaaacataactggtgggaatatgctgaaaatcaatgggggtaccaccatgaaccccctaatttgggaaacttgacaatttccccaggatgtctcacatacctaagtgaaacacaggcacctgatgttttgttttgttttatttacttgagacaggatctccttctgttgtccaggctggagtgcagtggcaaaatcatagctcactgcagccttgaactcctatgcttaagcgaatctactacctctgcctcccgagtagctgggactataggcatccaccaccacactgggctgattttaaaaagtttttgtggagacagagtctcactatattgtccaggctggtcttgaactcttggcctcaagtgatcctcctgcctcagtctcccaaagtgttgagattacagacatgagccactgtgtcagtcccatcagatgttactgaccgagtgagggcaccttaggtgtgataggtaacaattcatatattaaatcttgggaattctttacttctctattttctaaattaacacaattagaagccctaatagtttcttctcacataccagtgaatggtcttgcatacgtccttgtgcacaaggaccccactttggagacaactgcagcaggggataaaaacaactttcaggccccttgtcaagtagggggatcacataagccaaaggcaatagcatcctgggctggttagcttatttgctgacaaaataccatcactgaaactggtgtattcattttcctggggcaaaggtcaagagcctttttctgttctcataggggtttataaccccaataaggttaagaatcactgacatcttgttttgtttcaaaacttcaggcttccgttagactcttagtcattgttttgataaagctgaaattgcccttgatcatatgatagccttaaacttagccaatgtcacacagtcctgattatttgtggagagagtaggttttcttaatgccaacctcatagtcctgattatctgtggagacagtaggttttcttaatacctgacagtagctttgttgtgccttcctcctggtttcttaccacagtaccagtctcagccttcttttctttcattttctattccagcatctctggcttttatttaacccactgtatgggtggctttctattctatttcagatcttatttttatgccttcaaatactatgctttttttctttgatattttgttctttagtgctgccattattaagcttataaaaatccagatcatgcatttcctatgggttaatgaaacataaataattcataaaagctgtgattgctcttatttatttcatgcaatttcaattgcatgacagccctgtagctgatgggtctgtgtaatttagatcttcattgatttctgttccttaagtggttttacggtacagttactttcattctcctgacttatgttaccacaagttagcagctgtatgcttttcttaaactgttggtgattttcatttgtgatggaagttgcagtatttctgccgtctgctgacttaatttttttgtttgtttgtttttgttgttgtttgtttttgtcccccaggttggagtccagtggcacattctcagctcactgcaacctctgcctcctgggttccaagtgattcttgtgcctcagcctcccgagtagctggggttacaggtttgtgctaccatgcccagctaattttgtatttttggtaaagacagggtttcgccgtgttggccaggctggtcttgaactcctgtcctcaagtgatctgcctgccctggcctccgaaagtgctgggattacgggcatgagccaccatgcccagcctctgctgacctaattcttggttatgaagcctggttgtaatttaagactcctgtaaaacccccagccaggtgttcagcattgcaaggtatatagggtaaatatgtgttaaataaaagagtgttttatttctatgatattgtgttgtctctctctttctctgttttaaaatttttttccctctttactttgcaccatttttataccattttatttttgttatagcaataagatatcgtgtgtgtgtgtgtgtgtgtgtgtgtgtgtgtgtgtgtgtgtgtgtatgtctgtttaatacccttcatctaccaggacaaacctacaaatggggaagagggaggcaataaagagccctcagaaaagtaaagtttagaaagtttatacatttatattttccttgaaatatcagaatttttaaatttttaaatttttaaatttcattatcttttcctcccaaatgtacatattattttaaaacttaggtttattaaaaaacagctatctcatcatgcacctttattattcattatcaactctttccccctacatgtctatcattttttcatcagttgactagtactagcttgtatttcactagttggctcatgtactcttgagggaaatgtttttcctgctagttttttcatttttcatctttcatattgctaaaagtattacaactgctctgtaaatacccaaatgaaacaattatggaaggatagatagtataaatagtgtaacacaatgagtgatctcacagtcattatctgctactttgacctttttcttttctttttgcctgagacttcttaataaagtttcttagggcaatgctaacatcagttatcatttcttgaacacttaatggccactcagtcaaaggaacccagcagtcagaagaattatttgaagcctcttgaagcaattgggctgcatcaagcactctctgtttccagggcactcagtgaatatttccagtataactcttaactcattgtatcattcttttatctattcacatttgctcctggaaggcaggaaaatgtctccagcagagcatggctcacaaggtattcttttatttatatttatttatttatgagactgagtcttgctctgttgcccaggctgaagtgcagtggtgcaatcttggctcactgcaacctctgcctcctgagatcaagctattctcgtgtctcagctgcctgagtagttgggattgcaggcgtgtgccaccacacatgcctgttattttttttttttttttgtatttttagtagagatggggtttcaccgtgttgtccaggctgatctcaaactcctggcctcaagtgatccacccacctcaccctcccaaagtactgggattacaggcatgagccaccatgcctggccagtattctttaagtatttgattaaatgccttgttttgcaccactgtttcgagaaaacaacttcttcgtccttcagttcagtgtttctcacccagaggctgtgtgtgtgtgtgttggggggtggggggagttggggggtagtttctatggctttattctcaagggcctgagaattcagtgtacaccatttcatatactctttttattaaatgaaaaagcatattttgagtcatcaggagggatgctttagcaacactgatccactacagtgatagcaattaacactaaattcagtattgctgaaacatgcccacaggggcttcttacaggcatgttctcaggagatctgaaagttcatgtttgaggatgttgctctcaggcacagttaagatgcacctttttcttggaaatgcctccctcaatgcgcccagtcacatgcccccgtagcacttaccacatcgtctattatgactcttatgggctttcccaccagctctctcacccctctctccagagtcagaactctgcttccgtaatatttacttattttacagcattcacggaactctttaataattatgcattgacaagtctttctcttctactggacactaagcatgtgcagttcagggttattcagccttgtgtacccagcacagtgcttgctccgcggactaagtgctcattaagttggtcaagttgagtcaagaggtgagtgtgtcaggctcaggacaaacacatgtttaaggccttcacattcttttgaatgagactcattgtggtgattgctttttcatttcttttttttttttttttttgaggcagagtcttactctgtcatccagactggagtgcagtggtgccatattggcttactgcaacctctgcctcccaggttcaaacaattctcttgcctcagcctccgaagtagctgggattacaggcatgtgccaccacacctggctaatttttgtatttttaatagaaatggggtttcactgtgttggtcaggctggtctcaaactcctgacctcaggtgatccacccgcctctgcctcccaaagtgctgggattataggcgtgagccaccgtgcccagccacctctggaacttctgactgtccaacttcaagttagggttcccatgactccctctttgggtttgaatgatttgctagggaggctcacagaactcagggaaacacatttactggtttattgtaaaggttgttacaagggatacagtgaagaatacatgaggtaagctatggggaaggagtgtagagcttccgtgccctccccgggtacaacaccctccaggaactgccatgtgttccggaagctctcccaaccctgtcctcttgggccttttatggagactttattggataggtatgattgacaaccatgtagaaatgtgactggacaaaaagggtatgaacaaacactaatagactgcatgagggaaacccagcaaggcctgtctgttcagatccttctggcctctctgtgcagccttccttcttccagggtttggggcaggaccccttctgaaatgggagtcttgtgacctacaatcagacagggtaggtcagagaatttttttatggctggctcctacacagcaaggtggggaagatgcctgtctttgggacaagaaggagcaggttaaaggagatcaggagaaggtcagagagattatgttttctgaggcctgctcatgaggccttaaggcgcctcaacagtataacaaaagctatgggagttatgagctaggagctgcggacaaaaaccaacatgtatgtatgtcataatatcacagatggtaagcatggttattttctaatgtgtctaatttccaatatgcttagtcctgtttctgtttttagtctgttttatgtcacttggtttcctcatgtgcttagttatatttaactacctgtttgtcattgtgttttataagttatttattagagtgccaagtcttaggatgaacctaagacacagagttctgtgggtgtttccggggatatgaagaacagttccagtctgggtcctccagaaccaagcaggcccacagtttgaagttccctggctcacccaggtgtaaggctcaaaggtttatgagccttatttaatcatggcctggtttatgggcattctttatcaggatgggtctatttttaaatttcctttttcttttctttgatttggaaccactctggccttctctgtagtcctataaatttgaggacaggcagttttgatgcctttgggcctagaatcttggctctcttgttcccgtttcctgaggccacagaacggaagctgagtgtacttgaatggtggcaactggctgttactcgtgtaggtatcccccaagattgacccaggagttcttgctctccttaactcttcaatcttttaaaggtacttcttcaccctcctcaagaagaatgtattgtatctaggatttttcttttccttccttccctccctccctctctccttctctcccttcttccttccttccctccctctctcccttcttccttccctccctccactactttctctctcctccctccctctctcctttttctccttccctccctccctctctcctttttctccttccctccctccctccctctctccttccctccttccttcccttctcttcttctctccctctttccttgctttctctctttctttcctcttttccttcctttccagcatgatagttctgaataacttagcccactaatactagaaacaggagatttaaaaatctatttagaaatagtaaattattaacaactgacaataagctttaaaatgggcatccccttttaggattcttttagattcgtcagtcaaggcagataacatagatcatcagtcagtataaaaatatgtcacttacatatttccagtaaacagaaccttaaaaaatgacccacaagtataaaacctttccaagaaatgagtaacttgaatgattagcctaacttactagaatttattctttacccttaccatcaagatacttcctaaggcaagaagtcaaactcaaactggcttaagccatgaagggtatttgttgactcaaatggaaagacttgggatggattacttcaggaatagctggatccaggaattcaaatattgtcattaggcatagtgcctgtctacctgaccttcagtctctgacaagctctcctttggtggtgagatggattttaggaactccggactcacagtctatgcttgaagtcactgatctccaaactttgttgattatgtacccaacagtaaaagttgagcataatagtcccaatgtgtatatatttctttatatatgatatgctactggatactacttttatgtgttatataatgtatattctttgttatggtgtacatatgctgtaagttatattgctgtgttgtatgtatattctatgttgtactaattatggagttcaatttttagtttttaatataaataataaaatagaaatactaatattttttatactcccaatggattgttttcggcactccactttggggactacaataacagtcctgtgaaccatgtctcattggttctttttggcctaccttgagtcatgtgcccattcctgagtccagagtccttgaaatagtaaaagcaaaattttattaatataaagtgacaaatatctgagtaggcttaaatagagagatgctatttatctttttgaagctatttatattctggaatcatataatcactgatattttatccaaaaaaggagtcatagtccttctctcagtacagagttacagaacaaagattctcttcttccataacaatctaattccgtttgtttatactaattttctgtaatgtcatacctggagtatcatgaaaatgtcctgtctggtttttgttcatatactcactcacttacaattcatacacacacactcacacaaacataaacatacatactttctgtagtgacagatgaatgctctatgttaagatgtaggaattgatgagtcttgtaagtaaaatccaatttttataattcttgagattgaccattttgttttttttattttgtttttaaattttaatttttttgagagggagtctcgctctgtcacccaggctggagtacagtggcgtgaccttggctcactgcaacctccatctcctgggttcaagcaattctcctgcctcagcctcccgagaaactgagattacaggtgcccgccaccatacccagctaatttttgtattttagtagagatggggtttcaccatgttggtcagtctggtctcgaactcatgacctcaaatgatccacccgcctcggtctcccaaagtgctgggattacaggtgtgagccaccacgtctggccgagattggccattttgaacaagatgggtggctgtgtggaaaggtaggaggtagaaggtctggaataatttttcatgtagttttagaaatgggagaacctccctgccataactagagttgcttttttattttgtgttcataaagaggcttttcagtatatgacatgccatatgtaccaactcaagtttagggaaagcaagttacttcaaaaggaactgagggagaggctttcctggatatttaaaattaatcttctgtggcagaaatgcaatggcacatcgtgattctgagatgaaagaagaatgtctaagggaagacctgaagttttacttcatgagcccttgtgaaaaataccgagccagacgccagattccgtggaaactgggtttgcagattttgaagatagtcatggtcaccacacaggtaacctatcttattatttcatttggtttttcccttaccacaagacaaaactcttttcatgtgttctgtacttgacttttgttctgaaaagcccacactcaagttcataaaactaaaattatattgactctggagagcagaggctaggttgaagttctgtttagaagacaaccttgtcatagtaagagatcctgagggcctctctgtacagattctataaatgctgaataaatgcagatctgtggggaggggtttctatatctgagtgacacacatttgtgttctggaactctctattaaacacagcttattcaaatatacttccaaaatctgcatttttttgtcttcagacttatagaatcctaagttttccttttatcataacagtgtgctctatctaagtaaatactgatcccaggcgctatcaggattatacaaaagctacatttagaccttttgttcaagttcgtattattgagctctttattaccatgatcaaaacagccatcagagttttcctctagttttggggcctgtattgctgaaccagtattggggaggcttctctgtaggtcagggatccctaacccctgggccacggacctgttaggaaccaggctgcacagcaggaggtgagtggtaggcaagggagcaaagctttatctgtttttttagctgctccccatggcttgcagtactgcctgagctccgcctcctgtcagatcagtggtggcattagattctcataggaacgcaaacccaattgttaactgcacatgcgaaggatctaggtgcggctccttatgagaatctaatgcctgatgatctgtcactgtctcccaccacccctagatgggaccttctagttgcaggaaaacaagctcagggcccccactaattctacattatggtgagttgtataattgtttcattatatattataatgtggtaataatagaaataaaatgcacaactagtgtaatgcacttgaatcatcctgaaaccattacccacccccccccactcctgccccactccagtccctggaaaaattgtcttctacaaaaccagtccctggtgccaacaaggttggggatcattgctgtagttaaccatatttgaaacacacgcccttttaaactgattggggatatttggctctattggcaaataatcattctgttatcagtgtagaggtgtgtaaagatgttatttctggaacataaaaataaatacttaaaaatacctttagttttagaaatgggagacggtccctgccataactagagttgcttctttattctgtgttcataaagaggttttcagtatatgacatgccatgtgtaccagctcaagtttagggaaagcaagttacttcaaaagaaacaacaaggttgagatgcagagacattgttaaatgtgtatgcttattgttagcttatttcattctttgttttgaagttttggtcttggcaaccaataaaatagatacattgatacattgttagtattacttggaaggagaagaaataatgtccccttttttcagttggttaattttaattgtttcccaaaatcttttcttgctaaaccaacttccttcaattatttgatctattaacgttactaaaattctaatttacccaggcataaaatatcattgccatctgtattagtgtgttctcccattgctataaagaactacttgagactgggtaatttatgaagaaaagatatttaattgacttagttctgcaggctgtacaagaagcatggctggtgaggcctcaggaaacttacaatcatgggggaaggcgaggaggaagcaggcacatcttcgtatggcagagcatgagagagagcaaaggggaaggtgatacacacttttaaacaaccagatctcatgagaactcactcactatcatgagaacagcaagggggagttctacccccatgatctagtcacctgtcaccaggaggcccctcctgcaacattggggattacaattcgacttgagatttggccagggacacaaatataaaccatatcaccatcttggatttaccttctttttcctgatacctactaaatcttattgattcttccttcaaaactgcatctatttatgttttcccatactcactatcttctctctagcacagactctttagttaatgaaaaataaatgtgaagcatctcatattgtgggccttctgttgggaatacaactgtgactgtattaccagtgctgctgacagctaacagttagcttagtgtttgccatgtcctaggcacaataaatgttttatgtacttcaactcatttcatcctcattgcaatcctgtgaggtaggttcaattataatcccctttttatggatgaagaaactggagcaaagggagttaagtaatttgcttacaatccttcagttagtaagtgacagaactgggatttgtgcttgggcagtctggctctggagtctgtactcttctcagactgtttctattctagatataggtcctgtcctcagagtttgcagtgttggaatatagataagttaattaggcagcttctagctttgtcttatgcctacctttcttatccatatacattcgatgctaatatcagcttaatttttcgtagaatagactttattgtgtcactctcctgttcagaaactcctataaaaccctacttcccaagaagaaaatttcacctctctagccaggaattcaaagagttccagtctccttcaacttgtctttccaacaagttttcatctactatttcctacccaaatcccagccagacaggccaacccaatgattctcttccacatcttgtttgttcgtccaagtccggggtgattctttttctccctcacctttcaggtactatttgaagtcccatctcccccactgggccttgcctgaccatccagcacatggttttctttggtacttcttcctgtctacatgactaattttattttttattattttttcaagatgaggtctctctgtgtcacccaggctggagtgcagtggcacaatcatagcttactgcaaccttgaactcctgggctcaagagatcttcccacctcagcctcttaaacagctgactaaaggcacatgccactgcacctggctttttattttatttttgtagagatggggtcttgctttgttgcccagacttgatttgaacttgtggcttcaaacagtcctctcaccttggcctcccaaagggctgggattacaggcatgagccactgtgcccagcctactaattttactttaaataacaaaatatttctgggaactgtagtttacttttcatgtgggcataccctgtttcccctaataaaattgggaaggattaaacttttgtttccatataggatcattctaacaaattttgctatttgggtgatatctaattggagcagatttcttgatcacctttccttgcataatatctcacttttccctccctctctttttctgtctttttgtgtttcatcctcaagtctaatgggatgggtatgaggactgatgagaaagaaaatttttttaaaattcctgctctgaattgtgcagtaatttataatcttgagagaggtgtctacattcttttgctagttctactctttctctcccatatcctttgtacataattagagcagtatcttgtttttacctggtacagaatattttatcctacattgatttcataatgaggtcttaaattcacaatctttgccagactacacttataagtaattatttttctgtcttgtatcatactctcagcaaatcttaatgtctaattagtgggactaggatgcattttgctgtcaatgcctttaaaaaaaacccagtcatttggccaataccatcttcccttactcttactctgcagggagtgtttggttctgtcataacaagaaagggacttcgcagtttcctcccaaccttccccaatgctgggccatacatttttatcttggcttgttctatgaatagaatggaggaaatttcttgctcctgatgccagataggggaggttccaagcagagattacaacagagtcctctcatccccaaagctgagttttgatgagctttgagtttaaggttatggcttcaaatatcagcaaactatataccactttcatggtcagttttttcattccctagtttacatttttttttatttctttagcttcactattaatgtgggaggaatgggtctaatatccctgcctctagagttaaattggcagcatttcagtttaagaggctgtggggccaagaggttgagagaacaaacagactctagaatcaatcagacctgggtccagatccttactctaacattttctggatattccaacctggataaattacttgacttcagattgcatatgtatcaaatgggattatattcatcagctgattcagtgtttgacattgtgatgggcattatttcatttcctgagtatataatagcagggaaaaaggaaaaacattcctgtccttgcagagcccagtgtaataatagggtgttgagaattaaatgagaaataataattataaattttagcacaatgcctggttctcaacagataagagttgttattccgtaccatgcagtgttcttttccacgttgtataccagcttggcttagagtaagcactcagcaaactttgattgaagaacttcattcatgtgtggtgtgtgtaccagttttttcatatgtgtcagtagttttaataaaactttgaagcaatcatgtatgtgttgcttccctggtttacattttagctttcaagagcaacatgaccttttctggcttctcctacaggcaccattgacagacatcacatgcttagaagaacttataaccttctgttgcttaattttcagcacaagctggatgatgtgggacttcttatctgatgttttccttagaatagctgagttttagcagttgcacaatcctttgacatggcatttgaggaatgtgacatggtgagactcaaatgctgaacagtagcatctgtgtaccttctcaagcgatagttgcctttcctaattttgaaaagctagcacttaagttcattataagaagcatcctaaagaactttttcagcagaaggaagttgtttttatagcataacacagatgactttggaattagacttggcttccattctggtgacttgggcaatttaatgaggctaaatctcaggttgcacgtatgtaaaatggaataacagtagtaacattttcatagtccgcttggggtaaatgaggcactgcatgtaaagcagttagcacagtacctggcatataataattgctgaaaatggtgattatttttcctaattctttagtattttttaaaacaacaaaatataaaagctaaaaaatgtaaaccatgaaaaaaccgtatgcctgtatgttgtttgcatatgcaaattaatattagctattttactttatttttttagagacaggttttgctatattgccaaggctagccttgaactcctgggcttaagtgatcctcccacctcggcctcccaagcagctgggactacagccacaggccacctcacccagctaaattaacattagttttatctgaattgttcagaattgtatcttgtatattattgttcagatgtatcatattgaaccatggaatgacaacaaataacagaactgtcagggtcatctagttacacttgctaattttacataggaagaaaacagtcccaaaatttggtggcttagttgagtgaggacttggagcaaactttctagtctcattgttttataaggcagctgaagaaatcacttagggaggtggggaaaggtgtgtgggacagggcttatagagatttgactaccgtcactgcctgtgtatgtatgtgagagagacagagaggacgcacgtgagagagtgtgaatgtgcgtgtgagagtgcgtgtgtgatgaggtatgtgtgtagctgtgtgtgtagtttcctaggttttgtgtaaacttttggtgctgactaatttcctccatttattgggttccaagaagaaaactttcacttctggtgaagagagcccttgggtgcctaaattctgccagaatacagtgaaagggagaataagtgggcattttttcagtaggtggatgcttggtgacaatgaatgggtttgacatcatacaagtaaagcatgctctgttattctttcatgtgctttgatactgtagaatttggtgagggaaactctcaggtgtaaattttatacagaattcttgcagagctgaattaattgaattcttttgacaactattacctcctagctggagtaagtttttatgtaggctacttttcaaaaaacacttttaaaagccatatgtaaaacatagttgtgattttaaaaaatactacaatttctaaatcttaaatcaatacaatgagttactgctttactaagtaattgattttgaaaacaattaacttgaaatccaaatataagaaaaatggattgagacttagctgatttggattctttctttctttcttaaaggccagtagagtcagtagtcattgggagcagtaatctcttctaattttatgctactttgaattgctgatgtagcttgatgaggttattcttctgtgggacttgtattttgacattgatgctattagtataaaccaaaaaaaattgatattattttctgatgtttataggtaatggttgatgatagtgagaagacatttgcctcccctgataaatggtgtaattcatgtgtttctattttattttattttttagcttgttcgttttggtttaagtaaccagctggtggttgctttcaaagaagataacactgttgcttttaagcacttgtttttgaaaggatattctggtacagatgaagatgactacagctgcagtgtatatactcaagaggatgcctatgagagcatcttttttgctattaatcaggcaagtgttttgttgtgaatgacctatactttaacaatgtattgatacttggccttgtcttagccaacaaacaaaaattatacacatgttaaaatattctaatgtaagttttgcagtctgccaaaaaatgtttattgctatttctgaagctacatttctacacaaaagagtttgcctattttgactttttaaaaaatatttatctttttaatttatcacttcatacctactgcttttggaaaattaccccagatcaaatagcaagagtagatttttaatctcagaaggcttgatgaaagcttaatataaaatcaaagattccagcctggcgtagtgactcatgcctgtaatccaggcactctgggaggctaaagtgggttgatcctttgagtccagtctgggcagcattgtgaaaccccatctctacaaaataaataagtaaataaataaaaaaatcagggattctgtggccttaattgtgatgttttagcattaataaccctagctgaatcttaagaatatggaatataaaatagttgtatctagacaggtatgagaaagcagattagtagacttgaagaaataatttaggaaagagaaactgttcctgctctttttcattcactcaataaatattgaagtatctaatatgtagcaggtgttattccagtcattgaggatgcatcagtgaataaaacagacaaagcgccttcctttatagagcttaattctggaacgaagagctagacaaaaagaagtgaaatgtgtaatatcaaatgctagctccctgagaataccacacaaaaaacatgttgatgagcaaagctgagcttattacttagagtggtaagggagatgctatattgatcagaggccatcttgccttgggtgaggagggagttctttaatgtgaggggagcttgattagaattaggtaaggatgatgatataataatttaggactgatggacatggcaaggtgaggattgggaaggcagtttcaaagaatcttggagttgttttcagacaaaatcttccaattgttatctatttcaatgaattttttggatgttcctgaaataatagagggaattttatggtccagggcaaaaattttcaggaatagtaaagtcgtattaatgaagacagagctagtaaagccctattagtgcagatagccaacagtaaagccatgttaatgtaagctgaggtaagctaatgttggttcatgttagtcattgatgtaagctgtggagtgtggatggctcatgtcctcagtagatattagaaagtaataactgctaaggagtaaagcagggaaggagatgggaagtacctgggtgcagtgatggatgtttgtgattttctttctttctttcttttttactgcatttattttatttttatttgacagggcataattgcacacagtatatagttatggggtacaatgtgatgttttgatatatgtttgcaattttccttggcttggggagggaaggcctcattgaggtgcggaattgagagctgaaggagtgagtaaaccgagcgggtatgtacgtgggtctccaggcagagggaacagcaaaggccagaggcaaaaatatgcgtgtgagctccaggaactgcctggagggcagtgcagctttgcaggttggagccaagggactggagtagatgaggtcctagagataaggcaggaccttggctttggctgagtgaggtgggagctgtccatcaccttgttttgtttcgagttctgtgaggcagtgtcttgctgaacaaactgagaagatttctttgtagtattttaaattgggaagttctattgagagccatgatgtaaacaatacaaagtaactgaaagtacattctatatgctataacctctgatcaaagttataaaaggtcatatgtggtttttacttgactattttttaatagtatcatcagctaaaggacattaccctggggacccttggttatggagaaaatgaagacaatagaattggcttaaaagtctgtaagcagcattacaagaaagggaccatgtttccttctaatgagacactgaatattgacaacgacgttgagctcggtaatgcagtgataatttcatgatgtacctttatcgtcttctggtaagagcagaaatgccctcatgtgctagcaacccagatggaaaaactttgctttggtgagagctaacctgttaggggctgacactccaacactggcctgcagaggggctttggctcaggaaactgtggggttgtggcgatgggacagggacagcatttgtggatctgtttggagcaactcaagattgttggtttgggggtatattcacaggtcctgttttttgtttttttttccctatgaaggggtgattaggctttctgaaaaaacggtctgtatgtgttaaatgaaataatatacataaagatgttttgtacacttgtttttattatttgtaaaatatagaaatgctcttcaaaggtgaattgtgattaacaactcactttctctcttaggagatcccttggcaacaagttaatggctaatcaagtcgaattgttttgtgctattttgttaagaatttaagagcatactgtatgtaaatacgaggtgtttggcttaagactttttgttttttaaaataatgtttcattattttattgttttgttgttcactcaacaaacctctggtgtgtagtcatcatgttttcatatcatactgtaataatcccagttattcaagccccgtacttgaagttgccaatttccccattttcactgccaccactgtcatccaagccactacttgtggtctccctgcttctggtcttgcctctacgagcccctgccctgccctgcagaaaccgcagtggtaaatcaggtcatatctcttccaggcttaaaaatcattagtggcttcccatcccatttagaataaaatccacaagtccttatagaaactagccccctgcctgcctctccagacccctgtcctcatttctctgttgtaacatcctttctgtttgctgagcaagccaggctctttcttgcttggaggtcttagtgcttgatttttttcctgtttggatctatgcatagctggttctttttcctttcaggaaaaaggtttcagttcaaacatgtttcgcaccgtgaaagccattccctaactatctttcctaaggtggactccccctctgtattagtctgttctcatgctgctaataaagacatacgcaataatttataaaggaaagaggtttaattgacttacagttctgcagggctgtggaggcctcaggaaacttacaatcatggtggaaggggaagcaaacacatccttctttacatggtggcaggaaggagaagtgcagagcaaagtgagaaaagcctcctataaaaccatcagatctcatgagaactcacccattatcacaagaacagcagcatgggggtaactgcccccatgatttaattacctcctactgggtccctctcacaacatgtggggattatggaaactacaattcaagatgagatttggttggggacacagacaaaccatatcaccctcttagttattcttgttcactttatcttcatagtacttctcacactgtgaaattaccttgtatatatttttacttactgttatctcccccactagaatgtgagctccatgaagatggtaaccatgtctgtcttgttcattgctttaccttcagtgcctagcacagtgcctggctttcagcaaatatttactgaataaacgaatgagttgggtatggagcctgggtctttgatgttcttctaaaatatgtgctcagaggtcaacctcctcagtgcactggttgagctcaggctctagaaccaagcacaagtcgaattaacttttggatacctagtagctacctgtgtgaccttgaggaagtttcttggcctctctgggccttggtttgttcatttgtgaaatggcactaatagtgcctatctcacaaggttgctttgaagattaaatgagatgatgcattaattgagagaatatataaagtccagcacagtgtctggtatggagttaagtgccaatatgtttttgctatttctatcatcagtcttttcctgccagaaacaagtttcttttgaccaacttccctcactgtactaattaaggtctagtcaggaaaaccagtattgagttgtgtaatactccatctgccaaacacagggagacacactctctgcaactatcttttaaaaatattgtgtctattgagttgtctgtttagctctgggccctgtttctggctcaggacatctaattttcattaaacgtaagtgtatcccgtgtatcaggacatattttgagtgccagctacatgctaggcaatgggcgtttagcaaggtgcaataaagttgtgctcttgatctcaaagaccttatactctagttggaaggataaataagcaaatgaagagttgcagttgtggaataacacttttgaagaatcagccagtgagttttccaagattcatgaacacctactaggtgccaggcactgcacaaggccccaacttttccatttcaaagtcagcatggaaggggcagcaacagcctgggcaagggtcacccatgctggtttcataccagttctgtcactaggtttctgtgaccctgaaaggtgcttgtctttagagctccttgtttcctgccctgtaaaacaagggtgttagcctacacaataatgagactaatttttatgtgaggttcttggaatctttcttctatcatttacagctcataatctgtttttacttgaatacaacctgtgttctttttctttctatttttttactttgaaaaagtgccagacttaccagaaaagttacaaaatagcacaaatatttcctgtatagccttcatccagatttccccaatactaacattttttttttttttttttgagatagagtttcgttcttgtcgcccaggctggagtgcagtggcgcaatcttggctcactgaaacctctgcctcccgggttcaagcaattctcctgcctcagcttcctgagtagctgggattacaggcgcacgccaccacgcccggctaaattttgtatttttagtagagacggcgtttcaccatgttggtcagactggttttgaactcctaacctcatgatccgcccaccttggcctcctaaagagcggggattacaggtgtgagccaccgtgcctggccaatactaacattttatcacatttgcttgatcattctttctatgcataaatatttctcctggaggtgcagacatgctattcctttgcccctaaatacttcagtgtgcatttccccaaaacaagaacattctcctacacaaccactatacagtgctcaaaataatgagttatcattgatacaatactatattctacaaaccctattcacatttcataaattttcctaatgttctttatcataaaatgaaaactgcacccaactccaagatcctattcaggataacatctggcatttagttgtcatgttatgtcttttcagtctaaagtttcttggtttttgtttgtttaacttttatgatcttgatacatttaaagagtagaatgtctctcacgttgggtttttctgtttcttcatgactagattgaagttatacattttttggcaggaataccacacaagtgatgtcatatgcttctcagttcattgtatcaggaggtacatgtctgtttatctcattactgtgatgtaactgatcacttggttagtgtggtgtctgccaggttcacttgacaggtgtctgtgaggttactatcatttttcctgaataattgctaagtattttctagggagatactttgaaactccgtaagtaacctgcttcttgtcacactttcacccattagttttagcacctaattcttgcctgaaacaaccatttcttgttctttcattgccctagattgtgttcaattagaccttcaggacctctccaagaagcctccggactggaagaactcatcattcttcagactggaattttatcggtaaatacattttaaagtgttattccctaagagatgagggtgggagaaggagaatagtatatagtaagattatgacaatttatacctttcaatatattttattcaggctcttacaggttgaaatctcctttcatcttaaaggcattgacctacagacaattcattcccgtgagttaccagactgttatgtctttcagaatacggcaagtatctttgttttactagctacttccttttatttttttcctacactttttgttgatgcagagtataaaacacagcagcctacagatgtgttaaatgcagtcatgtttaaaacagatttagtgatacaatatgatactcttttctttttttctaatacatagtctcgctctgtcacccaggctggagtgcagtggcgtgatctcagctcactgcaatctctgcctcccagattcaaacgattctcatgcctcagcctcccaagtaggtgggattacaggcatgtgccaccacacccagcttaacttttttgtgtttttattaatagtaaagacaagacagggttttgccatgttggccaggctggtctcgaactcctggcctcaagtgatctgcctgcctcggcctcccaaaatgctgggattacaggcatgagccaccatgcccagcctcattatggtattattgttgatccagagaccattacttctgaagatgaagcaaacccttttcaacttttaaaaaccaagtttctacattgaaaagaagagtttaaaaaattggctttgactttctactctcctaatacattttttaaaatgtttatgaaggtgttttacatgtctatagtgttcttcccagctttagaggaaggtctttgcaaatgttatagcaaatattttcaaacctcgaggcataaactgctccactgatgtgaagaccagtctgcaaaggagcagttgtttctctttttattttgggagggggcatgtatagtagaagagacagttcacttttatggggaagtaagctgccttctcattttcatagactttctctgtccttctcgccttccttctttttctccctccctgccttccctgttcattaagggactaaactgaatgcctagctgaaagttgtatatactgtcctttagcaattcagaagagtgtttcattcaactatcaataaatacttaatgagtccatactatgcaccaggcattttgctatgccctagaggcacagtggccctcaggaaagcttacagcctagtaggggaaacagaaaaacaagtaaacgaaataaaagtaactacaggttgtgatatgtggtaaggaagaatgtctccagctgcaagctctctggggtgggtgggccagaggagcactgggagcatctgcagggatgaggagaaaggcaggagaggagcatggagtttggtctgcaaggatgaggtcattgatgactttgtcatgatatggtcggaagtgtgggtttaaaaatattggcttttcatttttattttgttctttggacttctgtctgctttgagaaaagcattttaggggctctcctgggggaaacagagatcttgagtgccagtgctaatggaggtttaatcataacttacaggtatagaaatgaggatggtatggtttaattctcaaacctttggtttgagtgtgtgatcttgggcaaacctggcttgtgttcagagacaggcaggtgcatgtggatttgatcacctacatatccggctctccaagctctgccagtgaactttttggttttcttaatgtgttcaccctaataagtacttggcatatatcacttataaactgtaaatgatttaaatgattgatttaaatttcataaggtagaagattgagggcatttggacatcttaagttcagcctgcagtcttggagcaatctttgttctttctgaaaacattatatgtagctcttgaaacaaatagaaaaataatttctagcctaacaaaaactagaatttcatacccaaagaactaaattgaaggaaatgcttttaaattcaattcagaataataaatgagatcatttgtgttctttcaaaggttagttaattttggtttttattcctaggactggttgtctgtttttctctaggatttctctgaaccagatatctgatatcctgtatttagtaaaacttcacatattagccctttcaatcatatttgtttcactaataacagaaagttgtgaagaaatcttgtgatgtgaacattttcattggcataattctctttgttgccttaatttatgtctttattgtgagttccttagcctctaattgtacttgtgtttgttttttacaattttgacttaaaaccttcatactagaggactaagagatttatatagcaccattccaatactggggtattctgaatttgattataaacttacctctactgttgagttttatgctttcacatgttttcatgataattattgttcatttccagttttagtgctccctcaagcatttcttgaaaggctggtctagtggtgaaaattccctcagcttttgcttgtctggggaggtctttatttcttcttcatttctgaaggatggctttgctggatatagtattcttgactgacagttttgttgtttttttttttctttaaaccctttgaatatatcatctcattctctcctggcctgcctggtttctgctgagaaatgttctgatagtctaatggagattctgttatgtgtgacttgatgtttttctcttgcagtatttttttatttttattttttgagacggagtcttgctctgttgcccaggctggagtgcatgcagtggcacaatctccgctcactgcaagctctgcctcccaggttcacgccattctcctgcctcagcctcctgagtagctgggactacaggcacctgccaccacgcccagctaatttttttttgtatttttagtagagacgaggtttcaccgtgttagctaggatggtcttgatctcctgacctcgtgatctgtctgccttagcctcccaaagtgttgggattacaggcgtgagccaccgcgcccggcctatttgcagcttttagaattgcctctgtctttgacttttgacagattgattataatgggccttggagagaatctttttggggtgaatctaattggggatctttgagcttcctagatctggatgtccatatctctcccaagacttgagaagatttcaactgggttatttgaaaagacctgtcttcaagttcagaaattcttttcattttattttactttatttttatcgagacagagtctcaatctattgcctaggctggagtgcagtggtgtgatctcagctcagtgcagcctccgcctcctagattcaagtgattctcatgcctcagcctccccagtggctgggattgcaggcacctgccaccgcacccagctaattttgtattttctattagagatggggtttcaccatgttggccaggctggtctcaacctcctgacctaaaatgatccacctgccttggccttccaaagtgctgggattacaggcaggccactgcacccggccagaaattcatttttctttgcttgatgtagtctgttgttgaagctctcaattgtaattttttaatttcactcattgaataattcagctccaagatttttgtttggttcttttttatgctatgtctctctgttgaatttctcaatcaaatcataaattatgttcctggtttcattgaattgtttgtattcttttatatctcactgagctttcttaagatcattattttgaatttttcaggcatttaatgaatatccttttctttggggtctgctacttgagaattattatgttcttttgggtgccatgttttcttgccttttcatgtttcttgtgtccctacattgttatctatgcatctagtgaaatagttgctttttccaattttatggaatagctttcacagggatagactttttcctgtagatgggccctagggtgttggttggttatagtggctttggttctgggcagactcagtagtatggtgtccatgcagtttgttcagttgtactccttgtcagtgatgtctgtgattggctcagtggcctaagctgagggagtttttaacagcaatgacacagttttgctggaggcagggatgccagacttgttgtcgggctggacatgtgcatacatgataagcagcaggctgtgtggcaggctcttcaactgggtaggggcaattgctgcccagctggttgtcaggccaggtgtgcatggttgtggtggggccagtaggctgtgaggcaggctctttagagatgcgaagttacagctgaactggctgtcaggcctgtgtgggtgtggagagacagccaactgtgtggcccaagtgtgcacaagcacagcacaccagccagctgtttggcagcttcctgctgtgcacttctgcctgttcccaggggcaggggcaggaaggggtgctgcatggattcagatgtcagggtctcagatgttccatcaggtctaggctctaggcagccagtgtcatggtgttgcaggcacctttgtgaacatggtagaataatggcaggacttcagggatggagagacacaaagagtactggcccccagggcagaacacactctgttagcatctggtctctaaatggtgtcatgccatagcagcttaggtcacagaggtgaagagtgcgcaatgtgtgcttccactctggggcagcatggctgtatgaactcccggcacctctccaaactggattcaaagcctgtgaggactggagggctctcctgtagcaaggactgctggcattctgtggccataatgaggaccaccagagtctctagcctaacgttttcctatccaaagagattcccctggctctaagctgatcctggctggggagacagtgtggcagaggcagggtgccttgctccccttcctatgttgctgtcctgggctttcatgctccacaggattttcctgctaccctggtgctctccagtgtacttctttagtgatttcagtcaaaatatagttgtttattcattattttggtcccgtgtgtgtgtgtgtgtgtgtgtggtggggggtgcaggaaatgagtgtcaagtaattctagtcagccattttgctggcctgtgtaattctctttggatcagcacactggatgccagtgattttttttttaagcagatttgatctaacatgttatactttcttctgtgttgtaatctcgctatacatttgtgtctccagattatctttgacaataaagctcacagtggcaaaatcaaaatctattttgacagtgatgccaaaattgaagaatgtaaagacttgaacatatttggatctagtaagtatgctatatacttgcccatgggaattatagatgatttttaacactttattttgtggcttggggtatttaaatggtttgtttgcatgataataggaagaaaaccgcctcgagcattagatcctgtaaagaatatcccaaagccttgtatttttgtttaattcagcaaatgtttattatatgcctcttagaagaggtagcatgactcagtggttaggagcttagctctggagccagattgcctgggtttcggtcccagttctgtttactgtgcctgtgatcttgtacaagttacttaacctgtctgtctcagtatctttctatgtaaaatgagagtaatagtataggttgaacatcccaaatcggaaaaatctgaaatcaaaatgctctaaaatttgaaacatttgagcactgacatgaccaaagctcaaaggaaatgcttattggagcattttggattctgaatttttggatttcggatgctcaacctgtaagtataatgcaagtattccaaaatcaaaagaaatctgaaatacttttggtcccaaatcattctggatagggcatactcagcctaaacttaccttccaggatattgaatattaaatgaattagtatataaagcaaagcactgaacacaagagttggcacatattaattgctaggcattatgggaaaaggaagaaaatgccttagtgagagagactgacgtgcttataaaatctgtgatgtgttatggagagaaataagggtatacatacaaaaagtatgaggagaaaaaaagcaaaggtaataagtttgagtggggcagagtaggaaaagaaatgattcttggagaaggtatgctttgatctgagccttggacagtggggaaggatcagggccttcagagcccagacagcaaccgctgcaaatgctgagtcatttactcagtcattgctcaaaaaacatctcttaatccacatgtttaaaatgggctactgctgagcacagtggctcacacctgtaatcccagcactttgggaggcctacgcgggtggatcacttgatgtcaggagttcaagatcagcctggtcaacatgacaaaaccgcgtctctactaaaaacacaaaaattagccgggcatggtggcacatgcacctgtaatcccagctacttgggaggctgaggcaggagaattgcttgaacctgagaggcagaggctgcagtgaaccgagatcatgccactgcactccagcctgggcaacagagtgagactttgtctcaaaaataagtaaaataaataaaaaaattaaaataaaataaaatatcatgggctacctatggaacctgttctgtttgctcagtaaagaattaggatgatgttaatgatggatgctcagtgttttttattttgcagattttgtttaaatgactttccttttgaccaggttatcagaatgaaataaaatgtaaaatacctgtggcttctgttttatatttgttttaaagtatatttgatttgtggcctgctgcttttcagatgtataatatgtcctgacgattgaagttttggtttcaataatttcactgactgacttaagccaccgattatagtttcagtttctgttaaaaagtggttactattccccagcatacaccactctcttacagatacgcagagatcaggggcatattttctaagtccaagtataggttgccaattttctgtgaaaagaaactaacctttgtcaaatatgtgatttggaatatcattataaagatcaaaatgatggaaatttccaagctagtcagtcaaatgcatttccagaacagtgagtttttccttccgcctgctgccctccttgcaacgttaggggttttccttgcttgtgctcagaagagagtatctctagccccctcctgtggccaatgaggagaaacacaagcctcctagaccactgggtaaaagctcttttaagatttacatattctcctagagctgtgtcttaagaaaccaggttctatcactaggagaatgtgaatttaaaataagatgatgtgatgtgaaagccttaaaaaacttatgtttggaaaccatcttaggaaatggactttttcccctatatgaagctgtctggtggattgagattgccttggctttgggggaagtgggcaaggacaagggcgacatctggtgggacacttacactatttctaacagttcagaggctcattcacacccacacgcttacccccaggctcctctctcctttgtcattacccatattgaagcaaatgcaggtgaatgtccattttcacatacaaacctcatgctgccttttgtgactccgaagtcccctctctaaatgtgccatgtcttcatttaacttggtttcataaatataggaatttggagatgaggggcttggggaggaattgggggactccttcttggcgggattccccagtgatgggtgatatagatgttttttttctttctttctttctttctttttgagacagagtctcgctctgtctcccaggctggagtgcagtggcacgatcttgctcactgcaacctccacctcctgggttcaagcaattcttctgccttagcctctcaagtagctgggactacaagcacaccccaccacgcccgactattttttgtatttttagtagagacagagtttcatcatattggccaggctggtcttgaactcctgacctcatgatctgcccgcctcggcctcccaaagtgctgggattacaggcgtgagccaccgcgcctggccaagatgttcataaaatacatatttttagcataccatagaactagtcttctcagtaattcaaagaaaaacagaatcctatactggattctgttaggaggactggtttctgtttctaagcctgcttgttttcccatctgtaaacaaggtccaatgcaaactgtcttagagatttgtgttctagttttatgtcagaaaggaaggtactagatgctgtccttgcatttcataagattttcagtcttatcttcccaagagctgcctctgtttcctctgccccattccatggatccaaggggaaaaaaaatcttgcattatgatagagctaagttgttttcttacctacccattagatgatacctcaagataactttcttgagtgtaaatggctaagggtaaatgtaagtgctaggcactgggcactactgtaacaagcacttcacacagactgttccacctgattctcatggcagcctcaggaaccagtacgcttgccctccccattttgtaggtgggacatctgaagcttagtaagatgaaatcatttgctcagagagttgcatttaccagctggctgtctctgctcgccacccattgtaggagctgctttgccctcagacactcatgccagtgtcacccacatctttgcattactaagtccatagacactctggcatttctcttcaatgctgtctctgcagaggtgttgctgtggaagactctgaccgcagtctgttctctgagggtcgcctgtccctggttctgtttgcttctcctctggcctttctgctccatcccattcctgagctcatctccttttctaattctcaaacattgctccccatccccgacgctgtccttcccagtggtctctctgaggggccgtcactcccatggctttaactgccactgaatagtcttctcttgtcatgaatatccagagtaaactcagtttgcccaagacagggaaccaggaatcattcttggttgtccttcttccttattccccaagtccagttagagaccaggccatgactctctccatctcttacgattctgtgccctctttcactctgccgcaacttagctcagaccaacataagttctaacttagattattcagtggtcttatgttctgcttgattctcttcattaatttgaaagtatactgaagcattatactaagcacaggtgctgtattcaacactactgtcttagtccgttttctgttacttgtaacagaatgcctgaaactagctaatttataaagaaaagaaatgcattctttcagttctggaaactgagaagtccaaagtcggagccccacttctggtgaggaccttcttgctggttgggagtctctgtggagtcccaaggcagtgcagggcatcacatggtaaggggggtgagcatactagctcaagtctctcttcctcttcttaaaaagccactagagccattcccttgataacccataaatctatgagtggattaatccatttatgagggcagagacctcatgacccaatcaccttttaaaggccctccctctcaatactgtcacattggggattaaatttcaaatgagttttggaggagacaagtaactcaaaccgtagcaactacctatgggccctgcttcagagagcctgtcacttgatggggaagatggacacttaatgataaaatagtaaccactgtaagtgtttgctattattattttcctggggctgtttcatgggctctttgtatatgaacttgcataattttcacaatagccctatgatgtaggtattttttaattctacccacttttcagaggaggaaactgaggcacaggggttaagcaacttcctcaaggctctacagcttctgagtacagagctgagattcagagccaggctgtcgggctccagagaccatgttctttcccattctacactgtctctgtgctccatgctgtgctgcctttgcagatgtaatgaaaggtcagtgtctgttgtgcagaggaaagtaaaggagctctgggtgtgtgtagtaaccaagaaccatgaaagtatataggagagggctaatagagatgagaatttaaggaattcttttctgagatgggagatttttcatttggaacttgaggctgaaaataaataagctgagccatgcatgtgggagaagtgctgttccaggcagacagatcagcatgtgcaaagtccctgaggtgagagcaggaaagaaggaagatcagtgtggctgtagggtgaagaaggtgggggtcaggcagaagagagctgggctgggattggagacactaccgtgaagtctgagagaaactaaggttagattcatctccttcccatacattcttcttgctgctgtgtgctccaaaccaaaaatctgattaccactcccctccttgcttctgttccaagaagtaattttctctacatacagagaaggcttataagattggcactatgtcctgggaaagtgcacagtgaggttgagaagcagaagtggggattctgagtggtggtgttttaatttgtttgttctcttattaatggtgaacttgatgtctctgcttttatgtgaaagaactcagagtaggtcagcagttttgcctttttttgaatggagcccaaatggatcactttctgttgaattctattctacagtaaatatttatatataaatttgagtgaatttattagcagctcacatagtttttgcttttgtttttgttttttgttttttgttttgagacagaatctcgctctgttgcccaggctggagcgcagtggcacgatctcggctcactgcaaactctgcctcccggcttcatgccattcttctgcctcagcctcccaagtagctgggactacaggcgcctgccaccacacctggctaatttttttgtatttttagtacagacggggtttcaccgtgttagccaggatggtcttgatctcctgacctcgtgatccgcccacctcagcctcccaaagtgctgggattacaggcgtgagccaccgtgcctggcccagctcacatgtttttaaatgtatagctttatatcagggaatgttttgccttacatatgtacttctgaatgaatgcggtgtgatttgtttctgatatttaccattttgttttaacaatagacaaaacatttattgtttgaacttcttttcacactgccattttgtttggaaattattctccggtaaggtgtgtttaacatttgaattctgttttattcctcagctcagaaaaatgctcagtatgtcctggtgtttgatgcatttgtcattgtgatttgcttggcatctcttattctgtgtacaagatccattgttcttgctctaaggttacggaaggtaagagtgtgttcgcattctcttcctgccctcttggcctgcgccctcagtttgcccaagcagtggaccaccgatattgtgcacctgccttttttggagacctttgactaaatcagattcctttgagtagttgcccgctatgaggcattcatcagcctgaggtgtaggaagtgagtaaaggctctgagtatgtcaagtgggatcagataattatcctgcttaaaactgagctgatatgtacagatgcacagtggtgaactctcaggcttttgaatgtttccagaataacaaatccctcttcaattcaggagtgatctgaagaacagagtaatagcatgtgtgggtttcatcttttgtcttcaaatcagagttcattttgacagggaggcatggtaaatggattataatgaagcataaaatactttattctgtttttaaaatagttttaaaattctcccctgagtttcattttgcctttttaccctcagggctcttatgaatatatacttccgctccccacatatcttattctggctgtggcgtgtgtacaaatgcacactggggtcaggggaaattggaagtccacagagtaccatttgtggagcagggacgtagtctgcatttgattttgcctaatcctgacctttgtcaatgtcctttgtaaatatccacctttcttacatgctccccaatccccttgatattctgaatgcaaagttaaggtcctttccctgccaaggtgagggggctcatatttggagcacgcactctggagccggcctgcctggacacggatcctggcttagcctctcggtgcctcagttcccttctctgggtgatagacctgctcgtacctgcttcattgggttgttatcggaatggatgtgttggtaatatgaaaagtatttggaatgtactgtgtgttagctatgacaagaacctgctggagttaccgcgtacgtatttcatatttgaggtaacttcacagacaattgaatgcttactcagattataggggaaagtgtgtgccgtaacctccactttcgaggtggatctggcaaattggaaaggcaatgccatgtccttttacaggtgagagcactgttttgcacttgccttcttcttccagagggcagtgtggtttgtaagaaacgcttctttaaatgtttgccatagagatttctaaatttcttcctggagaagtacaagcggcctgtgtgtgacaccgaccagtgggagttcatcaacggctggtatgtcctggtgattatcagcgacctaatgacaatcattggctccatattaaaaatggaaatcaaagcaaaggtgagggaagcccatttaaagtctctgttcttcatcttctcctggatggccacaggcatcttaagacgtaccatcctttggagaccactttgattctcgtgtcttcccttttctcacaccagcacaagtgaggcctcccctggcttggttcctcgtgaagggaaaggaagccgatgttccatggaacgaaacttggcaacagctccagaatagtgactaagcttgaaaagattggttatttgggcctcatttttctttttaagttgccaaaggagcagcttatccataaaccagtcccttccctgaacctgcatgtcaagagcttgtggggaggatctgtgaccattgggtgctccgacggatggggtgagggcaggaatgtcagactgcccgctaaagcctgaccctttgtataacttagttgatttgatctcctaactaagcctcaactcctccttcaccgcactattctcccgtccattctctgctgttggtcagaggtccctccagccacacctcctaaccctgacatgcctaattctctcccatcccggctccctctggctttcttcaggcttcttcctttctggccaactgtgacagcagcctcctcaccagctttcccgtcttctacttcatacccctgagatccattcacacagctgtcagagggacttttctggaagtgtctatccagctgttaccatcctttctacctcttggggcctactttgggatgaagtggcctccctcagcagcatggcccctggggtcatcatcatccagctctgcctcttgctcctgcccctgctctgaccctgcccctctaggacgtcttgtcagcattgtgcctttgttcagcttttgtccacttacctgtggtgcttcctcccagcctgtcctgcaggcctgtctttgctctggggtcgtgtctgtggtgtccctctgtgatgagctaggcattgtgtctttcactgcatttagcgtattatatgagaatcatgtttgtgtgtttgtcttttcaactagccctagaatttcctcagagctgcagctgtgttaggaaatcatgctggagttttctttcaaaagcagctgaattgtattgtttggtacttaacaaacaccattaatttgtatcctcgaatgcctaggtcagtgataaatgcaatttctatttgagagtattatttggaaaaaaatttagttcaacctaaatacaatttctatttcagagtattatttggaaaaaaatttagttcaaccaattgaaatactaaaagaaaatgagaaacacaaatatttggaattatatctgtttttcttcttttttttcttcaaaaaaaaactctatcacctatagggaggcagatagttctttttttattaattggtttaatgtaaggctaataagctaagtggagtcaaatattttactcatttctctctttcttttttttcattccttagaatctcacaaactatgatctctgcagcatttttcttggaacctctacgctcttggtttgggttggagtcatcagatacctgggttatttccaggcatataatgtaaggatgcggcaccgggtagtgccactgcagttgagactcatttattctttgggttctaatagctactttttcatttcacccattctgttctttttttcaggtgctgattttaacaatgcaggcctcactgccaaaagttcttcggttttgtgcttgtgctggtatgatttatctgggttacacattctgtggctggattgtcttaggaccataccatgacaaggtgtgtagctcacattcttccttctgcagatggggcacgtgggacccttgaacgtgggtttctagcacttacttgcttcctggtcttctctagcatgtacccttgacatcagtaatcacatatctttgtatcagttttctttttctttttttccttttcaggatatagaagtgactacaggatattgaaacaagaactgtacaatactagaaagcatgtattatagttgtctgggactggcttaaggggtcacatggttacccggtgatcatcaaatgggaaatgtttggacgtgagatcactatattaaaaatgaaaattaagtgaggaaaattattataaaaaatttccaatttaaagtattatgtttttcatccaagttaattgagaagaatgaagatgggcagagactgcctaaaacgaccatagtaggtttacgatagaaatggtgacacgtcttgtctctgcagacggttttgattacagcatcatctttctgccttattaaagatcagtatctgaattctaaactattaccaaacttcagttagcattataatctcagggacatcaaagttgtgctaagatgttcttgttataaaatgatacatttgattggtagatgcatcaggaaatgaaactaggtaagccttggttttaacccaaaaaagtaaaaggagttattttatcttatggcttttcctccatttgggcctgtggcagttggaacaacagaaacaacaaaaatagcagcagctaacacttactgcttgtgtgttagacactctgctgggcatttcggtgttctttcttatttactccccacaacaacccagggtactgttagcctcacttaggtgctctgcaaggagaaaagaggttaaaaatggtaagtattccttccaagtttgtataccagttcagccttaagttttgaccttgttagttgcattaaccaaatctgtgatcaaatctggtttacaaactgttatacatgaatcttaaacctccgtgctgtcctaccagaataatgtcgagtaacctggaacactcagactttcttctttttaggtgtcacatttaatatgtctagagagaattactgtttttcctatttgagatattatataattaacaaagtgacaacctctgggttggtagtaaatcttgataatattgctcttcatactccatgtcactgctttaaaggtgactcatgagaaaaaattattctttgatatgatctctctgatttggagaacttactgtcttagagcctggaaaaatgtatttttcttccttgcttgcctcatgctctgaaagcttttccacctctttgtcactagagggcagtgttgcactgtgtggaataaataccgttcctgaggattcggctttaattcactgactccaaggtctgtggacaagtggtcccatctcctttgcaccccatccccgtctcccctacctcatcattattctggaaggtgctcagataagattgctagaattttactagatggctaccattctcaagtgctgtctgttaggcatggtgcccaagattcttcatctcccttgctgtgttaacccttccctccccttctctgtgaagaaatctgattgtcctgttacagagaataggcaccttaatatattaaataatattcctgagattacccagctagaaagtggcagagatgggattcaaacccaggtcggcctgactccagtacctgtgctttgacccataccctgtagagcttttcttggtattatctaaaacagatcattgcaagagagcatttagcctgacaagaaacagtcttgtacttggagatcaactgtgagaggacagccatgtaatcggcttcattctttcaatggtgtcaaggtcacctcatggaaaatgaggttatttgttttgtgagcctgactgcatttccatatgttcaatttgtcctttcaaaggatccaggtgaaactgggatgctctgagccagcactgtccaagaaaaatacagtttgggctacaattgagagccttgcctatactgtaaaattttctagtagctacatgaagaaataaaaaaacagatgaaattatttttaattatatattttaagcctaatatacccaaaatattatttcagcatgtattcagtataaaatattgaaatattttacattcctccatactagtctttttgatctggtggatattttatccacatagcacgtctcaatttggactagctatctattggatgctggctattcacacattcctggtgactaccactatggacattgcagctctagacttatgtctttcacttaatgttagctttcctttatacccctggaggaggggagggataagggatgtctgtagggttgcctgcaggtctgtttatggcatctctcaccaggctgatatattggggaaatacacagctgagttaattcactgaatgtacaagtcagttgggggagagaacgtcagtctggttttggaactttgtgcttttcttcaccatattgctgcctctttgaatctgaagttagaatattttattgccccttgcatcctttcccccaaattaatccaagctgtcagcatgttcaggttctgccagtatctgaatcagaggactttcaggttacctgaagccttgaaaagctaggcattccaagcgggcatttttgtgggatttttagaatcacagcaaccttgattgtgaaagctaattctttctttaaaacaaaacaactaaaaaggagacattaggaaaaccgtttgactgatagctggggtcccataacacttcagcttcctatcttcctgttaggcatctgatttcaggggctcaatggaaagggagtcaagatgcaaaaggcttcctgctgatgtgtattcccagcactaatggactttggcacagtgccctttcaaaatgcctgggcacagagggtgagagactgttgatgttcttccagacctcatcttgaattattaaacattactctaatgcggcttttacatttccagaggactttttttcctgtgaggaataaatcatagccttgcattgtccccattttacaaatgagaagaccaagacttgaaaagttgttggacttcactgatgccatgggtcaaagttcagcagactctgcattacattttcctccttccaagccctctggttttagccaagtacccctcagctaaaacattttgcctaaagtttgcatgagattcttggcaccagctcttaaagcaaatatttatgttgttctctgacataagccattgcaggttatggtttcattgaaattaaaggtttttggcccaactgcaaacttatcatttgtgaaatgaatggttgagttctcatcgtgggcccagagaacctatggggactctttatggaaatacccatttaatacgtattaaatatctactgtgcacccaacattgctaggttcttgtagaccaagttcttggagggaaggaactgtagtttgttcctctttacattcccagtgtccagcacagcacatagaccatggtaggtgcccaaaaagtttgttttgaacaaacaagaagcagagagagagtagtacctgctttccaggggcttatgatcactcaagatccaaaggaatgccttacaaatgtggtccttctagactggaagcacattaggaccttgagtatttttaagctcacttctactatggaatttggccactgaaatagactctggttcacagccacttcttgtacaaaatggcagggtgttaccaaacacctaaaattgactgggtctctgttttaactctttggtgtgttaaaataattctcatgttcacaagaggagggggaggtaaaatggttatgaataatgttaatgttgagacagatattgtgtgtagcctggtaagtaactaaacagaaaattaaaaaatgaatgtgacatgtactgacaaactagctatttgcagttgaaacctgaagcacagacagttgtgcttggagttaggggttcttgaaactagagaaaggagttgactggattccaaaagaaactaagaaatgtgaattattaatggtgctgtcagagttgtagttgacatccatagaaaccaactttaatgtcaatgttttcagctttaacttcaatgttttaaggcttgtgtagcgtatggaaaatatttactctggcaatcgcctgttttactgttaaataatctacatattgttaagtgatctgttcatttggatatttcctctaggtctttttggaggaggactttagttcatcagagtttttgctgatgcagcaaagccatgggtgggatccttgtttggggtgcgtttgtagaccttctcccttggccaccaactttaccttgcctggtccagccacgtggctggtagtgtaaggcacggtgtttgtatctagttggagtacagggaagtgtgtataaaaacaattagaagaccatagttcattctgtgattcttaccgatacggagtgcagagaaaggactagaactaccagggcacttggtcttgaagtacactctgaaatgacccttgaacattggcttaattggacacagagaagagaaagaagaatagagcaggtgaggagaataaattccatgagggaaaaatgtagggatgggcctggtgttggaggagaagataagcacagcatattaatactgtcaaggaggagatgtgatgaggctgcataaaggaggaacttatcacaaccttcttggtttagatttttattttgcatccaaactttgtataatctcacaagggagaaatgacctgaaagccttcttcttaaagtacaggttttactgcagctttgactggggagggtaaagagattggagtaaaagagacttccttggaagtttctttaataattcagaaatttgtgttgacatcacagtagagtagtaagggtggattggagaaacatgtgataggaacagacaggccttagaagactgaaagcggggaagagtaatcaattcaacacagagttttaaggacttaattatttcagagtaaatgtttctttggtaggagattggaatcactgacagaaatagggcaatttagaaaaaaaagttcatttttctggttagggtggtgaaaagttttgttttgttggcattttcaaggaatggtctgttatataacaaatgccagctgagcacagtggctcatgcctgtaatccaagcactttgggaggctgaggtgggcggatcacctgaggccaggagttcgagaccagcctggccaacatggtgaaaccccatctctacaaaaaaatacaaaaattagccgggcttggtggcaggcacctgtaatcccatctatttgggaggccgacacatgagaatcgcttgaacactggaggcagaggttgcagtgagctgggattgcactgcactccagcctgggtggcagagtaagactctgtctcaaacaaacaaacaaaacctacaaatgctctctaagtgtagaaaacataagaagatgcttatgttaattaggagaaaaaccaggatctaaacttgttagatcctggttttagatatataaaaagtacatagggaaaaactgtgggaattgttaagagattaactttgagagtatggaggggtgtgtgtgtgtgtgtgtgtgtgttttaaagagacagggtctcgctgtgtcccccaggctgcagtgcagtggcagaagcttggctcactgtaccctgaacctcctggatgcaagagattctcccaccccagcctcctgaatagctgggactacaggcatatcaccatgcccagataatttttgtactttttgtagagatggggtcttgtaatctttcccaggctggtctcaaactcctgggctcaagtgatcctccaaccttggcctcccaaagtgctgggattgtagggatgagccactgtgcctggcccagagggggtttttgaataatgttttcctacttcttatggtgttctagcatcttaaaataagtaagttaccactactacaatgacaaaaacaatgttaacaaaacaagctaactagatatcctctgctttttagaatactctatttcagaaactagtttttatttccccctacagtttgaaaatctgaacacagttgctgagtgtctgttttctctggtcaacggtgatgacatgtttgcaacctttgcccaaatccagcagaagagcatcttggtgtggctgttcagtcgtctgtatttatattccttcatcagcctttttatatatatgattctcagtctttttattgcacttattacagattcttatgacaccattaaggtaagtaattatcaaaatttgctgccaaaaaatcactgcaaattctatatagattataggaaaataccacattttaaaaacttaaaatattacagttcagattttgaggttttgtggacaaactttttagacgctggagatgaattttagggcattgtccctgttacccacagcagggtggattggtttggaggggtggtgggaaagaaaagggaaatggggtaagcatgggttgaatggggtaagtcaggtagtcaggctgctggtcttagccctgacagatatacctgccagtgtggctgcctggaacttaggattgagtcataagtttcagggatgagaggtgaccggcaccctgacaactctcagatattgctacaactcacactggataatacagctactggcatggtgcaggcttcctttaaattatgaaaactaaggcttttgtgactgtttagcttcctgctttcttaagctacctgatgggttctgtatcctttcagactaggccatttaactgatttgtggcttgaaggaatttcacttccttgggtgctggtaccttattcacagcagatggtcatgcttagaaaaccctgcttcagggtcagtgactgaaaaaccaggggtgccatgccagtgcctttgtcagggctgttttctgcttaaccactttctcagaataatgcagaagaaacccagtccgctaccttttgagtgtgtgggaagataagtaagtgttcaggtgggaatggtagttgcctctcgcatcagggtttgcatggagaaggaagaggtgcacactcctgccacagagattcatgtctttgatgtggcaatgtctctgcgtggtgggggccaagcctcagtgttgaagtaggttatctcattaagcatgaggggagggagtctttgtgtctgcttggaaaaaaatctctcttctgttccactaagcgaccaacttccataaaagtagaggaaataatgattactttccaagcagagtctacattgccaatgtgtgtgtggagtgggaggtctcatctagtcttgctgttagcattaaaagtttagactttttttttttttaaaaaaagagagagggtcttgctctgtttcccaggctggaggacagtggtataatcctacctcattatagcctccaactccagggctcagtcgatcctcctgcctcagcctccagagtagctgggactacaggtgcacaccaccatggccagaaaatttttgtattttttgtagagatggggtctcaccatcttgcccaggccagtctcaaactcctgggctcaagcgatcctcccttcttggcctcccaaagtgctgggattacaggcatgagccatcatacccagactagacatttgacttttgattatttccttcattaccttttttttttttaaaaaaaacctctccctggctcttctctgctttctttctgaagtttttctttggattgttctctgttcccacagtggccctgccttggtgttctgggactgacagattgattcatcattgtaaatatcagttcttggatctgagctagcaatgtgggagagttttattttagcaaaggtgggcttggtttgttgacaaaagagcaatttctcatgccttataaataaggtaacaacattgtgtactttctaaagaaattccaacagaatgggtttcctgaaacggatttgcaggaattcctgaaggaatgcagtagcaaagaagagtatcagaaagagtcctcagccttcctgtcctgcatctgctgtcggaggaggtcagtatcatgtttattctccatgctcctgagatgggctgttctgttgtcttaagaaagagcccctccaagattaccattacattcagagaccagcttatcatgggaaataattcacctttcttttctttcctcccactgaaattggctttagaaatgaattatttcttctaaaacagggttatgtagaaagctacacgatgtgattggaatctcttagaaatactataagactcttaagagaaggcataaattatgtccttaaagtcaagaggctgaactcttaagtggcccaagtaagaggtcaaagctcttatttttagaggtgaaactctgggagtgtcagaggtgttttcccttttcacagtatgtggtacaagcaatctttcttgatgagagcaggaaacttccttgcgaagaggctgtccaagtgcttgcttatccgtgcacaccagtagctcttccttgcctagctgtgctttgcctgttgttcgtcaggacatgtagagaaatggtctagacctcagtggacaaagcatattacatagtgatttgtggactagaatggggtcaggtgaagacaattttttttttaatgtgcctatgtttgctttcatctgaagtcaggggtgccagtttgtaactaaaagtataccctacatatgttttttctttttggaaggactctgtaacccaaattcctgaaggaagctatgagaacataattgctatttaaaaccacaggatgcatttttctgttaatcaattcatacagcatcttgggacttacaatgatatgactgagcagatccagagaatgtctggtaaatagaaaatgagatctgagaagagttgttttcagaatcacacctttttttctcagagcattaaattgttgctgtgaaagctgggataaaggaaattaattttcttaataggcagctgcctcctaagaggtaccttgtataaggaaagtctctcaaaatctcttttttactataagggggataaacttcattgaaaaatgtagtcatgaattctaaaaagtaaacgataggtctttggtgtttggaccttggtttgtgccacacaaagtcctgggaggttgttaaatgttttgtcatgcagccctatggaacaagtgaaagatttaaggcgtggaccccaagacgtttgggtaagattgggtctgagtggtgagacgcaaggagcaacagcagcagaccatttgccctaaagtgtgctgagggttgttgagaagatgcatggtgagacggagggtctgcccctcatgaagagtgaaagaatttgagggaacaagagagcccaccaaggagatcaactgaagaactaggatgatgaaagttttgaaaaagaggatatcaaaaaacaaagacaggtagctgtaactatgtttggccaaacgatggtcctgagtgaagtcagctatagcaatttcagtggaatcatcagaccaaagcctagatcccagggggcttgcatggaccctgcagagtgaatgaagggcctaggctgtgatggaaggaaatggattgtaatggggccttgagaacaagtgatggctttgactccatctaaaattaagtatagcttgatgtgtttaaaagctaggaatggggctggttatggtggctcgtgcctgtaatcccagcactttgggaggccagggcagaaggattgcttgagcccaggattttgagatcagcgtgggcaatgtagtgagaccccgcctcttaaaaaataaaataaaagctagggacagaagaatggactaaaattgaggaaggctgtgaatggaggctaaagatgaacataaagattcatctctgcaaagattggtttttgtgccccctgtctggtgaccatgacagatgacacctgctatcccagtgctgcttcctgcagagcacggctgtggtcactcttcaacaaagcagtccaacaaccagcacacatttgattctcctttgagtttttgacagagcctctagcctgagcatcagaacacctgggttttcattttggacactgccattaaccaagtgtgtcctgtgacctctcctaaacctcttagatggaccagatgacctctgaaacctcttccagttctaaagcgatgtggttctttggagagagatgcttggttgaacagatgcagagttaacctttaccttcctctattgcagtgaaggaggaaaattggctgttctagtaatttataaggccttgttagcgaagggacacagagattctttttttttttccagaaacaaaccaatgtatttattgagtaaaacctaaatgtaacatatatttttctttttttttttttaattttactttaaattctgggatacatgtgctgaacgtgcaggttacataggtacacatgcgccatggtggtttgctgcacctatcaacgcatcatctaggttcagctctgcatgcattaagtatttgtcctaatgctctccctcccctttccccctaccccccaacatttccccgtgtgcgatgttcccctccctgggggcatggaggttcttaagagacaggtgactcctcacagtgtttccaaaagcatctgctcaaacctcaaacagtgtacattgcctttatttatttatttacttattttttctgaatgttggtaaataatcagaataccttgcctgtcttaatttttcttcctcttctatgtttcactcaacatgtctataatctacgggcctagaatatagagtattcctattgctcctcaaagatgttaaagtattgtatctttcctcttttcttctttccctttctgttacaggaaaagaagtgatgatcacttgatacctattagctaaagttctgctaaagatgattaaagttcaggcatccttatccagcggctgagcagaggaaccccaaatgacttggacaagcagttccaaaatgactctcttatttaattgtggagtgggaaagaggactcacagttagccagctgaccatgactgaagttccagctttactttttataaacttgaatgataaagaatagaccatgggctactactgggcattagtgcaatataacagcgataataaaattctctattagtctgttaatttatgacatgatctcggaatggaaaaagatcatttcagagtgtgcgaaataatagtctttaaccatgtaattaaatatgtgtgtttattgtcaaataaggatttgttttaaaggtgattcttgggtttgaagacatttgttaattcatggtctgtacagaaatgaagctggttgcaataccaatctagagagtccaagctggtgaactattaagctgtttaaagatcacccttggcctggcacagtggttcacacctgtaatcccagcactttgggaggcctaggcaggcagactgagctcaggagcttgagaccagcctgggcaacatggcaaaaacccacctctacaaaaagtacaaaaattagtcgggcgtgatggcaggcatctgtagtcccagctacttgggaagctgaagtgggaggatcacctgagctctggaggtggaggctgccatgagccatgatcgtgccactacactccagcctgggtgacagagtgagatcctgtctcaaaaaaaaaaaaaaatcacccttaaatcaacaaaaagacctcatgctcatgcagtggacatttcttggcctgttttcctgtgggttttcttcagcatgatatgaagcaactgttggcatagccagtgggataaataagaaatggaatcatttggctgcctcgtcacttgtgctaatggtcagttgtacacacatgacatgtggaagtgacctgtagcagcggtcactcattttaacaattgaactctgctgggttgggtatttacctttgtctagaaaagaaatatgatatattttctctaaataaatttattttcatcattcca

SEQ ID NO: 19 - DNA, 59899 bp, Homo sapiens
actggggtggcgcgctacctctgcggagaaggatctgacagtgttccggagccggggcgagcagccaaaaggcccgcggagtcgcgctgggccgccccggcgcagctgaaccgggggccgcgcctgccaggccgacgggtctggcccagcctggcgccaaggggttcgtgcgctgtggagacgcggagggtcgaggcggcgcggcctgaggtgaggaggggccgggtgctgggtcgcgtagctggagttagagtgtcggtggtttcggacgggctatctggcactcgaggagacctcccttccccctgagagcagcgcccggaacttgtcagcccagcctggaaatccccacattccttccccttcctgctcccggacctccgaattctacttccacaactttgtcacctcgattatcgcagccctgagtacaaacttcacccaggcgcacgcacgcacccctcttaacgcccgccccgcagaacgcccttcaagaacaaacccccctttttgttaccagatcccacgtttttcccaatccccttttcatctcccctgaaattctattcgctccgcacttgtcttcattctcgaggtggatttcccttccccaaagccgttttttcatcttgaaatcgtaacgtttcagctttgttgaaagttcacaatgcttataaacactattaacgtttctttccttcttttgatcttttctattaataattatcattcctaacgaattccacatctcactgtatcccaaggagaacaaatcagtttttaaaattttacctcctccgacctaaacttttgaagatagtgcaggaagcaagggtctgttcttcagtggatgaacagcattttatttcataatccgaaactgaaaaaaaaaaaaaatcacaggttaaaaataagacgtcaccttttttttttttttttttttttgccttcagaaggaaacgcattttggcttagtttgtgaagtatttcaacaattatactgccttaaaataactagttattagaatgccagggtgaattttctgaaagattgtggtatttgcttttgacagtgctgtaaacaaaccctttaaactgtgtatgactgccagcttcaagttggaacaactcttaatttgaaattacggactcagatcatcagtttagctgtgtgccattatgttaatttcttaaattcatgttaattcctatttggaagtatttttgaactatgaactgaaatattacatttatagaaccaacttgctattaaattgtgctttccaactatttctctttagggataatcttgaacgtttgtttttaatcttgagtgaaagaaaaaaattacaggaaggagaaagtgtcaaaaaggacagactgtagtgggatttttttcttattttaagtatgtattgacaataccagtttaattttctcacaggcaatttagattattataaatactgctgccacctaatttaatataatatagtcttacgtaactaaaaatgttgttctcactcttatttgtgaattgcagtattttcaatttatttaaatttgtttccaaggctttgcacttcagttcagtgttagggcgaaagttaaatacatgtgaagtaggtgttaaaatgtcccctttatagagaaggaaacaggagtctcgctgaaaactagatctgtgtgactccaaatcctgtgctctgaatcattttgtcatgttgacacgtttctcataaaaaccccagtgccacaatttggtttgggaacttaagggcaacccataaatcctctacagtggcagggagggattccccgctccctcctttcagagctgctcattttaatgggagtcagaattctctggccctaatacatttgcagcttggctcctagagaagcatggaatgttctcacagcttctccgtttctttgattgcaaaggcagaatgatcagagttgaggttcctattgtgctttattattttacacagcaaatactaagcaattactacctgctgtacgaactcacaaaggtgcaggagatgtaatcaggaccttcaaagagtttataataattggattgacaaacttatacgaaaaaaactacaaggatgcaaagcagttttaattaaatgcagagtgatgcagaaaatcctgtagatattaaaattagggaatgatcgtttaaggattggagtgagcatttaaggattggaatgagcaaaggatttaccagaagttggccttgaaacctgggtaggatttggataaagggaaaaatgaagacagcccattaataatagcgaatggaggacaaaatgtagaatggagaatatagaacataatataggactagcttgtggaaaggatcagcagtaactaaggtctattaattaaaacaggcaatatatttagtgcttatgttgtgccagttgctgttttgagcactttgcccatattaaggcatttaatcttcataatattatgaagtaggtctaataataataggataaaatcctctttttacacatagggaaacccaggcacaagaaggttaattaatttgcccagctaagtggtagatctaaaggtcatacatagacagcctggcttcagaatctgacctcttaaccatgatacatcctgcgtctccatacagtacgcttgagcgacagcgagtagatagaaaataagatcataccagaaagtctataaaaacccacccttaattgtccaccaggtgcctcaaactatggtagattctgaggatatcaagatatgtgaaacaattactgtgcagtgttctgagtcctgttagggaatgatgtaagagtacactgacagcaaagatgtttgaagtggggggaaattccatataagagatgatacttcaaaagcagtttgtagtgcacagcagagtcaggaaagacattggaataatatatgtagaagcacagactgaaagaacaaggtatgttagaggaagtctagtggtttgctgagtctacagggatggttagtagggagtgatgaaagataagaccgaattataaatggcatggtgtggtcaagcaaaatgaggagcttaagtatttgctttgcagtttggaaactacaagaataatttcagcattattggagtaaaaaagccagattgcttgcaattgcaagcagttctctctagaagtatagtagtaaggtagcttgagggaggagtctgaggaaaggatttttttttttttttagaatagagaaacttgagtattggaaaagatagattggataggcacatcaaagccaaaattttaggttcttaaatagttagaatatttggcattattattcaccctttaaaaagctgttgaggagaagaatgacaggtttaaagttgtgttgtagagagagtgatccaccaacaatgttcagaatgcttggtggggaggaaagagactggaagcaggaacacagttgaaattattgaggtgatcaatgtccaaattaggttagtttgtggtagagagtaaaaagaagagatgggtgggaaagatattatgggagagaagacaggataagatttgtaactgagaaaagctaaaatgtactgcatagatgagagaaacgatggactccattgacttaggcagttgaagaggatgagttgtttgtagatagggaaaaatggtaagtccttgtgactttttaaaaagtgtgtgggcattcatcccattactgggcatatacccaaaggattataaatcatgctgctataaagacatacatgcacacgtatgtttattgcagcactattcacaatagcaaagacttggaaccaattcaaatgtccatcaatgatagactggattaagaaaatgtggcacatatacaccatggaatactatgcagccgtaaaaaaggatgagttcatgtcctttgtagggacatggatgaagctagaaaccatcattctgagcaaactgttgcaaggacagaaaaccaaacaccgcatgttctcactcataggtgagaattgaacaatgagaacgcttggacacagggtggagaacatcacacaccagggcctgtcatggggtagggggaggggggagggatagcattaggagatatacctaatgtaaatgactagttaacgggtgcagcacaccaacatggcacatgtatcatatgtaacctgcatgttgtgcacatgtaccctagaacttaaagtataataaacaaaaaaagtgggtgggcatttatgtgtatatgtgttcatgagcatgtacctatggtgtattgtttttagacctcttaaattgataagactcagagacagaatatctaagaagatgaaatgtaactggaattaaaagaaagatccaagccaaaattcttgaaattattttgtttgaaggtagtagttgaagtcatgtcttcaaagaagttggtatttaaaaagaaaagtcgatgcccagtactttatctttgggtaccttcatagcctggagataaaagctagcagagaattcagtaaaggagacaagaaagaggataaaggaaagaattcaactacattatctggttacatagaaaccaggatataggagaaattcaagaaccagggatggtcaacaatgtgaaaggcttcagaaacacttgtgatatatatagtcaaaatggctacagtctcttcttcttcttttttttttaaactttgcggctatctagtgtatcttagtaagatttaataagaaattagctgattgatcgtgaataagagagctacattggctgaaaaatggctatagtatatagatgattgttttaaagctgtgtgtatacatatccagagcaggagattcattcctttcagcactgtaaatctgttgccctgttacatttggaatgttctgcctccaaagtttcattttcttttaagcaatcagcttcaccctttgctctaaggttgattgatctgctcagtctttttttgtttggatgttctgttttatgtattacccccaaccccaccccctagtgcaaagtgagttaatcagagctatgtttcagatagcatagctctggttagactggcatgctctgggattttgtcattggtaatcttcacttgacaattagagtcaaagatgatgtagagttcatatgtgtgctattttctctatctaggaacccctacccttattttaagactgggcgctcctggcccctgtctgaattgggtattttctgtgctcctgtggcactttgtgcatattctgcatctctaaactttggacttcttaaaggcaagaactatttatatggcttcaattatgtttgtaacggaataaaaattgaataaaagcttgagcttttatttcttaagcaatggtgagaacatggatgttcatcaaagtgctctgtaaaccttttcatttggctaaaatagtctaattttaaaaggccctaaggtcataagcatattctatgtgtttttcaatatgcttataattttgcttttgcatttaggtccttaatctggagagagagtgtatgcttatacatgcatgtgcacgtgcatgagtgtgtgtctttttgtctgatgaaatggggttcttttttttcttttttgcttatggagccagttgtcccaatactatttattgaatagtcctttattttcccagcaaatgagcaaccttttaaaaaatcagatactaaattcttatatacacttgagtgtgttttgttttgtaccattgatttagttgtctattcatttgccaatcagtgctatgtttactttacctttagactgccctttttttttttttctgcgagactttttttttttttgagacagagcctcgcactgttacccaggctggagtacaatggcaagatcttggcttcttagcttgctgcagcctctataagcccaggctcaagtggttgtcccacctcagcttcctgagtagctgggattacaggcatggtccaccatgcccggctgatttttttttttattttttttttattttttatagagatggggttttgccatgttgcttaggctggtcttgaactcctgggctcaagcaatctacctacctcggcctcccaaagtgctgggattacagccgtgagccactgcacccagccttctgttacattttctaattagttattactggtatgtaggagagcttttttttttttttttggagatggagttttgctcttgttgcctgggctggagtgcagtggcgacatcccggctcactgcaacctccgcctactgggttcaagtgattctcctgcctcagcctcccaagtagctgagattacaggtgtgcgccaccactcccggctaattttgtattgttattagagacagggtttctctatgttggtcaggctggtctcgaactcccaacctcaggtgatctgcctatctcggcctcccaaagtgctgggattataggcgtgagccaccgcgccagctggagagctattttttgatgatgttttgtttgactgttatgttaaactctaaatagtcctattattttttgatgatgttttgtttgactactgtgttaaattctcaatagtcctaatagtttgtcatgtgattctcactctttcttgatagatgatcatatcattcacaatttattttccatttttagatcttatttattatatttttgcttaagccctttagagcagtggtgaataactgatgacttcaagcatcttgtctgaatcttgacattaataggaacgcttctaatttttacctttaaacctatagatgcttattataggtttctttcttccttttttttttttttttggaggcagagcctcactctgtcgcccaggctggagtgcagtggtgcattctcggctcactgcaacctctgcctcccgggttcgagcaattcttctgcctcagcctcccaagtagctgggactataggtgcccaccaccacgaccagctaattttcatatttttagtagagacagcgtttcaccatattggccaggctggtctcaaactcctgaccttgtgatccacctgcctcggcctcccaaagtgctgggattacaggcgtaagccaccatgcctggccttgtaggtttcttatagtagtacctgtggcagcaacagcaagagctgcactaataataacagctgttaaccttttattgagtagttacaatgagccaaatgattctaagcactttatgtataatgagttatttaatcatcataacattcctagatgggtaggtggtggtggtaccccatgtttacagataaaggaagtaaaagtgaaggctatttaaaaacttgcctaagatgttaaaatatagggactgaaatttgaacacaagcaatctggttctagagtccctgtatcatctttgttatccttcaccaaggtaaggatggtctctttcagtcttagttttctgacactttgttgttatttttaagttttagatgaacagttgttgaatgttatcagatgcttttcaaacatctgttggaatgaccctgtcattttcctttggtctgttaatatagtaattagcagtatcttttctcattttgaactgtgcttattttaggctaaatacttgttagcattcacactttggttttgttttcaaatctatttagacttttctctaaccatactacaaaaaaatgttaaaggcagtttttcaggcccaaggaaaatgataccagatggaaatacggatctatacaaaggaattaaaagctctagaaatggtaaccacacgagtaaatatgtgccagtctcactctgtcacccaggctggaatgcagtagtgcaaccacaactcactgcagcctcgacctccaaggctcaagcagtcctctcacctcagcctcctgagtagctgggacaacaggcatgcaccaccacagctgtctaactttttattttttgtagaggcgagagtcttactatattgcccaacctgatcttaaacttctgggcttaagtgatcctcctgccttggcctcccagagtgatgggatttcaggtgggagctaccaatgtgaagttttaatatatgcaaaagtaaaatatatgctaaaatagcacaaaggtctggggggagaaatggaagtatactattatatactatgcctgaggtgacataatattacttgaagatagattgtgaaaagttaaagatgtacactataaacctaaagcaaccaataagaaaacaaagaattatagcttattagctaacaaggaaaagagaataaaaaataattaagaaaaataaatgcagaaaagtaaacaggaacaaagaacagtcaagaagaaaacaaatatgaagctgatagctttaaacctaatcatatcacaaattatattaaatgtaaatggtctgaacacccaattggaaagcagagattatcagattggatacaaccacatgctgcctaccccctaaagatgccacttaaatatgaagaaacatacagattaaacaaaaaagaatgggagaggatatgtcatgataacactaatcaaagtaagacagaattggctatagtaatatcaaagtagatttcagagaatgttaccagtggtaaagaagggcatttcctaatgataaaagggtcaatttatcaaaaggatctaccaaataacatagtttcaaaacacaacagggtaaaaactgcaaggagaagtaaatccacagttatattcagggatttcaatatccctttttgaacaatgatagaagtagtagtcagaaaatcagtaaggatatggaagatttgaacactatcaaccaaattcacgtaatgaccatttatgtaacactctaccagcagcagcagtgctttttaagtgcacacagaatattgatttcaagatttataaggctaaagtcatcacgacagtgtggtggtagcatataaataagcaaattgatcagtggaacaaatagagtaggagtcatcctaccttctgttttcataaagtactgttagaacacagccacccctgtttgtttatgtattttctatggttgcttttgtgtcgtaacagtagattggtagctccaatagagaccttatggctcacaaacctagaatatttacctcctacctcatacatgaaaagcttgcccaccctggaattgagagtagccaaatagacccacacctgtgaacaactgatttttaagaaagacgcaaaggcaattcacttgagaaaggataattttttcagcaaatagttttgaaacaattatccgtatatacaaaatgaactcaaatttcagcttgacaccacacataaatattaacttgaaataactgagacctaaatgaccctaaaactataaaacttgtaggaaaaaacctttttgactttatttttattttttatatttttttttttttgagaaggagtctcattttgtcacccaggctggagtgcagtggtgctatctctgctcacttgcagcctcctctgcctcccgggttcaagcagttctcttgcctcagcttcctgtgtagctgggattacagatgtgcaccaccacacccggctaatttttaaaatattttagtagagacagggtttcaccatatacccaggctggtctcgaacttctgaactcaggtgatctacccacttcggcctcccaaagtgatgggattacaagtgtgagctactgcgtcgggccctttatgattttagattaagcaaagacttcttagatacatcaaaaacacaaattgatgaattgaactttattaaaattaaacctcctattcgtcaaaagatactgttaaaagaatgaaaagacaagcatacaagaaaataatgcgtaaatccattttctaataaaggccagaatatcttcttagaactttcaaaacttaatgagaaaacaggaaacccagttgatcaatatgtttgaacagacacatcatcaaagaagatatagccaagcacacacctgccgtagggcctagccattccactcttcacttaccttctattttggggacacacactatgtgttagtttcctaggggctactgtaatagagcatccctttgttacagtatcccttacctgaaatacttagtaacagaagtatattggattttggatttttttttttcagtttgtgttgtatttgcattatatacttaaagttaagcatcccaaatcctaaaatctgaaatccaaaatgccagagctcaaaacgttttggaattagagcatttcagtttttagatttgggatgttcaacctgtaccacaaattgggtggctcaaaacaacaaatttattctctcaaggttttggaggctagaagtccttttgagactttggatagaatcttcctttgcctctcctagcttctggtggtagccatcgtcgttgagattccttagcttacagctgcataactccaatctctgcctgtgtattcacatggtattcttcctggctctgtctctttaaagacaccagtcatattgtactaaaggcctattatactccactataacatccaattaaatctgcccatagagtaacattttgtgctactggggttaagacttcaacatattttttggggggaacagttcagcccataacaaacaaaaagaaaattaatttaattatattgtatttagaacaggggttggcaaactatagcccataagccaaatccagcttgcagccatttttataaataaagttgcatgggaatatacctatgcccacttatttacatattgtgtatggctgcttttgcactttaataacggagttaactaattgcaagagagaacttaaagcccacgaaatctaaaatatttattatctggccctttacagaaaatgtttgctagcctattttagaaggtgttaagtgttgtagaaaaaaaaaaaatcagtaaaggggtataagaaacacagggtggttagggaagatctctatgaggaggtgaatttgagcaaaggctacaaggaattactctctatatattaacttatgaagatgtccactatgtagtgttaagtgaaaaaggttataaaacatttctcacttacatgatcccatctttgtaaaatagaaaagtgtgtatatttatacaatgtaaagttatataatacatgtataaaaaattttgcaagaatatccaccaaaatgttcatggtagttatctcttggtgggattatagtgcactttcacatggcattttttcagtttcttttcattagacatttaaaaaatatttttataaatttaattccttatgtgttattaagttatatcaaaggcttaatgtgtatgaaacaataatggaagattcaactccttgcctaagtttgaagttacttgttgtatttcaaagaggagcactagtacttaagctagaatttaagtgaacaaatcttaaaatggatttttatctctggttacatagaatagttgttagcaggcttaatttagtgctagtagaagaagaaatatgtgattgttaaagaactccgtctgtcataaatgttcctgtcatgtttctgtgacattacatagacgtcagggaagtttgcattaggtgtgggtgagccaataatgtttgcaagcgtatatcaaatcatagcactagggctgggcgcggtggctcatgcctgtaatcccaacactttgggagtctgaggtgggcagatccctttgagctcagcctgggcaacatggcaaaacactatctgtactaaaaataaaaaaattagctaggcatgatggtgccatctctagtcccagctactcgggaggctgaggtgggagaattacctgagcctgggaagttcaagctgcagtgagctgtaattgtgctactgcactgcagcctggtgatgggagtgagacattgtctcaaaaaaaaaaaaaaaaagcactagaatatttgaatactcttatacaagtgtttatgggtttattttattctgaagctcagaacatatctaaagtaggatactttctgcaaacccaaaagcctaagagcagatggggatttttaaagtacacatataataaaattatcaaagccagccttctgaacaagactctcctctctttacagtgaaacccaatggaaaaagcatgacatttagaagtagaagacttagcttcaaatccctactccttcacttactaattttgtgatttgggtaagtaattgatcttgtctgaattttttgtttttttattttacaaagttccaataaataatccctgccctactcacctgattctttaggatattaggagactaaagtgaaataatttatgtgacaacattttgtgtaatgtaaaataatatcctagtgttaattgttatgaactcataattgatactaatggaagagaacagagtggataatttaaaaactaatttaataattagttaattttgtgtaggtattaccaacttctggcagtttattcacagtaacactgtactgtgaaagatatatagaaattttcttcatcttgatccccacgcaacttattaattcaacaagcattattttgccttctatttggcaattttagttcatatactgttctacaattgtaatagtaatgttaccatagtaacaaagtttatattgacattctttttcacatgcaatgtaaatctaaatatattcgtgctttttatttcatccttaggttaagttagaaaatgaaaaaaaaatcacaatccataggtgacaaaaataatttataaagagcctaaccattaaatatttatccattgtaactctactgctttttctctcacttgagaaaacatatggaaatgaaagtaaatgagaatgaacaactatagggataatcttgaatttattctattttaaataaatcatttatgaactttgtttctctaacattaaaagtagcaatacttgttatacatcatctagctcctttcggcacactaccatgttatatcaccatagttgaggaatgattacagcttttggttttcagaaataatctttcctgtatttatggttactagttaggttttggcttcatagaagcttctcaagttacctgcaaatttcaaggaaggttagtgtatgcaatgtatggttataatatatgcatagaaaactctgcaagaggtgaggtaatagtgctattaatataattttaaattaaatattagtatcaacagaaggaaaggagggaaaaaataagcaaactactgtcaattctgtcaatttttttttttatttttttgagatggagtctcgctctgtcacccaggctggagtgcaatggcacgatcttggctcgctgcaacctccgcctcccaggttcaagtgattctcctacctcagcctcctgagtagctgggactataggtgtgcgccaccatgcccggctaatttttgtatttttattagagacggggcttcatcatattggttaggctcgtcttgaactcctgaccttgtcatccgcctgccttggcttcccaaagtgctgggattacaggcatgagccaccgcacccggccataattctgtcaatttttaagcaagccccaagtgaagttaactgtattgcatataatattttatatagtgttactgtgtcttcatctcttagatttggactatgaaatcaagtcccataatagatgtttcttcatcacctctccattacaatcttttaaaaattaggaaagattactttctaaatgtgaaatgtggaatctacctttgcctagttcgctttgcttgtgttccatggtactactcaaacaaatctaattgctttgaagtaatcataaattctttcatggacctcttgttctggagcagctttgttgcaagaatatagtacatttggcttggcacagtggctcacacctgtaattccagcactttgggtggccaaagaaggaggattgcttcagaccaggagtttgggacctgcctgtgcaacatagtgagacccccatctttacagaaaaatttttaaaaaattagctgggcatgctggcaagctgttacatgattagggagtgcataaaatcaagttagtatgtatatttaataaaacaatattgtgttccaagtgcagaactaggaagccatttctcatcaagaagagttaatagttttatttagaagaaaaaaattacacattaagtattttgtctttaataattttagcttttattttaggttcagggagttcatgtacaggttacatgagtatattgtgtgatgctgaggtttggagtacgattgaactgtcacccagttggtgagcatagtacccaatagtttgaaccttaagtatttatttattttatttattttttgagacggagtttcactctgtcgcccagcctggagtgcagtggcgccatctccgttcactgcaacctccgcctcccgggttcaagtgattctcctgcctcagcctcccaagtagctgggattacaggtgcccaccaccacgcccagctactttttgtatttttagtatggacggggtttcaccatgtaggccaggctggtctggaactcctgacctcagatgatccacccacctcggcctccctgagtgctgggattacaggcgtgagccactgcacctagctgacattaagtattttttaatttaaatttattttttgcataagtactaaagattcacatggtcaacattgcaaggctgcagagtatatggtggagcgtctccctaccaccctgatctctcaaataccctgtcacagccagtatttgaacttttatcctcctagagatactgtgcatatataaaaaaacgaatgtgtgttttgttttcttgtatattgttttgcccacaaataatagcaaatgcgttgttctgtaccttaacaatgtaacaatgtattttagataactttatgtttctgtacatatagagcttcctcattttttttaaatggctacaagtatttacatttacatggttttggtataccatcatttaactagtgtcccatcataatcaggttgtttcagccttttactgttaaaaacaatgcagtgaataactttgtacatgtgttgttttattcatatctgtaggataaaataaagtagaatcattagaatcaaatgtgtgtgttttaattttgattgatattgccgaactggctctctgccttgtttgggtagagcttttttctttgtttttaagtgaggtctaatttacaaacaacaaaactgaccatttttaaagtgttcaatgtattgggaagcttatgccaatttacactataacctgtagtgtgtgacgatactttcgttgcttagtctcacaacaccctgttgatactttttgggtttttatatttttgccaacactaatatgtaagaatggtattgggataatttttggtttgtttaccttttgttacatactgcaaaacagaactcataagtgtacagctcagtgaatttatcactgtccagatcaagatacagaacatgctcagcacccagaatgtccccttttatacccttcctcacaaaaaacaactgctctgacctctgtcaccaaacaccgtagacttttgcctctttttgaacttctgtaaaataaatcatgcagagcgtactttcttgccttttttctcttttaaaatttttttgtagagtcagggtctcactattttgtgcaggctggcctcttaactcctggcctcaagcaattcttccccctcagcctcccaaagtgctgatatgacaggtgtgggccactgcacccaacctgtctgatttctttcattctgtattatatatgagattcatccatgatgcatgtatctgttgttatttttcattgctgtgattcaattacttgaatataccataatttatcctagtgttaatagatatttggttgattttatttttcatctattttgaataaaacttctgtaaacattcttgtagatgtctttggaggtattaagcactcgtttcttttggttataccttatctgggcagattttgtttgttttaaggtctaatttataaacaataaaattcaccattttttagttacaacttgataggaaacccatgagtctaacatttctgcgtttcttatcagcaaaaaccctgatggctgccttttttctgaactttgttttgagacggagtctcgctctgtcacctaggctggagtgcagtggtgtgacctcggctcactgcagcctccgcctcccaggttcaagcagttctctgcctcagcctcctgagtagctgggattacaggcggccgccaccacgcctggctaatttttgtatttttattagggacagggtttcaccatgttggtcaggctggtcttgaactcctgacctcatgattcactcgcctcagcctcccaaagtgctgggattataggcgtgagccaccatgcccagccaacttaccttttaaagaatgttggaaggtagactctcagagccgtggagcaaaggacaggcttacttacagtcttcaaagatacagataatgtctccctctagagtaaatggcagacatgcttcctgcatatttttcaagtttagggttacttaagatctgtctttctttcctgtgaagcagcctgttcaggtgtcatctgacttcacaatgccctgtgacagttgggactcaagcagctggcgcaagaaaatgctgatactctgactactgttatgagtaatacagtcctttgcttctgacgcaaaaatgtcatgccttttgccagtatccatgacactgtggtaggctgacttgttagcttgaaagtaaggtaaaatctcagtgcctttgaaacagttgacacagaattcagtgaattttgacaaatgtagtctttttttttttttaaatagaatttcgctttgttgcccaggctggagtgcagtggtgccatctcagctcactgcagcccctgccttccgggttcaaacagctctcctgcctcaagcctcatgagtagctgggactgcaggcatacaccaccacacctggcgtgtgtgtgtgtgtgtgtgtctgtgtgtgtcggggtctcgctctgttgcccatgctggagtccagtggcatgatctgggcttactgcaacctctgtttcacgggttcaaacagttctcctgcctcagcctcccgagtagctggcatcacagacacccgccaccacgccaagctactttttgtatttttaatagagatggggtttcaccatgttggccaggctcgtctcgaactcctgacctcaagtgatctgcccacctcggcctcccaaagtgctgggattacaggcgtgagccatcgcgtcctgccaaatgtatagagtcttatagtcaccaccacaatcaagtcatagagtatttttatcaccccagatttcctttatgcccttttacgtgtgccttctctacctcagccctaggcaaccctggatctgctttctgtcaccttagttttgccgtatcaagaatttctgaggcacatgcctgtaatcccagtgctttgggaggctgaggcaggaggattgctcgagcccaggagtttgagacagcctgggcaacatagtgagacccccatctcttaaaaaaaaaaagaatttcctgtaaatagagttatacaatgtataacctgttgtgtctggcttcgtttattcagtgtaatgcttttgagattcattcatactactgcatgtatcaccagttcatactcttttttttttgtttgctgagtagtattctattatatgtctctaccattgtttgaatgtatgtttatacattcagcagttggtggacatttggattgtttccagtttgggacttatgaatgaagctgctgtgaacatttgagtataagtcttattgtgggcatatgtttttattttggggagtacgctctttggagtggaaataccaagtcttatggtgtgcttttaacttggtaacgaactatcaaattgtttaccagagtgtctgtatcattttgcgttcctatctgagtagttctaatttatatctctcattttgagtgaggttgaaagtatcttttcacatgcttgatttacttgtatttccttttctataaactattcaaatatgtttgcctgttctattaggtgttagaattttttagtgatttgtaggcattctttatatatcgggaaaatttttggccatgctatgaattacaaacatttttttccatttgtcaggtatcttttaaggatacatattatggtgagttttgccatgtagaaatttgtcagtctgaagttcttaatctcacagttatttactaatataagacttcacataagaaagaaacaagatatctcttttaattaaccttaaagtataaattatgttttctagcagtgttttccatagccataacttcagtgggaataaagaaaaataatgtgaagacttaagttttctacattctcataagaattttaccaccttttagaaacacagctacagcatggaaacaagattgtgtcttaaattatgtgtatataagagaaaaaatattaaaagtaatattacatgtgtctgttgcagaaatatccgcgcaagatgttgacgttgcagacttggctagtgcaagccttgtttattttcctcaccactgaatctacaggtaaggttcatgaaataccctatcttctaacttcacaaattaggtttatatatttttatattattatataattaagcttatgtttaattattatgttcatatattctttctaggataatcgagagaataatatcttaaattgattttaataaaaatattcttgataatctgtttttgtataatttgagttgtaacagtcatcttacatgctaagtcagtaatttaagtcagtaatcttaaatgctgtatatcaatactaacaataactttaaaatggggaaggaaagaagtgtgtgggtttttttttttttcttcagtaaatgaataggagaaaatttgttaaatcttgttaaattttacgtcattcatactacatgctcttcaggtattgaagggctgctttcctgtgtctgtaagtccttgtccccaaattacagttacccagatatctaatcattctataggatctggtttttaaccctgtgcatgctgattaccctactgattcttctcttagttgcctgtattacatttaaaatagaatactggctggacatggtggctcacacctgtaatcccagaaccttgggaggcataggcaggaaaataacttgagtccaggaattcagtctgggcaacaaagcaaggccccatctctacaatttttttttttaattagccaagtattagtccattctcacactgctataaagaaatacctgagactgggtaatttataaagaaaaggtttaattgattcacagttctgtaggctgtgcggaagcatggtggcatctgcttctggggaggctttgggaagtttccagtcatggcagaagacaaagggggagtgaggcatctcacatagcgagaacaggaggaagagagagagaaagggaaggtgctacaaacttttaaatgaccagagctcacaataactcattcctcatccaccatctcgaggcagtaccaagtgagaaatccacccctatgatttaatcacctctccaccaggccccacctccaacactggggattatgatacgacatgagatttgggtggggacacagattcaaaccatatcatgcctctagtcccaactactcaggaggctgagccaggagaatcatgagccctggacctcgaggtcacagtgagccatggtcacgccattgcactctatcctgggtaacagagcaagaccctgtctcgtaaaaatatttatgtgtacgtgtgtgtgtgtgtgtgtgtgtgtgtatgtgtgtgtgtgtgtgtgtatgaataatactatcccagctgtcccccttactagctgtaggaccttggtcagtcattttctgtacctcaatttcctgatctatgaaatggtgataataaaggccactacctcctagggttattagtgaggattaaagaagttaatatagaggccaggcatggtggctcatgccagtaatccaagcactttgggaggccgagatgggtggatcatttgaggttaggagttcaagactagcctggccaacatggtaaaaccccgtatctactaaaaatacaaaaattagccaggcggtagtgccgcacgcctgtaatccccactactcaggaggctgaggcaggagaatcgcttgagcctgggaggcggaggttgcagtgagccaagattgcaccactgcactccagtctgggtgacagagtgaaaccctgtttccaaaaaaaaaaatctgagcttggtagcacatgcctgaaagtctcagctacttgggaggctgaggtgggagagtcacttgaacccgggaggcaaaggttgcggtgtgtggagattgtgccactgcactccagcctagggtggcagactgagaccctatctcaaaaaacaaccaaaaataagttaatatagaggaaatatttggacagtgtttggcctacagtaagcattataaaaatgatagttactgcatatttattataaaggttattgttgtctttgaataaaagtttctttatgaaaaaaataaacgtaatataccaaaaccaatctgactacagtggcactcatacttactttgatctgaacatcatttttataaagttacgtaactatgtggtagctgagatatacccttgtttcatgttgagctagtgatcagtgaaaattctcaggtggtttttacatgagttactcttaaactagttctccctcacccaatgtatatttcttattacctaaataggatatatttcctctgttgctaatttcattttatcagttttagcctggtgttctactctttcagcataattttaaatcccaacattttcatccgaagtgttggcagttgtttgtagtcctgtcctctgctaatttgataagcatgtgtgtctgtcttttcccaagttgttgattaaaatgttgaaaataacaggactgcattagctacctgttgctgcctcacaaatactccaaatcttcaaggcttaaaatgataataatacctctcatgatttgtataggacaagactatagataggcaggcacaatcagacgtattcatctttgctgtacaatgtctggggcctcagctgcaatattcagactgggggctggagtcatcttcagactccttcgcttatatgtctgttgttaatggtatctgcaggctgagggctttgctggggccattgtccaaaacaccatacgtggcctctttttatggccctggctttcttacaatgtgtggctgggttctaagggcagatatcccgggagagagaaagaaagctaattggagtctgtattcttttaatgatctagcctctgaagtctcatagcacactccattggctggagtggacacaaggcacccatacagatctgatgtggttgggggaaatgcagtccccacctcttcatgaaaagagtatgcgtgacatcgtaagaaaaacgtgggatgggataaatatgtaggtgtggccattcttaaaatacagtcttctccaaggattgagggcatgcacttcagcatattctacttaagactatcctctaattgacttttttcttaagtcagtttttttatatatgggtaatcaaatataaatttgagtatgaacctataaaagtagcaaaatatcagcaatttcataatgttcattgtaatatcggttatagtatattctttttttttttgctttttttctttttttttgagatggaatctcgtttcgttgcctaggctggagtgcagtggcacaatctcagctcactgcaacctctgccccccaggttcaagcaattctcctgcctcagcctcctgagtagctggaattacaggtgcaggtcaccacgcccgggtaatttttgtatttttagtagagacgggatttcaccatgttggtcaggctggtctagaactcctcatctcaggtgatccatccacctcggcctcccaaagtgctgggattacagacgtgagtcactgcgtccaacccagttatagtgtattctaattcacatttcttcatcttgccctataaacattcaaaataactttatcagatacctttcttaattaaaatactttctttttacaatttaatctcagcctggtagccctgtaaaatgggattaatttgacatgggatggtattattgaagctgtgtctcactttgaaaaacggaacatttgccccttttttttcgagactgaatctcactctgtcgctcaggctggagtgcagtggtgtgatcttggctcactgcaagctccgcctcctgggttcacaccattctcctgcctcagcctcccaagtagctgggactacaggcgcccgccaccacgcccggctaattttttgtatttttagtagagacagggtttcactatgttagccacgatggccttgatctcctgacctcgtgatccacccacctcggcctcccaaagtgctgggattacaggtgtgagccactgcgcccagcccatttgcccatttttaatatttctcttattctgtgtgattaaaaattattcatactgagtctctaattatatctttttagaactctagagtatatttcatatttaacatccctatgattactttagagaaagtataacaagtgattttgccaaagaataaagtgatgtctagggaattgtaaggtctgacccagtatcagagagtaacttagtagagattctccactggatgaaggaccatgctattggaaattgagagtaatatatgcactaagatttacagtaggcatttataaataacagcaagatgatataaacagaccacattataagtttgaaacaaagaaatacacattccagctctgggttttacaggctttgtgagaggtcctgggattccatttggggatacaattttgactgcaaaaactgtttttaattttttctgggctcactgcagccttgacctcttgggctcaagcaatcctcctgcctcagcacacgaccctcacccccaagtagctgggactacaggcgtgtgccaccatgcctggctaatatttatattttttttgtagagatggggttttgccatgttgcccaggctagtaatttttaatctcaaaaacacttcatgggtaactacccaggaaccccacagcaaataggattcattgaggaaagccaccttaaaattgtggacattgaagctagagaaaaagaataaaatcatgtcaaatagttgggacttttatcttggtagtaggtagccactaaataatttaaagtagacaaatgtcctaattattttagaacagtaactgacagtagtatgtaagataaactggaaggaggtcagactgatatagtatcctgtgcttcagcagtcaaagtagcattggaaagaagatgttgatatgcttattaagcatatagaaccaatacagtgcactattgttaagttggaggttagaggaggctaattggagatgttggaagatgactacagagtatctgtcctggatgtctggatgggagtggtgctgttagcagaggcagagaaataagaataaaaaataataagtttgaaaagattatgatacataatagttttggacatgctcatttaaaaatagctatgggatatctcaggtagatatatgtctaatgggctattgaaagcatgggggtttagtgctagagatagggattgagatgtcatcaatgtggagtaggtgataggtaaagcatgtagttgtgtttaattctcttttacccaatctgattctttgtgttttgttttgtttgttttgttttgttttgttttttgagactctgtctcactctgtctcccaagctggagtgcagtggcgtgatctcactgcaacctccacttcctgggttcaggtgattctcatgcctcagcctcccaagcagctgggattacaggtgcccaccatgacacccagctaatttttgtatttttagtagagactgggttttagcatgttggttaggctgattctttgtttttaaataggggatcctatcccatgcatttattttcactctgttgtccagggtggagtgcagtggcttactacatccttgaccccttgggctcaagccatcatcccacttcagcctcccgaatagctgggactataggcgtgcaccaccatgctcggctaattttttttgtttttagtacagatggcatctccctatgttgcccaagctggtttcaaactcctgagctcgagcgatcctcttgcctcggcctcccaaaagtgctgagattatagacgcaaaccatcatacccagggccatgcatttattcttaaaactaaactatttggccatcttgttctattcttcctgttttgtattggtcccttgctgtttcctttgttgtctgagttttgatgtgtggacaatgtatactgtctgtgaccccaactgtactccacaacagcattcaggactgtagaggagaccaccactgcctgttttctggagagtttagtttagacctgggatctaaatggagggacaggatacgttgtggggcaagtatgaatcatgctgcaggcagtctgtgtttcttaaagaaatagtttataccatgggctataaagcatgaatgggtttttcttaattcagctctattatctttataatttgtatatttctttacaaattcaggcattaaattctaaccatattaattttcagttgtgtattgtctttttctgtgtctttagggatattttagtgacggttgagggactctacattgagtgctaccagctagatatcattttgtaccagaaaaattcagtccatttatatattttctattgttcctttttaggtgaacttctagatccatgtggttatatcagtcctgaatctccagttgtacaacttcattctaatttcactgcagtttgtgtgctaaaggaaaaatgtatggattattttcatgtaaatgctaattacattgtctggaaaacaaaccattttactattcctaaggagcaatatactatcataaacagaacagcatccagtgtcacctttacagatatagcttcattaaatattcagctcacttgcaacattcttacattcggacagcttgaacagaatgtttatggaatcacaataatttcaggctgtaagttttgtttttgtcttatttcagactttgtcatgactattgaactgcatttttaatgttgtcctttcatctttataaaatgtagtaacttgtggacttagtgacttggacatgtttggtttttaaaaaataagcttagaagtaggaaccacaagtctcctgtctttcctgaaagtcaagcagtttcactttactagagaaatatttgacatgagaccccccccaccacaggaaagtattgttgaattgacataatgatggtaattctcagtatcccttaattgctgagaaaatgcacgtgtaaagcagctacctgaagaaagcgaacaaatactggagtaaatcctttttttttttttggtgacagagtctcgctctgtcacccaggctggagtgcagtggcatcatctcagctcactgccctcccgggttcaagcaatcctcctgcctcagcctcccaagtagctgggactacaggcatgagccaccacgcccggctaatttttcatatttttagtagaaatggggtttcgccatgttggccaggctggtctcaaactcctgacctcaggtgatccacttgcctcgggctcccaaactgctgggattacaggcgtgagccactgtgcctggccttggagtaacaaagtaaacaaaataaacttactatgatccaaaagtgggttatctaatttgtggatcacccagactttactgttttggcatttgcttttcttccaacgagtttgggaaagcaataagaagagaaatataaatgaatcattttggcttctacttagttgcctcttacaaacatatgtatatattacttttaaaaatatacttaatggagaaatcagttgatatttttttccagttataaatgaaagttgattttacatagaaaattaatgtgaaacaaaccagttgatgacagttaggatggatgtatatatattacttcctgaaaagaagtgtaagagttgggatagaaaagaaattgtcatcagcctttcattgtgtccatactttttgcttgggtttgatttttttcatctaatttagatcgcaaatgccttgggtagtatataaattgcataatatttgtggatataaagctttctgaaagatgctaattaatcccttttagtgcctccagaaaaacctaaaaatttgagttgcattgtgaacgaggggaagaaaatgaggtgtgagtgggatggtggaagggaaacacacttggagacaaacttcactttaaaatctgaatggtacgttattttaaatttgtttcatgttagatttattaaagttagtcatttttgctggaatttttattttaccaagtaataatattaaatgctattttaaaacatttaattttttattctgtaacatttcaaatatatgtaaaagtagaggccaggcgcggtggctcatgcctgtaatcccccaggcgcggcggcccatgcctgtaactccagcacttacggaggctgaggtgggcagataacttgaggtcaggagttcgagaccagcctggccaaccagagcaaaaccctgtctctaccaaaactacaaaaattagccaggcatggtggcgggtgcctgtaatcccagtgactcggaggttgaggcaggagaatcacttaaatccaggaggcggaggttgcagtgagcccggattgcaccactacactccagcctgggtaacagagtgagactccatctcaaaaaaaataaataaataaaaaataaaagtagaaagaatagtagaatacccatacatacccatcactcagcttcaacactggtcagctcatgaccagtcttatttcaaaggtactctttgcctatattgtcttgaagagagaatcgcgggcatcatatttcatccaaagatatttcagtatgcgtctctaaaagatgaggacattttaaaaaaaagcataacaacataccactgttacactcagatataaaatattacattttcagttagtgttgatttcccctatgtctcatgaatatgcctatatgtataattttttttacatttgtttcagtcaagattcgaataagctccatactttgtgaatttatgtcttgtctcttaaattataggttctatttgttcttttttcttacatttcagttgttaaactgttatacattgtacattgtttaacatattcccttgtctttttttttttttttttttttttttttttttttttgagatggagtcttgctctgtcacctaggctggagtacagtggcatgatctctgctcactgcaacctccgcttcccaggttcaagcaattctcctgcctcagcctcctgagtagctgggattacaggcatgtgccaccatgcccagctaatttttttctatttttaatagagagggtttcaccatgttggtcaggctggtcttgaactcctgacctcgtgatctggctgcctctgcctcccagagtgcttagatgatagacgtggccaccgcgcctggcccccttgtctttttctttccaaaaaattgcttttagatctacagatttcatcagatttgggtttgattttttttttttccccaaaaaaatattttgtaggagtgatgtgtacttctgtcaggaaagaccagataatgtttcactgtttttcttttttctgatactaagattgagcagtggtttcgggtgttgtcagccttattcctttatttactaagtttcccatttgttttttccaaacagaaaagttgaaagagttttacagtgaacactcttgcataccctagattctacaattaacattttactatctttgctttatcacctatttatctatgcatccttctctccatctctcaatctatctcttttttatgtatttcatagtgagttgcagtcattaatatacctcacccttaatcacttcagtatttcatagtgagttacagtcattaatatacctcattcttaatcacttcagtatttacatgaactagagttcagtattatgtttttaaataaaatttacatatagtgaaaacacaaatcttagtgtatcattcagtgagttttgacaagtacagacacctgtgtaactcaatcagtatcaagacatagaacatgactaacacacctaaaaagttccttcctgctccttcagtcaatcccagcaagtgccccaccccatgagcaactacctgtctgatattcttcaccatagattattttttcctgttacagaatgtctcatataaatgggattatatagtatatactcttctgtgaaaagttttataactcaacagaatgtttccgaaatttaatcatgttgttttcccactagtatttcccttacagctttgagcagtcatcagtgattataatttgtatataaattacaaaactatggtattctgtgttttgttttagctgaaatacttaaagaaaaacttgcctttatcaactgtggtttaccctgaagtacagttcagataggagaagcaagataggtttaatatttttccttaattaccagttttataattagttgattccctagtatcctccaaaggtagaataatgagggcttttctttctcattataaatttatatttaaacatatttgatatgttttaactcattatggattgtcccatctttgatcagtggcagtttactcaaattggctcattcatccttttttttttttttttttgagacagagttttgctcttttgaccaggctgtagtgaagtggcgtgatctcggctcactgcctcccgagtggctgggattataggcacccaccaccccgcccggctcattcatcgtcttgacacaacttccttagcctttgatagctctctgatataacatgcttttacagggtcatcatgtatttcctcacccagacctggaatcaaccttttcccaaaactctctggtttcatttagtgtgaaataatatttacagactacaatctgggtgctacaggaattcatcactactggtttgtcatagtttttagattttttagattttttcagtcgaaagagctaggacatgttttgtggtttgagatataatactatcttttaaaaatacaaattcatactgatattttcagtttaaaattagggctataggtttttacataattatatttacctgacgtctacatcttctttcttatgaactgaaaaacatagttgacaacaacactaacataattattcatttgctttatcctacggttaatacagcagctgcagaataataacaacagtattagcaccaacaaaatgattaccaagaatgattttaagattgtttttctctgtgaaggatgtgtaatagtcagattactgtgttttaatgttacttggaatagttcttttctatgtggttatactacatactcagtacacaagttcatatgtttcattttgcttttaatttttaggaatttttcttaataattatataaaacaatccaaaaagtcaaatctattaatagtattaaggcttgttcagaaaagtctatattctattcctgaatcctctaccttatttccttctccttagaggctaaccatttttgttttggttcaatttggggtttggtttatcctatttttaaaaacagtgttgtatatgaatatttttaattgaggcataatttatataattgtaaataaatatagtaatattacttgaaactttccatggtgatagaaatcagaaagtagttgcctaagtttgactagaaagaggctaagagattttagccctaagactaaaggctaaggggtaatagaaattcttacccctaacctcctgtcaccttctagcatattgtgcttaaagaaatttgtggtacagtaagggttctgttttaggaaaaagaaaaaacagcactgggatcacaaggaaatagataatttttggagaggagtaagtggggatggagcataaaattttaaagcacaatatttttagactacaaatttgaaaataattttatgttttaagatatagatcaaagttaattttaaagaaaggtttatttttaagaaattttgttagtgaccagcagttatattgcaaagtttgctacaacaatctaggtctcatcaaactctttgcaagtaatttttttcactctaattttttcagatgtgtttttaatgactgattcttcaattttttgtatttagggcaacacacaagtttgctgattgcaaagcaaaacgtgacacccccacctcatgcactgttgattattctactgtgtattttgtcaacattgaagtctgggtagaagcagagaatgcccttgggaaggttacatcagatcatatcaattttgatcctgtatataaaggtagttataaacctgaatttgagagtttatttgacactgtagtcgtttacaaattaaagtagtttttatatttagattttttaagattttaatgtagatttttagattttaattaatgtagtttttagattttacttttttagattttaattaatgtagattttagattttaattaatgtagaaacaagcatttatcttagtgatttttatgaagtcattttatcaataatatcaaatagaatttggaaaaagaaaaatatccataatccaaccacacttaacagctgttttcactttgaatgttttctgttctcaaacatcttacaccattgtaattacagtatgtatgttccatttttattcttttttaaaaatttgatatcataaatatttgtcttttgacatatgaacctgaagagattaacaaatgtaaattaacaaggagaactgaagattctttagaaatctttttttttccattataaggtatatagcatagcataattttcagagaaattagttcatttggtaaggataaattattgtaaaataaaggaaggacaatataaagagtatatttgagtttgtatatgaaattggaaaacataataaaccttaggatttattttatttttcagtgaagcccaatccgccacataatttatcagtgatcaactcagaggaactgtctagtatcttaaaattgacatggaccaacccaagtattaagagtgttataatactaaaatataacattcaatataggaccaaagatgcctcaacttggagccaggtaaattgaaagttaccgtttattcaaatagtccttctttcaaccctctaatcttaaaaagtttcagtcattttctaaatgtctttaagtttctggttatgtgaaatattttgcttgataacctcttctgggttgttatttcaaacaaggggaatcaggaagatatccagatagaaaatacagctttgctaaatacagtagcctttaagtaaaacatgaaaatgatatagggtgataggaaatggcttttttttttttttcttctagagacagggtctccatttgcccaggccgctggctcactgcaattttgaactcgagcttaagtgatcctcctgccttagtctcactacaggtgtgcaccaccacacctggctttttaaaattattattattttttgtggagatggagtctcgccgtgttgcccaggatggtctcaaactcctggccttaagcgattctcctaccttggcctcccaaaatgctgggattacagatgtgagctaccactaccagcctagaaatggcatttttgatgggtgttacaaagaatacaagtaataaagcaaattaagtagaggagcaaaaataaagagattataaggataaggtagctagtgtagggattggtgtgctgcagtccaccaaaatcagcctgtgacttgtttttgtaaataaagttttactggaacacagccacactcatttctttacatattgtctctattctacagtggaagagttgagtagttgcaaaaagagtctctggcccacaagcctaaaatattagtaaatattttatctacctttttatagaaagtttgccaaccactgaggtagaggaagggattgatagggagcttgtaagactgaaaatgatagtatacccaaagatgatgctaccagcaaaagaaatacttggagcttttaaaaaggctatcaccatagcattcagctatccatactcttctctgttttgattccatttatcacaaacagtatgtctttgcttttgttgctctggtcacagtgagcttgttagggaattgggctaatgactttactacttctctccttaccccacttatctaaagtgctcagaatacaatcagaaaaagcaataaaacaaaattggattaatgcttcatgttgtacagagaatatacatacctgaagttcttcaaaatgtggtattaagtatagaatcttaattcagtgctacaaaaaagactgatgtttattttgtatctaatactaaattatcagagtaatatgaccagttatttatctgtatttaatctcctctttttttctgaaagccaagtttaaaagccaggaaaacttttgtttttcttgattgggctggatatcttccttttgcctgtccacatctacgctctacccttctctttgttgtgtcatgctgacctgtatagatttcatctgtgggtttccattctttctagcttccttgtgactgtggttaatggaaggaagggactaggcaggagagaagacagaagaaaagtgaaattggcatgttgattttccctgcttccttccaggaactggctgtctttttttttttttttgagatggagtttagctcttgttgcccaggctggagtgtaatggcatgatcttggcttactgcaacttccacctccctagttcaagcgattcttctgcctcagactcccgagtagctgggattacaggtgtgtgccaccatgcccagctaatttttgtgtttttagtagagatggggtttcaccatgttggccaggttggtctcgaactccagacctcaggtgatccacctacttcagtctcccaaagtgctgggattacaagcgtgagccaccgcacccagccggctgtctttcaacttagggtcactacctgtcaagacagccctctctagctgaccggcttctttcaggttctggtacttcccctcatccctttgggcctagaggtagaaacagctctaagccccagagtactaactgcactgtctaaggattccatatactctgcatgtagtccctttatgaagccctccttgaattattctaaatggagtgtgccatctgtttcctgcagaaatcctaagttatattacaggccctgtggaagaaataaagggaaaaaaggaaagataatagatgtttccatacttctaaaaccaaataactttactgatttggactgctttttaacttacacttatttctctccagaggttgagtttaatgtattagtcttgtgtcaataaaatagtttcaagaggctgaggcaatagaatcacttgaacctgggaggcggaggttgcagtgagctgagatcgcgccattgcaccattgagctccagcctgggcgacagagggagactctgtctcaaaaataaatagtttctaggctgagcgcagtggctcacatctgtaatcctggcactttgggaggccgaggcaagtggattgcttgaggtcaggagttacagaccagcccggccaacatggtgaatcttgttgatactaaaaaagtacagaaattagctgagagtggtggcgggcacctgtaatcccagccactcaggaggctgaggcaggagaatcgcttgaacctgggagaggtagaggttgtgttgagccaagatcgcaccactgcactccaacctgggcaacagagcaaggctgtgcctcaaaaaaaaaagtttctgaattttaacacaatttagaagaccttactaattgaggttttctgttgtttggtttgctttgtttcagattcctcctgaagacacagcatccacccgatcttcattcactgtccaagaccttaaaccttttacagaatatgtgtttaggattcgctgtatgaaggaagatggtaagggatactggagtgactggagtgaagaagcaagtgggatcacctatgaagatagtaagtacataagtatatgaagaagtaaagctattggaattccagatgtgaactggttctggttttaataatatagcctcattgcttcttagtttgtgatcattttattcaaactgcagtattttaacgttttaatttttaaggacattaagatgtaaaattgaatatggatcattgatagtataagtctatttgatacctaattaaattatcatggaggccagatgcggtggctcacacctgtaatcccagtactttgggaggccgaggtgggcggatcacaaggtcaggagtttgagaccagcctggccaatatggtgaaaccccttctctattaaaaatacaaaaattagccgggcgtggtggtgggcgcctgtagtcccagctactcgggaggctgaggcaggagaatcgcttgaacccaggaggtggaggttgcagtgagccaaggtcacgccactgcacttcagcctgggtgacagaacgagactccgtctcaaaaaaaaaaaaaattcatcatggaatggtgacttagatacatctatcagaaaaccgttaactgttgataagtctagaacattttattcaaggagacttgtccagagatactcctaactagagaatcatatcctgaatcattaaaaccacactgtctagcaaactacaccttagatccccactatcaaaaatatacttgtattataccttttattcattttttttctaatagcacttgataagcccctgggaagcggttgatcctggaattttggttggttagtttttattttccttttttctcctatagataatatatatgatatagaataaaaaaggcacaaaaagagtgtacagtctaaagtaagatcctcactgcaaagcatctgatgttactaagttcaagaaataatcccgtggcatagatttttcattttgagaccttcctatcacagactcatctcttagttatcaatggcagtagctgtggctgaaaaaatcccctaccacctatatccctttacttccagctcttctagaggtttaggtcatgtgacttgagaacatcaaaggcagaaaagtacccttctgccctaagatttctctcataaatgctgagaaagaaatcaattttgctattgctgctgtgggagtcctcagccagattgctttgtcttgaccaggaattcttaaaatgagatacatggggaggagttcatgaaatagtttaaaatgtaggtaaaatattgtggttagtgcctgtgtgcatttttaatggacaagtgtacataatctttgtcaaatcaatgcgtgaatgaagtctctgggttccctttatgttaggaaatatttccagctcataatttttttttaataatttcatgttctttattctgtttgagtgctgcactgtactcatgtgaatttatctattttaacttctgtaccagcagcctttttcccagccttcctggtctgcctgtcctatcctttctgttttgctgtctgtaattgcctcttcatgattaacatatcagtacttaaatttttttttttttttttttggaaatagtgcctcactctattgcccaggctggagtgcagtggcatgaacacggctcgctgcagcctctacctccaaggctgaagcgatcctcatgcctcagcccccaacatagctgggactataggcacgtgtcaccatgcccagcaaatttttgtatttttttgtggagacaaggttttgtcatggtgcccaggctggtcttgaactactgaactgaagtgaaccacatccctcggcctcccaaagtgctgggatcgcaggcacgagccaccacacccagccttactgcttagattttattcaactcctgtcttattctactgactaccatatcttgttattatattcataaaaattttgagaaatcagttaatgccattgatttttttaagacaaactttttacaaaaagcttaacaatgataagtaaaaatgaaatgtcagttgatattacttattgctaaaaaattaaaaattatatgctacatttaatggctattataagttttgaaaaattaatactacaggtatttttaaaaccgaatttaattactggtatttaacaatttatgttttggctgggtatggtggccaaaccccagctacttgggttgctgaggtgggaggatcacctgagcctaggagctgaaggttatagtgcactatagtcatccactgcactccagcctgggcaacagagcgagacactgtctctggaaaaaaaccactatgttttatggattgctttttcagatggttagtgattatcacaacaatactgtgaatttgtttttattacatcccatcactctcaatcatccttatataaagtaataaacttattttagtacatttatcttaatttgttttattattcttgtgaatatttaggagtaagcaatgtgtttaaatagattttccagtttgattttcagcgataagtagtatcaacttatgtttatttcatttttattttttactgttaaaaactttattttaaaaagtttttttctttaaaaaatcatattaactaatttttcaaaatttttataaatataattagaagacctggtatttaatagaataagagaggagttgaataaaatctaagcagtgatgtgttgatcatgaagaggcaattacagatgacaaaacagaagtgaggacaggcagaccaggaaggctgggaaaaggctgctggtacaggagattcaagtagataaatacagtgccagcacacaaacagaataaagaacatgaagttataagaaagagtgatgcctctttagttgttgctcagaatacatttttacctttacaattttgaggttagaaaagagttccagtataattgatcaggctatcaccctgactaaaggaagagccaggtgttttgtgctgggttgggaaaatgctggtataaagaggtagagacaccatgcaattggagggcaagagtattaagaacaaagtaaaagaataatttgcagaattttattttactgttaaaacctttttattttaaggagtttatgtcttttctttaggaccatctaaagcaccaagtttctggtataaaatagatccatcccatactcaaggctacagaactgtacaactcgtgtggaaggtaaaaaatcacatttatattttatctcttataaatctttttttttttttttgaaaccgagtctcgctccattgccaggcaggagtgtagtggcgtgatcttggctcactgcaacctctgcctcccaggttcaagtgattctcctgcctcagcctcctgagtagctgggactacaggtgtgcgccaccacgccccgctaatttttgtatttttagcagagacagggtttcaccacggtggccaggatgatcttgatctcttgacctcatgttctgcctgcctcggcctcccaaagtactgggattacaggcatgagccaccgcgcccagcccttataaatacattttgtatggtattatgaatggaggtcttttaaatagataaatttttattcattttaatagcaaagcatttgattactatttttactaaatagaaaggtaatgctttatatgtattaatattatatagaagtcaggttcataaactacaaataataccttataggtatttaagtacagttctgtgaaagtataagttctataagaagaggaatgttgtttttgtactttggaattttccagagtaactcagaaaataataaaagtttgtgataatcaaaatgtatgctggtaagtgcatgagtagatcatactaaaaaagaaggtagaaaaatactcaagcataaaataaataatttagacctacatagccacagtgcagaattgatacagaaccaaaagctaacggaatgatgctacttacccttttttagttgaggtcatgcttttactcttcatttagtatgtactagttttattttagaaccaaatttaaaatggagattgtgaatcctttccagttaaatatttagagatttgacataatggcatgatttgtgaatatgaagaaaaactgattttttattcaagatttatgagattatttttaaaaataaactattttattacagacattgcctccttttgaagccaatggaaaaatcttggattatgaagtgactctcacaagatggaaatcacatttacaaaattacacagttaatgccacaaaactgacagtaaatctcacaaatgatcgctatctagcaaccctaacagtaagaaatcttgttggcaaatcagatgcagctgttttaactatccctgcctgtgactttcaaggtttgtatctgtgagatggagcctgactcttgggtggaaaaatggtggttaggtatggacagggctcccataaaaaacacaagttatctaagactgtctcctcagtatcagggataatcacttgtttattttttaattttttaaattttataaataatgattttctttttttcagagactgggtctcgccaggttgctcaggctggtctcgaactcctgagctcaagcgatctcccctggcctcccaaagtgctgggattaacaggcatatgccaccaaacccagctagtgatcgcatttttaggaatcagtcagcagacaaatttcatcaggatgcaagaacatttccatcactacatgctcacttaaacttcacagtaagctacttcattcatttaagcatattctgattacttacctggtttttaaaatattatttcaagattttgagaactttgtatacatatgactgaaacgtttatctgtagctttattcgtagctttcaaagaagaaaaattgcaattacaaaccgaaagcatttgaagaatttagggaaagcaaatttttttttttctttttgagacagtcttgctctgtcgcctaggctggagtgcaatggcacgatctcagcctctgcctcctggcttcaagcgattcttgtgcaccagcctcccaagtagctggaattaaaggcacgcaccacaatgcctggctaattttgtatttttagtagagacggggtttcaccgtgttggccaggctggtttcgaactcctgatgtcaagtgatccacctgccttggcctcgtaaaatgttggaattacaggaatgagccacagtgcccagcggggaagcaaaatctaagtttaaaaattgactactttacctgtaagttataataaagtgcttttaggcaaggaagtatatgctacaaaaattgataaatcacatgttttggaaatgactgtaaaatatggaaatttcaaatttgttaatatttattatttcaatattcaaactttgttttaaagctactcaccctgtaatggatcttaaagcattccccaaagataacatgctttgggtggaatggactactccaagggaatctgtaaagaaatatatacttgagtggtgtgtgttatcagataaagcaccctgtatcacagactggcaacaagaagatggtaccgtgcatcgcacctatttaagaggtatacctggctagaaacatctaaattgatatcctttttctaactctttaggcagctttttcttttgcttatagtgttttggtccgttgaaacgacttccaatttatcatagcctcactacttactagatgtgtgactttcagcaagtcatacttaacctctctgaattacagtctctttatgaacagagtggggttaatactttcttctttttgtaccccaatatgattttatcgtcaagggaaaactcctaaaactatagagtatagagaaatataagagtccaacctttgctgctgattagttatatgttctctgtacctcatccttcacatgagaaaatagtttcctagagcatctggatgacttgtgtaatgtcttagaaccatcagatagaggaagcagaactagaactcagatttccttatgtctttcaattggaagtagtaacaaaggacagaagtaatgaatcgtagcgctccagtctgtgtgttatggtgctgcttaagtggttataaagtgatacaacaactttgaagagaaaaaaactcagtttatagtcttttgttgataattaataattagaattcagctgtgaataatatggttaattagagaaaagccctaagcagagagattcctgccataaagtttttgagctttagtcataatacaggctgtttggacttacatgttattagtgtacagttttaataagcttggttatctagtttactgactttatcaaattaaaaacatggtggagcttaggaagtcctgaaacaggctggaaataactatagaaacttcttaaaaaaaaataaatacagggtctcactctgttgcctaggctagagtatggtggcatgatcatggctgactgcagccttcaactcccaggctgaagtgacccttctgcctcatcctctggagtatctgggactacaggcacatgctgccacactcagctaattttatttttttgtagagagggaatctcactgtgttgcaaaggctgatctccaacacctggcctcaagcgattcttttacctcaaactcccaaagtgctggtattacaggcgtgaaccactgctcagagccaatagaaactttttaaagcagcagccgatgcggtggctcacgcctgtaattccagcactttgggaggctgaggcgggcaaatcacctgaggtcgggagttcgagaccagcctgaccaatgtggataaactccgtctctactaaaacaaaatcagctaggcgtggtggcacatgcctgtaatcccagccatttgggaggctgaggctggagaatctcttgaacccgggaggcggaggttgcagtgagccaagatcatgccattgcactccagcctgaacaacaagaacgaaactccatctcaaaaaaaatagaagctagcataagttgtggagacattaagtttgggtaggtagtcgtatgttgctcagtaaccctgaaagcatcacattagagtagaatataaaaattgttcattttttggtaatattgaatcattaagaaaaggtaaaatctgtttaagaaggtaaaggagcatgtaacttcatgagtaatagttaaggaatatacattcttattgaaggtataaatttcaataaaacattttctaatatgtacagataatatactgtataaataagaaaaattttagtggtgcatgctaaaaaagataaaaataaaggaagtttgttttggtttttgtttttttgagacagagtctcactctgtcgcccaggctggagtgcagtggtgcgatctcggctcactgcaagctccgcctcctgggttcaagtgattctcctgccacagcctcccaagcatctgggactacaggtgcccaccaccatgcccagctaatttttgtattttcagtaaaggggggtttcaccatgttggccatgctggtctcaaactcctaacctcaagtgatcctcccaccttaacctcccaaagtgctgggattacagacgtgagccacagcgcctggccgaggaaattttttaagatacccttttttccaactcgcaaactaggaccgttagtgctttcccctaggtcttactgctttagtcgtcttgctccttaggctgttctctcttgtaggtaagacatacaaaaattgtcagactctataaaatccagagtaatttgagatcattgttttataaattctaaatgtaaataccatcattgttcttaacaatgtattttttatccactgcattggcaatacttttacagacagttttacctgattaagcttgaatccagtacacaaaagacaatgcttacttagaaaactgcagttttaaaagaaaattaagtggtcatgaaattataatgtaaaaataaattacggtattaacttgactttttcattatggaaaaacatgcttaatctgctattcttgctttagggaacttagcagagagcaaatgctatttgataacagttactccagtatatgctgatggaccaggaagccctgaatccataaaggcataccttaaacaagctcgtaagtccaaactcacttctttgaaaaaaaaagtttagggctttgtattaacagaaacattttatcgcttttaaataaagatgtatctcattatgttcaaatgattttatgacaaggaaattttactagattgtaaatgattttcagttagcaaatgtgttcactctgttacagcaccttccaaaggacctactgttcggacaaaaaaagtagggaaaaacgaagctgtcttagagtgggaccaacttcctgttgatgttcagaatggatttatcagaaattatactatattttatagaaccatcattggaaatgaaactggtaataaaactgtatcagttattaagaatcagttattttttccttaagcttttaagtactaatttaagtctgttcttcttatacatcttatagtatattggcctcaggagacacctgagaatttgccttatggttactttcatggatttattgaaaaagtattgtgttgtgctttagaacataaaattatgtcagaacattataaaagttgttttccaacaaaaatacttcgcttcttttttaacactttcacaatgccaaatataggccaaataagcaaaagcattgaatagttgaatgaagcacagttcttatttcttccagctgtgaatgtggattcttcccacacagaatatacattgtcctctttgactagtgacacattgtacatggtacgaatggcagcatacacagatgaaggtgggaaggatggtccagaattcacttttactaccccaaagtttggtaagaaataatgaagtttggttttttttctttctcaaacttaggttagaaatgaacttagtttatgtgctaaaattgtgttaaaaagtacatctttggattcatgatgatttttatattatctggctttggttggtggtttctttatagaaagtgttattcctcacctttttggtattttattaactgcttctgactatattcagctgtactaaaaatcctaaaagaatttgtgtatctttccatgtgggttcatttttttcactggtttgggtgtgttctttccttctctatcctcatttctttcttttattgagagattacttgaaggactagtccactttacagtcttcacttccgtacctcccactcagtatttaacatactgaaattaggggtcctaccccacccctgcactgaaacctctctggtgtcactcagaagacctcttgatcatcatatgtactgcatgctttttagttttcatcttttttctactttttttttttggaggcagggtcttactctgttgcccaggctacagtggagtgcaatggcatgaacatggcacactgcagccttgacctcctgggctcaagtgatcctcctacctcagtttctcaagtagctgggaccagtgccaccacatccagctaattttttttatagagatggctggtctcaaactcctgggctcaagtgatccttctgccttggcctcctaaagtgctgggattatagacataagccactgcctccagccttttctgcatttgactctgttggccttccatccttgaaactccctcctcccttgggttttctaaccatactttttctgctagcacagtctcctgagtctccttgttctttggtgttttcttcttcttctcctttttttgctttttttttttttttttttttttttgagacagagtctcgctctgtcacccaggctggagtgcagtggtgcgatctcagctcactgcaacctccacctcccaggttcaagtgattctcctacctcagcctcccacgtagctggggtagaggtgcccactaccatgcctggctaattttttgtatttttgtagagacggggtttcaccatgttggctgggatggtctcgacctcctgacctcaggtgatccacctgcctcggcctcccaaagtgctgggattacaggcatgagccaccgcacccggcctcttgaccctgttttcttacttgcctattcaaactctgtccatggctttagccatcttctctttccttcccaaatacattttccctccctcgttctatgccaaagccataaatttaaatgtgattacaataaatgtatttgtatatttttctctcacataagctgagtgtcaagtcctgttgattgtgcgtaccctttcatcatcattttcttcaactgcaagctcctcatgctaacttctcttttcttagtgcattgcccccagtgaggtcttcacctcatcatctggctcttctgtatcttccctaaagcaaacttaaccaacattctttcttgctccccctacattttgaatcattatagaaaattaccttattttaccataattgtaacccccacccccaagtgccagcctagttaatgataagtagtaaattccatgtgccttgttggttgaatgcttgctgaatgagggaataaatgaatgagtgactacataaaataaatgataaaagttcctgagctttgctgttagggtcagtaatgaatatagtttctgggataaggttggtcccatgtggtggtatgttaataggtatgttatttaaaataaaactttataccataatcttgagaaaaattaaaaaataaacttaaaaatgtatattttatgtatttctgtggagaccagccatctctacagagctttgtatatatgtatgtgtgtgtgtacacacacacataaaagcccatatgtatattttttgtttgtttgtttttgagacagagtcttgctctgtctcccaggctggagtgcagtggtgcagtcatagctcactgcaacctcaaattcctgggctcaagcaatcctcctgcctcagcctcccaagtaactaagactgctggtaggcaccaccatgcctggctagttaaaacaatttttttggtagagatgggatctcgctgtgttgcccaggctggttttgaactcctggcctcagtcctcctgccttagcctcccagagtgccggattacaggtatgagccaccatgctcagcctaaaatttttttattacataggtgttcattatagggaatttagactgtacagtaaaatgtagagaggaagaaaaattagtcctagtcccttaccccaaaataacatatttgtgtatccttttagtgtcttctttgtatatatttttttcctaaaattaaattatacttagtattattttataacctaccttttttcaattctctatctgtagtctcatggatccattatggcttcttcacatggcttgagtcttgccaacgaggaccttacagcttagttgaagaaattttgcataagtaaatcagaaaaaggagaacctgtggactatgtagacagtaaatagagtaggaatttaaatataccagtagtggataattttaccttcaaaggttttatgaagaagaaaatacttgagccttgagttagtatgtggacaaataggaagaaggtggcatcttagagagcagcatgagcaaaggcacaggcttgaaaacataaaagcagatgtttaataaagcaaagtttctgcctaaattagatttggcattttatatatatatacacacatacatacccatatcaatatatatatacacacatatatcaatatatacacacataaatatatatacatacacccatatatatatatatatgatgcttagcatttaagagttaatatttgccaacccatagtttattctcaagcatttaactgatttcttgatttctactgagcttcataggatgttagttacttacaaagggatatgtgtggtggaaggataaaattaagtgaatagtatatggctgcaatattactttcatacattttttactgtaaaagactaagtaaaattcaaaattaatcaggacagtcatttaaaaaatctccaatgttaattatcccaattagtgattaatttgatgaacaagtcctcttttaaatgcagatgaggatttgtgtggtatttagggatcttaggcttgtttactttttagtttattcctactcgtgccactcctcatgcccattgagcagctcctaaagttcttagccctgtaccagctatatcctccttttgaaaaatggtaaataactcttaaaacttctgagagttgcatttttattttttagaaggttaaatgtgtagttcaattatgtttttatagcttttccattttacccagtatttatatttgttctgacataatttctctgttatacagtattagaactcagagataaacttttactaagattctaccaaatgcagatcataaatgttacaaatggttatgtttgaaagctctaacccagtagattacccgatacactgatcatttttatcccccaaccaacatatattttatgctatgcggccaggttaatgtataagacataaatggttgggatgtgatttaccaaagagagaagagggtaaaaatcatcaagtctgaagagaccttgaaaaataattaggattgtattttatcttttcaacagtaagtctggttgggaagttgtattatgtcttcttagttcatatgtcaacattatttcccatcacacctctttttttttttttttttttttttttaagctcaaggagaaattgaagccatagtcgtgcctgtttgcttagcattcctattgacaactcttctgggagtgctgttctgctttaataagcgagacctgtaagtaactttattcatatttttgcattttcccccagctttattgagctgaatttacatgcaataaaatttatccattttaagtgtacagtttgatgaatttttgtaattacatacagatgtataactaccaccataatcacaatatagaacattttcatcacttttataaagcttccttgttctcctttgtaatctgtcttcttctcagcccaaccccaggcagtcattgatctgcttttctgtaactgtagttttgccttttctagaatttttatttatctatctattttgagacagagtttcactcttgttgcccaggatggagtgcagtggtgcgatctcagttcactacaacctctgcctccctggttcagactcctgcctcagccttcaaagtagctaggattacaggcgcccaccaccacacccagctaattttttgtatttttagtagagatggggtatcaccatgttggccaggctggtctcgaactcctgacctcaggggatccaccctcagcctcccaaagtgctgggattacaggtgtgagccacggccaagaattttatataaatagaatcacatagcgtgtagtcttttgcgtatgtcttttacataatatttttgagattcatccatgatgttgcatatacttctccctttttttttttttgagatggagtctcactctgttcccttactggagtacagtggcatgatcttggctcactgcaacctctacctcctgagttcaggtgattctcctgcctcagcctcttgagtaactgggattacaggcacttgccaccatgcccagctaatttttgtatttacagttgagacggagtttcatcatgttggccaggctggtctcgaactccggacctcaagtgatccacccaccttggcttcccaaaagtgctgggattacaggcatgagtcaccacacctggcctacctttttcctttttattgctgaacagtattctgtagtatggatatatcaaaacttagactgatctgttatggaagtttaggttgtttctaatttttagctattataaataatgttgctatgaatattcacatacaaaactgtgcgagcatatgttttcctttatcttgaacaaataataggagtgagagtgctgggtcatatggtaagtatatgttcaactttataagaaactgccaaactttttcagagtggctacaccatcttggattgcctccagcagtgttccatattatcaccaacacttagtgctgtcagacttctttcattctagtgggtgtgtagtactatatcgttttaattttcatttctccgatgactagtaatggatcttttcatgtgtcacttacatattttcttttgtgatgtgtctattgaaatcttttacccattttcaaattgggttattttgtttataattgagctataagagtgctttatatgttctggttacaacattgttaaatacgttttgcaaacttttgtcccagtctgtgctttgtttttttgtcttaactgtggctttagaaaagcagaagttttacgcctgtaatcccaccactttgggaggtcaaggcgggcggctcacaaggtcaggagattgaggccatcctggctaacacagtggctaacatctctactaaaaatacaaaaacttagccgggcatggtggcacacgtcagtaatcccagctactcgggaggctgaggcaggagaattgcttgaacccaggaggcatgggttgcagtgagccaagatcacatcactgcactccaacctgggtgacagagtgtctgaaaaaaaaaaaaaaaaaaaaaaaaaaaagcataagttttttattttgatgaagttcattttatcagttttttttctgtggttcctgagttttgtgtcctgccaaacacagtatcaaaatattttctcatgttttcttccataagttcaatagtttcagctcttagtctatgatccatttcaggttatttttgtgcatggtgtgaggtcagggtcaaggttcattttgttccttcagatgtctaattccattgtcatttattttgaaaagagtgtcttttccccattgaattgctttggtacctttgccaaaagcaattgtctttataagtctgtatctatttccatactctcacttctgtttcataaatgtatatatgtccgttcttatgccaataccacattgccttgatgagtatagctctatagtaaattttgaaaataggtagaattcttccagtgtgttctttttttaaagaagttattttggctaggttctttgccttttcatatacattttaattcagcttgtcaacttttttaaaactatagttttgattgggattttattgaatctataggtcagatttaattgaatctataggagagaactgcagtctttttttttttttttttttgatttaattcctcagctaaaacagcggaagaggtgatttattatatggttgttacactcggccacaaataaacacagaaatagtccagaatgtcacaggtccagggcagaggaccaacatgggcattttgtttttgagcaaggtgggtctcagaggtgatcggcgatcagagggcgatgaagttctagatccattgagacaagctctagacagtagcatgcagtcccacaacttgtaccagcatccccagcgtctggcattccatgtttctgctcctgtggcctccacggtgcaacaagctagcggtttacttggacctctgcctcatctttcttcttttgcgcttcagcctgcgcattcgcttcttcctccacttggctctcatggcgccgaggtttccaaaaaaatggcgctaaggccgagagagaactgcagtcttaacgctactgagtctttcaatccgtgaacctggtttatttctttatttatttgggttttgtttaatttacttttgcagtgttttgtagttttcagtagacaggccttgcataactttttttgaattcatgacaaaagtattttttgttattataaatgaaatgtttaaaaatattttctaattcttagtatatagaaatgcaattgattttttaaaatatattcatcatgtatactgagactttgataaattcatttattagtagctttttggatccttaggattttctagatacacaatcatgcttcttgggagtaattatagttgttctaatctttatgcttttagttctttttattgtcttaatgcactggctaagacctctagtacatatagtacatctagaccatataagagcattgctttgttcctaattttagaggtgaaagtatttagtctttcaccatcacatgtgatgttagctgtaggttgaagtttttgctttgtggggtttttttgttttgagactgagttctactcttgttgcccaggctggagtgcagtggcacaatcttggctcactgcaacccccaccttctgggttcaagcaattctcctgcctcagccacccgagtagctgggattacaggcatgcaccaccatgcctggctaatttttttgtatttttagtttagtagagatgggggtttcaccatgttggccaggctggtcttgaactcctgacctcaggtaatccacccacctcagcctcccaaagtgttgggattacaggtgtgagccaccgcgcccagccgctttgtgtttttttttcccctttactactacttgcaggggggaagttcttatttctgttttgccttgctagcaatttttatcatgaatgggtgtcacaatttggtcaaatgctttttctgaatctattgagatgatcatatggtttttctccttccttccatgaatatggtgcattttattgatttttcatataacatctttgcattccttggattttgctgcattcagtttaatactgtttgcatctgtgttcatgagtgaagttagtctgtctttatgtgccttatctgtctggttttaaaatcaggataatactggcctcataaaatgaatgggaacatgttacctcctctgttttctgaaagagtttgtatagtattaatacaattgtttccttttgcccagagttttgtgggaaggtttttaattaaaaattcaatttctttataaatatagctttctttttcttcaatctgttttggtaatttgtgtctttcaaggattcattcattggtttgtctaggttgtcagctttactactttttatattacttccaaatgttataggtatttcctacaggagagtcagtctggtaggctctcactctttgaagcaccattctcagtcacttttttaaatttgatttttatatttgaacttttttggtatcagtgggaacattaatttgttatctggattcttttaattggaataccacaacatgtggcctgggtaaagattttaagtggttttaattgcagaattttgagagtttaaaaaaaaatttgaacactgattagatttagctttgttaattcattatgaatacattataatccttatgcattttcaacagtatttttctattggttataagaaaaataatttttgtttggggtagagtaggtattttttgttcatttaggtaattggtttggtttgtaagagtctttgatgaacatgtttagaaatagggactatttattgtttattatgtgtggttttacataggccatttttcttttctcttcagaattaaaaaacacatctggcctaatgttccagatccttcaaagagtcatattgcccagtggtcacctcacactcctccaagggtaagagaaaatgcttctgagttgtttataatatacagacatgttagtaggtatattgagtatctacagttagtaggtatattgagtatctacaaatgtaccaaaagataagatattcaagctgaatcaaaaagtaaatgaagataaaacagtacataactgaaaattttaatcaaaatttaatatgtatgacatattttaggggttttatcaccatcatagtatatttgttctgatattttaaattgtttagtacacattacagatgtttggttgaacttgcaaactgaaaacttgaggtgctgaaactgctatgtgatggtaactacctcaagcattttgggttgagtattaaaaccaagttcaacagtttatcattttagcactgatgaaatgatctctgggaacctactctaaactctgaattttaaatatgccccaaaggggaactcatttatatttattatcctccggtagtccttaaattttatattaacagattaaaatgtattatgtatttttatattctacaaaatctctgtcattcaggtttgattttccttaatgttttctagttttctgtccagttaatcctaggctgcctagtctaggcatgaaatattaaatactacttgtagaccattagcttatcaaaatgtaacaccaacaatattgatttagactacttagactcattttatagtatctgcattttgggtagttgacagtgacttagtgacataatacaggttatttctgtaccactgagagttactgggaagtttcagagatgcattagctctgtggctttaactaatacttgccatatacaattttttctcttccttagcacaattttaattcaaaagatcaaatgtattcagatggcaatttcactgatgtaagtgttgtggaaatagaagcaaatgacaaaaagccttttccagaagatctgaaatcattggacctgttcaaaaaggaaaaaattaatactgaaggacacagcagtggtattggggggtcttcatgcatgtcatcttctaggccaagcatttctagcagtgatgaaaatgaatcttcacaaaacacttcgagcactgtccagtattctaccgtggtacacagtggctacagacaccaagttccgtcagtccaagtcttctcaagatccgagtctacccagcccttgttagattcagaggagcggccagaagatctacaattagtagatcatgtagatggcggtgatggtattttgcccaggcaacagtacttcaaacagaactgcagtcagcatgaatccagtccagatatttcacattttgaaaggtcaaagcaagtttcatcagtcaatgaggaagattttgttagacttaaacagcagatttcagatcatatttcacaatcctgtggatctgggcaaatgaaaatgtttcaggaagtttctgcagcagatgcttttggtccaggtactgagggacaagtagaaagatttgaaacagttggcatggaggctgcgactgatgaaggcatgcctaaaagttacttaccacagactgtacggcaaggcggctacatgcctcagtgaaggactagtagttcctgctacaacttcagcagtacctataaagtaaagctaaaatgattttatctgtgaattcagattttaaaaagtcttcactctctgaagatgatcatttgcccttaaggacaaaaatgaactgaagtttcacatgagctatttccattccagaatatctgggattctactttaagcactacataaactgactttatcctcagactagctgaatgattttgtgctgtttcaggatgtttgcactgaagaaaaacagaaagcttatctgaaatttataaaactttttgttttgctacatagaaaacagaaggtatttgaataataagcagtgatatgcttagtgagcacagctatactgattttgattagaatagtcatcagagtggcttagggacagttaatataaaagaggagcaaggtgtagaccatcatctacttctgctaaaataacttaaaaagaggtccataggccataactacatgagcccagcttttgtaatctgacaaaaaaatgaggagcagcttcgtgtatatcagtgtacacggtattccttaggtcccttccattggtagtgatgctgcgagttattactggagaaaaggaattctagagctttaacttggcagattaaaagtactcattttttattcatcaataattagtaatctcactagttttcaaaaatttgcatattattgacaacctctttgaagatgcatttcacaaactcaacagagtgccatgataagagctagggatcccccaaactatctcaagcatctaaaaaattgccatttttaaaggcttaaattgtagtagtaaaggggaaaacaggaagtagtagtaaaggggaaaaaaaaccaataaagcatctaaaaaattggcatgttaaaaggcttaaattgctaatgtgtgtatatatatatatatatatacacacacatatcattgacttttcttaagacttcagagtactgggtagatgaacactttatacagtatatatcttcagcttaaatttgttttgagtattttttttatttttaaataagtaggcaaagatttaaatttttttatttttagtaaatgtttgaggcacactaagacaacttgggcaatatttgccaaaacaaaacagaaccccaaaaaatgtacatcttgttcttagcaaatatcattattgtagagacacttaataaagagatggtattttaatgtctgcagttctgaggtagggtggaacttagttctacattgtgatttaggaatttttaaaaccttttttcttcaagggagaagtgacccaggcctcgagtttagtgctaaagccgctagtgtacttatgctgtcccctaaccaccacgtgcgatatggaagcagatgctaaatataggggttttcttagaaagtaagaggaaattagcaagcgttattagtgattgactactgctatcaagtgaattcaaaggaaacaggtttttatgccatatttaagttacagaaaccaggcatgcttagaatagtttctagaggttattggagaatagaaagctaagaaaacttggtatacatttacaatggaaatataattacactttttactctcagaatattgttcacattagacttcctgtttatcttttatattcttgcatttatataatgcctcatcctttcaaagttctttcacatattatatgatcttctttatgaaaaaaatagatgtttcattctgatatattcagtttcccactttaggcaaaagtagattaatagaatgacgaattcaaagtagatgaggaaaatcaggcacagagaagtaaaggtagggatagacccaaatttacacaacaagataatgacatctccagcttttaagttgatcatcaaaggctgggctggatttgtcttgctgtatgtgtcaggaaatttatacctattacattttccattttctcaaaatttaagtcacatgactaatatttagctgcaactttcctcataacaaatagtgtcatgaagaatgttgtagtgtgaagtttgtacatttcagggtcagatatacaatatgaactcttaatctacaggaatgagaatggaggatcattgaaggccatgatataaacaaatttgcatgttgaagcctgtataaaacatggtacagtgagtgaatatacccccatccccaagaacactttatacatattaaatggatatatgattactgtgcaaaaattcattctggaaatgaacatatatttgagcactaatatgtaatgtacacctgccctaaggagaaaataaattataaaactttttacattcaaaattactttcccaagcatgtcttagaataatctatgtgttgatgcatgtaaattgtactttaggtaggcaaagaaatctggttatttatgtaaaaactagtctaataaagttagttagtggctttatcactttaaatctttagtgtccaaaagtggtgtttaaagtaatagcacatcagaaaaccttgtctggacaaaactagttcactcactgcttctgcacctgcagttgctccctttagggttataaaataatgacccaaatgttacatgtgttgatattataacttgtcagttactgatgtctgtggtatcctaccctcatctctgaaagggataatactgaataattattagaaaactataaaacttcacactttgtaccattaaaacctaaaattttaatcttgtccttttttactatggatcagtcggcactcgggaacagcagcaaggaaaaaaagcaaatttcattcacatgttctgtgttcatacctcttctctacctaattgttcatttaaatttcagccttattccttgataagggattttaccacatgaagtcatccagtgaccctagctcttattgtgaagttagtggagtatacttagaaatgttacaactttaaaatgttacaaaacattcattaaagctcatatttaaagtagagcatctagtttgagaaatagaaatcaattattaaagatgtcttttttctacccatttaactagttaaaaccatgacatgtaaatgtagaagtagaataatcatagaattccctaaaatatttctgtttactaacatatattgaccaagtacatcaagcaggagagatcttccttcattctgttatagtccacatcattctaattttgctcagttgttattaagagcatattcctaaaccatacacttttgtttcaataaagttttattttgttgagatgaataaaataacaaagttataagctgcataagacaaaagttcaattgttcaaaaaaaatttactgggatagctttctattacaggtattgttagattatattgtgctgataagattactttctaaaaaatttgtacttttctgtaaattaaaagaatatggagtcataaaatggcaagtgttttaggattagcctaaaattggacattgtcattgatttcaaagaaggtatgaactagcagtcttacagcctaattcttctttggactggtccttggcagcagttccttttcagactcgataaacagaattcagatgatgtaagtcaaaacaaaactttacaaagccaagcgtattatcttttgcattaacctatttttttccatcatacatgctactagtatgtgcattagcatgatattctcatatacattgcattaaaaattaaaaggtggcagctcagggtgagctcttctgttgctcatttgttcctaaatttttaagggctttttctcagtcaatagtttgtacaaactggttagtttaacttcattacccatttcattaaagttgatgggtcgtgtgatgagatgcatttaaggccgatagtgatagatgttttttttatttcttgaacacaggctttgtctgaatgatgttcttttatctcttgaacacaagctttgaatgataactacaggttttaagtgctgttacattaataccataatgtgatgtgttagaaacaaagggatatttcaaaggtagatatttgaaaattctctagtctcaatatgtatgtgtattgaatatactctaaaaataaatgtgcaatttgctagtaggacaatgcagtgactgactagcattaggtatgtttcttttatatcctagctatgtcccactttcttctaagtgcaatcctttcatgttcacttgctgttttaccccatctactctaacttcatttggaaggcttgtctagagtatagcatgtatttttacctttgcagtgaattgcatgtgctaattgtaaccacagctatttttatgttgacataactccaaatgttatattaaatgttctattatatattagctctaatcccttaagtaaattttaagaaataaatacttgttcaaattttttttctgtatgtggttactatcatctgactatgcatatttgtaacagcatttatcattagtggtgttagctaaataagcatcttagtgtaaatgagatgcttcgtgtgggttttgtgacattttaaatgacataatggaatgtgatttaaaagaaaaccagtacactatcttggtcttaataacatagaatggagatggcaaatttatccactagttttccagatttactatttaatagctgaggtctgaaatcgtagcatcctccctcctagtggacattaaaaaaaaaaaaaaaaaaaaaaacctacttggttgtcaagagcccaagtatggaggtgctgcgccatcttgtggcctgtctgtgcccaccctgcactctgctggagtctccatccttgttgcagtgagacttgaagttcaagattgatacatggcatcctcctgctacttcttgaggttactaagtagtatatgaaactaatcagtcagcaagtccacctggaaggaaaagaaaatctcaactattaatgtgccttcacattgtgattttgtctaaaaaaatgtagtgagtcaaaaaacccacaagccagccaacagtaactccttcacatatataccagagtttatagaaataacatgtcagctttgggctatgtgctcctttgtttaaaatcttctatttggttatggcttgtataggctcaagcctgatttctttaaggtgtggtggctcatcttatcctaatgtgtatgatagatacagtccatcctgctttggaaaagattatgtaactccttgagagcatactctttctctagcccaaaggcagtgagagagttttcttgttcaggattgcttaactttccatttaagctttttctttttaaattaatacaaacttctacactttcaaaatacgaaatatattacaactgcgtataggctcttccatacttaagtccagtgcttgggcaagttaatggagtgaaagactacaagcaaagaggaactgaggtagaaaaagaagaatgtgtgaaagcagcaggaagctcagccaactcgaaagcagggtgaacagcttgagtcctgttgctgctgatcggggttggctcttggacaacttagtaagatcatggaaaggctgcttgggttctccatagaaaagttctgtctccatcaagggaggaaaatgtacctttcaactcaaaattcaatatttgtttttaaatatagctattttccccaaccgctaaagattttcaacagatacgaagccagagcttagttttagaaacctgtggacattcaaacctgattctttattccctgtgactatggttatgtcattttacatgtcaaaaaagtgtatctagaattgtcatttcttatttttgagctttttttagtgagaattatcccctcacttaaatggctttttatttaaacatctgtgcattctgtatgaaattgtagtctttctgggataacatggtgagctatatggtggtaatccacacacacaaaaataaaagccaaaaaaaaaccaaaa

SEQ ID NO: 20 - DNA, 5183 bp, Homo sapiens
cgggagcaagagagaaggaggcccagacagtgagggcaggagggagagaagagacgcagaaggagagcgagcgagagagaaagggttctggattggaggggagagcaagggagggaggaaggcggtgagagaggcgggggcctcgggagggtgaaaggagggaggagaagggcggggcacggaggcccgagcgagggacaagactccgactccagctctgacttttttcgcggctctcggtaagtttccagtccgttattcagggctgggacttcttaatttacttgggaatgtagcagtttgggaaggacacccccaggctgggagagacgtccctgactcttggaaatccttttaatttaataagtgatctcttagcacttgaggtggggatatgggaaggggtggggcccggcaaagttttggggtcccagcagagccctccactggaaaacttcctgcagtttttccctcagcggtgtccactgtcctctggggtccctgagatcagggcattgcatgagaacaccccaaatctgggagacctctaggtcccctgttcctgggcaccaaagagtcctgggaggctaactccttcttgggcctctcttccccccagcgcgaatcctatccatttcctccagaagatgtccaacagtcaccagtctggcagcagggtggggtgaggacctcgtggacatagccaggggctggggtttccctggtgcttagagatgggggggggtggggatgagtcaccagatgactcaccaggtccccctcctcccctcaacccaggagaggagtggtgtgagtcaagaatgcctgttgctgggggcagctcctcaatcctgatgtcggggtgcagggtggggtctcaacttgaattttcactatctggcctgtatgtaacccagagtcagggttctggggagagaggagccacattgctagtcctcctcattcaaggaacccaagagtccatctttggccctctccacccctccagccaatggggatctcaggaatccaggccccagcggtctcctccctgagagacccaggagtctgcacccatgcccttcctccatcaggagacatctcacctgcctttatgccaaatttttttttttttttgagacggagtctttctctgtcacccaggctggagtgcaatggcatgatcttggctcattgcaacctttgcctcctggattccagtgattctcctgcctcagcctcccgagtagctgggattacaggtgtgcaccaccacacccagctaattttgtatttttagtagagatggggtttcaccatgttggccaggctggtctcgatctcctgacctcaggtgatcctcccgcctcggcctcccaaagtgctggggttataggcgtgagtgtgcctggcctgtgccaacctcttgagactccgtcccctgctccccctccccaggcttccactgcagccatgtcactcctcttgctggtggtctcagcccttcacatcctcattcttatactgcttttcgtggccactttggacaaggtaagcctacttggagctcagggcccttctgttcccctttggaatcttgccacgcccctcctctaaaggcattctggccccaccccctttacctagtatttcttttttattttatttcatttattttgagacaagggtctcactctgtcccccaggctggagtgcagtggtgcgatctcggctcactgcaacctcggcctcccgggttcaagcgattctcctgtctcagccccccaagtagctgggattagaggcacctgccaccaagcccggctaatttttttattttggtagagacggggtttcaccatgttgcccaggctggtctcgaacccctggcctcaagtgatccacctgcctcggcctcccacagtgctgggattacaggcatgaaccaccaggttaacccttttagctctacctccgatgcctcctccctgtcctgaccctaccccctctcatattaaatcctaactctccccagttctgccccatcccagataccctgcccttttcccagcccttcccacagtctgcctgaccctatcccctctcctttcctaaccctgccccttgtttcgttctctgtccatcccagtcctggtggactctccctgggaaagagtccctgaatctctggtacgactgcacgtggaacaacgacaccaaaacatgggcctgcagtaatgtcagcgagaatggtgaggggtgagggcggcgggactggtcttcaaaggggaaggtaaacccttcgtgtcctcatgggactgagaattgggaaccctcccccaacaaagttggagtgggcggggtccaggcctgagtggctgagtgcctagggctaatgcatgtcccgcctgtctggatgtacctacctcttgttttttttgtttttgttttttgagaccgagttttcctctggttgcccaggctggagtgcagtggcgcaatcttggctcactgcaacctctccctccggggtccgagcaattctcctgcctcagcctcccgagtagctgggactgcaggtgtgtgccaccacgcctggctaattttgcatttttagtagagacaggtttcaccatgttggccaggctggtcttgaacttctgacttcagctaatccacctgcttcagcctcccaaagtgctgagattacaggcgtgagccaccacatccagccagtacctcctgttctgaagaggccatatagataaaagcatgctataggtttaaagaatagagaggggaggccaaggcgggtagatcacgaggccaggagttcgagaccagcctggccaagatgatgaaaccccgtctctactaaaaatacaaaaaaattagccgggcatggtggcgtgcgcctgtagtcccagctacttgggaggctgaggcagaagaatcgcttgaacccaggaggtggaggttgcagtgagctgagattgcactactgcactccagcctgggcaacagagcaagattctgtctcaaaaaaaaaaaaaaaaaaaaagaatagagaaaaatctcccaagattctgagaagacaagagtatttttccaaagctctaaggagatggggctggtgctctgaatggatgcctgggaccatttcatccaaattccaaggggatggggctgaaaccacttaaggttctaaaggggtggggccaggtgcattggagttctaaaggaatagagctgcatctatctaaagttctgtgtgaaagatttaatgcaaaactaagattaaaggaagtggtctgctctcaccacttctattcaaccttttactggagtagccaatgcaagaaggcaagaaaaagaaataaagggcatgggaaataaattaggaaaaagtgtctctattcccagtaaacatgttgtttatgtagaaaatccattaaaattctgcaaagcagacagacacagtggctcacacctgtaatcccagcaccttgggaggctgaggaggaaggatcacttaagcccaggagttcaagaccagcctggacaacatagggaaaccctgtctctacaaaaatttaaaaattacccaggttgtggtggcttgtgcctgtggtcccagctactcaggaggcaggggtgagagaatttcttgagccctgaaggacgaggctgcagtgagccatgattataccactgcactccagcttgggcaacagagcaagacctggtttcagaaaaaaaagaaaaaggaaattggcaaagcaactactagaactgagaagggaatatagcaaggtaacagggctcaaggtcaaaataagtgatacatctaagtatctaggcttgtatgggcctaaacgggagcagggatggggcagagaagggtcacatggtgagcaagcaggtgaagctggaactctggacccacggtgatgtccccctctgtgtcctccttactgcaggctggctgaaggcggtgcaggtcctcatggtgctctccctcattctctgctgtctctccttcatcctgttcatgttccagctctacaccatgcgacgaggaggtctcttctatgccaccggcctctgccagctttgcaccagtgagcactgcccctccccaaccctaatcccccaagaattgagcagaagggagtggggtgtgtcaagatgctgggggccctgagaatgggcctctcgtagaaaaaaacaactttcaacaccccacgagccacaagaggtgcctccgtgggctacatctctgcccccagggattgctgggacttgtagttttcagtggctaatgatagttatggcttgtgcgtatgagtcatcagggaactcagagtttcagggagccggggctggggaaggaggtataggtaaatagttttggtcccagggatcggccgtgacgtggggggataaactaattagtacctcagtagagagctctaaatcataataataatggtatttatatcagccaaccgctgtttcttgcgtgcctattgtgcatcagatacttcaagaagttttgcgtactttttaattttttgacttaaggtgcaaagggctaacttaatcacagtcagtttggggaacattataggttcttgcaaagcttctctcttggtttatgaatttactactgcatgtttggcttatagaaacacactcaaaaatattccttggatggatagagagatattattggacctagagagattaaatcagttacctaaggccgcgctacagttgcacggcgctgggcgggggggaaagaaccacaactcccagcaggcagcggcgctgcccacgggccctccggcgcttctttgcccccatgggatattgggaaatgtagtcttgagggggcactgcatgacgtgtggttttcatcttccgcaggcgtggcggtgtttactggcgccttgatctatgccattcacgccgaggagatcctggagaagcacccgcgagggggcagcttcggatactgcttcgccctggcctgggtggccttccccctcgccctggtcagcggcatcatctacatccacctacggaagcgggagtgagcgccccgcctcgctcggctgcccccgccccttcccggcccccctcgccgcgcgtcctccaaaaaataaaaccttaaccgcggg

SEQ ID NO: 21 - DNA, 19663 bp, Homo sapiens
gattatcacagattctggagaagagtgaggacttgggttcaccagtgcgttcccaaggacaggctgggcttctgaggaagttgcccaccctctcggaatctggtttggcctccgtaaaatgggcagatcccgctcggatggcccggttcccggcttccttttgcgggtcaacggcagcgtcacgcgcgcgagcgcggtctgcaaagcccccagcgctgggcgtcacgcggggattgctgtcgccgctgccagccgcagcagcgacgcgaactcggggcgcccggcccgggcgcgcgggggcggggacgcgcacgcggcgagggcggcgggtgcgacgggggcggggacgggggcggggacgggggcgaagggggcggggacgggggcgccccggcctaagcgggactaggagggcgcgccacccgcttccgctgcccgccggggaatcccccgggctggcgcgcagggaagttcccgaacgcgcgggcataaaagggcagccggcgcccgcgcgccacagctctgcagctcgtggcagcggcgcagcgctccagccatgtcgcgcggcctccagcttctgctcctgagctgcggtagggctcgcgagcgcctgtctcgcctgtcgccccccgcccctccacgacaccccctcccgtcggtcgcttgctcacgacgcgctctctctttcttgtagcctacagcctggctcccgcgacgccggaggtgaaggtggcttgctccgaagatgtggacttgccctgcaccgccccctgggatccgcaggttccctacacggtctcctgggtcaaggtaggtgctgcgatacccacgggctggggtttggtgggctcatttgaagacagcaggaaccatctcccctaggctggcgaccctctgtggctgccaggtgggggcgaggggcgtctcccgcagctgaacttggagtacccagcctcccgtcgcgcctcccccaccccatccgcatccaggtacagggccgaattaggttttgctctccgcagacctcaatccccttcctgtcactgaaggtggcctgagatgaatgatccacttaagatgttttggaagggcagagactctcatttggattaattctggaggccacctgtggttgtgggccagcaggtcaggaagaaagcaacagggacctagatttgggcattggacagggggaatgtctccagacttctgatttcttgtgttttgtgactgtgatgcccatgatacatgggagggggagggggcaatttgaaaggaaaggctaagacacagaagtgacttaggccatttcatccatggtagttatcagtggtcatctcctttgtgggatacccttggcttcctcccctagccctcctcctccttcctctggcagccttgagagcatcaggtggatgcatgagccggagcccgcatgtgtaagaacaggccttgctgctcctactgtaagtggactgagtgacaaggaggctttttcaaggtttcctcttgactgaaacattctcagattctaagatggcaatgatggtgtcattccaaagccaagcagctactgtttgatatcactggtccttctttaagtcaggccactgctaccacagcacctccattttaacccaaatgaatatgatattacaaccttactctgtagctctcactgatttgctgtcttaccacgggggcaaatctctgcacttgtagctttccccaaaatgcagggcgttcttctgcccaccataaaagatactataagaaactgtacgtctttggccacttaacagtacaaggcatcattgcggtgatctctttgtgtgtgtgtctcctaactggatggtcagttccctggggggcagtggctgtatccatacttctgtgtattcttcacggcacctaatttttgccctataaattgcaaaggtgctctgtgaattcagcccagcacttcatgagttatgcatgacggggatggtgctgctgcctcagagcattgtattgtgtataaaagtaaggtgttaaatattcctacttcattggtaccttacttactgtgggatcagagaacacaacaattccgaaattgttctcatagtcaaaacaatagtatttttaaaaatattgtaaaaacaatttttgaatgctcaccacgtgccaagctccaaggtaaatatttacatacattatccatttccatccatcggaagaatggacttagggattagtactgttactattcctactttacaggtgaggaaactgagccttagggagggaaataacttgtccacttttgcacagctagctaaatggtggagttgggatttgaacgaagcagtctgattccaaatcctgagttgttagaggtctatcttgatctctgttttctcccttaataacttaagataaagaaaatcaaagtgcccctgggctaaccaggcagggacttagttatctcaaagaacggggaaaaacatgaaaccactatcccttccagagagtaactatttaataaagaaaacattattaatacccccaggggagtaattaaaaagtactcatgaaacaagtagatgaaatttcaggctgtgaagttcaaacagttctggagtgaaagcttcttgcacagggtcatttggaatggtccactaaaccatagcaattaaccttggacttctccttggatgtcagctggtgacgtaactcggtaacgcatgagcttgtttattggacagaattcttgcgagatttacccccaaggtctttgaaagctctgtcaagaaaaaaagggacagcagtctctaggcgttctttttttcctgttgatccatggaatagtgccaatgaaaagtcataccgtagttattttttgagaagtaaatggtgattgagattcgtgggtaggagagttatgctataccaataaacgaatcaggtgcctcgaaagtgacatatattgttcctttaagcattttttttaaaacagctctcagcatgttctgtagatacttattattttccagcccaataattatactttttcattgattatgcttatacaacaaaaatggatagagtgttctggagacaaggccagtggtgaaatgccaaaatacttcattttacagaatgttaagcatctggtcatttttctataagtttcttgtaaaatgtttcatcaaagtggaggggtagccacaaagggaggaatttcattttggtaaccagaaccagcttatcccatcctactcacttcatcatcactaccctggctttgtaaaacctgttttgccagcttaggagggggcttcatactgggcaaggaaagcagagtcccttgcagtgggttttcaccatccaccagattgaagcacattctgcaggctgtctgcatatcataagtatggttataatgactcacaatttaaaattctattcaccactcaatcctccggcaccatgtagcatcttgcctttgtccatttggcactgatacttgtaattaacaaaaggacccatgtaaaccatgtgttttttatcatatgcctttgaccagaaaactcaaaacagacagcatccaatctgtttgcaacattagggttgggaaggaagagtgttcattctgttctctctgtttcaaagatgcagtgagatgggctagaggggacttaatagacacatgtgcaagaggctaaaggtgaagccaaaagtggacagagatatcccaattcctgttggcccagctcttctcttctatggaccatgtcctcttaactgggatccaacaaagggtcctcttctcatcccttcctcccttatactttttaaggcataatgggtgattgagaagaaatagaaaagttaatacattatattcattaggatagtagctcaatttagctttatgtttattttttgagacagagtgtcaccctgtttcccaagctggagtacagtggcatgaagatggctcactgcagcctcgacttcctgggctcgagtaatcctcccacctcagcctcccaagtagctgagactacaagggcgtaccaccacacctggctaatttttatgtttttaattttttgtagggacaagatttcaatacattgcccaggctggtctccaactcctgagctcaagccatcctcccacttcagcctcccaaagtgctaggattacaggcatgagccaatcgatttatcttttaaagttgtaatagactgggtgtggtggctgaggcttatgcctgtaatcccagcattttgggaggcgaagatgggaggatcacttgagcccaggagtttgaggccagcctgggcaatgcagtgagacctgtctctaccaaaaaaaaaaaaaaaaaaaaaaaaagttgtaatagatgtggttctttgaggaggtattttgagaaaatatgcaaatagactttgatccatgacttttcttccactggccatgacctgtgattaaattccagcataaaagggcatagcacaatatcatgtctgtgaggagtaaagccatgcattaaagggctgcatgtggacttcatgaaaagcgtcgctgtgtctacactctctttaatgtaggtttggagagagaggatgactttggttggagtactttgggcctggttgataatcactaaagatagtaatgagtgatcatttatcccagagttgcaatgccttcttgtatcatgctaggagccctgacagcctatgggtgatgcaaaacgaaagaggatatatggtgtcatctctgggtgatgctgcgggggtgaggagagtgaagcatcacaagacaagtgcccttttcagatgatttccaaaggaagggagaaaagggaagtaagagtgtgacttcatataaaagtctactataaatagactttataatattgagaagagccccagctggggcagatcatgggccatccatggagtgttctgcttctgacattaacactaaggaaactgttggagagcaggttaatggcttgcgtgaggccacttcaaaagttcaaggctgtcttccgtgtatgttgctaaacttctttttggtggagttatgttttctgtctctaccatcttgtgtgataatgagctacaaaaccagggatactgaggagagcagagtgccttaggagggcctagagttgataagcggttggggcagatgtaatctgtacagccagagaccttcatagcccatggaaggagccagtactgaacacttactgtgcttccttgattccagaatgattctgttgtaaggtggatttaagaacatgttttaggacaaaaaggaaacatttctacattaaatgtagaaccattgaattatgaaaacaatgtatgttagaattaaaaaaaaaaaatcgtactgtccccattggcacctatagtacttgacctggttgaatcacttttatgggctcctccctaggtcaaaccatgaaagatgtaaagttgcttttcagatgtctctcatatttacactttcattgtttagtagatacttctaagtcccaaatgtgtgccccatcctgggcctggcattggccatctcaggatcaatgtagaacttttgccagaggaccatcttgagcaaaggcctgggaatccactaagactttttgggaaccattgaggtaaccagtgatgtagaagggagacttaaacagcagatatggctgagagataacattagaaagtaggctagagacagattgtgaggggccttgaatgcccagcaacaatgacttgacctttatccttttggcagtaaggagccattgaaggattttttgtttgtttgtttgtttttgttttttttttttttgagacagagttttgctcttgtcgcccaggctggaatactgtggtgtgatctcagctcactgcaaccccctcttccaaggttcaagcgattcccctgccttagcctcctgagtagctgggattacaggtgcccaccaccatgcccggctacttttttgtatttttagtagagacagggtttcaccatgttggccaggctggtctcgagctcctgacctcaggtgatccacctgcctcagcctcccaaagtgctgggattacaggcgtaagccaccacgcccggcctcactgaaggattttaagcaaagacaatggcataatgcaaaatatgcctaaagcaaagcatatttctcctggtgttggatagaatatgattcatcttagaagatgagtctcagagggagacttcattcttttccttcttttcctcttggtcaccagtcctgtccatgtagttctgcggaggagtgggcaaggaagaatgaggccgcctctgagtggctatagaagaagtctcatctagatgagaatggtggatcactgagatttttggacaatagtggaacagagcacaagttgccaaaatcttttagcttgataatggggagggaggaagaaagcagctgagagttaaattgaaaaaaaaaaaaaaaaaagctaaacaaaaaaaccaacttgttttccattaataaaagggggaacctgagtcacatgaggactggattgtcttagctacgtacttggcaatgtcactacacaaagaagaggaagtttggagaaggtctcagtgacataagggaaagttttatgtagggcaagactaaaagcagattgattacctaaaaaaagtttcctccctctaaagatgtttccgtaatcccttcctggctactcctggaataaccctaaattttgtatcaacaatcattagctcaaaatagagctgggcagaaaatacttccctaagattcttttatactcataagcatgtttttgtttttcattttgttttgttttgcactgaggtgtatttgggtaaaatttccgtgtgtgtcatgtgggactagtacagacttgggagcccaaggcttgttaatatcacttgatgctttcttggaggaccagtctactgcatatcccaaattgggacaatttggagaagtgttccagttcttagcttccagtggttgccagcagtcctcggggttaccgattagaatcggtattaccgatagaattgaggttaccgattctagaagagctggtagctgcctaggattatgggtccacatagggaaaacctttaggaaaagaaggatgctggtttccataaacagttcataatcaccttggaccagcagttctggagaacagaggttctgattcaaatcaggccttgaggtctcattccccaaggagtgggaggcatgtaagcccaggggacaaagcaggactggcctcgaggctggagccatgtgccaatagccccctacgtaccaaccttatttacatggtggtgcggggtgccttatcattaggagtctttcagttgtgagggattgtaaatccaatcaaaactagcctaaagagaaggaaatatattggcttatatataattggaatgggaaaaaattgaaaaatcaaaatacagttcacatttcagttatggatggcgttgtggcttgaattgtgccccccccaaaagatcagaagttctaatttctgatgcttgtgattgtgactttattttgaaatagagtctttgcaaatgtaatcaaattgagatgaggtgctacctgactagggtgggccctacttcagtatgaatgatgtcctgataggagaaaacacacactgacacagacaacagggagaaagctatttgaagacagacacagggattggagtgatgtgtctacaagccaagcaacgccgaggactgctggcaaccactagaagctaagagaaaggcacagaacagattctcccctaaagccttcagagagcttggccctggcaacaccttgattttggacttctggcctcctgaactgtgagagaatacatttctattgtttcagccacccagtttgtggtgctctgcagccctggcaaatgaatatagctaggcttagaggttcatgaatgtccccaggacttggtgactttccatctgtcaactctgccttcctttacattggttctgtgtccaacctctacatagcagccagatcacagccagtaactacagagttggacaagttgcacatcctttatctgaaatgcctgggagcagaagtgtttcagatttttggattagggatgctcaacctgtatatccttccagaagcaagtgcaaaggagaaggttgtgtttctcttcaaatatctcaacttatgtctgattattctcaagggactttgactgggtcacgtgcctatcagagccagtctccatgatcgtggggtaccaggcctgagttaagttgcctcctctagaacctaggtgtggagttcttcagaggacatgaactcagagcttgtaatggtacctcttccaggtccagcaggccccacgggatgctaatagaagagagatgattggcatgaacaatgaagggtccaacattgccttcaaatctcagttccaaaggggttttgatacattattatgatggtgctttaaaaaatacagaatgttgtggatattttgaagacatcatatgtggaaaaaacagtttctccctagagcagagattgggacttctaggacaactttcccagaggagacgggaagtgtcagtggtaaggaaatgacagagtgggtggatggtgtggaaagctatcacagacaagaataatttctattaccagcattaccaattatacagcacttttcttgttttctcacttgattttataataaccccatgagcaagtaagggagctccagatcacgaaatggggctcagaggtgaagtgacatatggaagatgacccagctaacacatggagaaactgggattgacttcagacctttgattccaaagctagtgctcttgtaactttctcactctttctaaaattcacgcattcattcagtaaatactttttcaatacgtcttatattcagggaactatttagtatgcagaatgaaaccttggttataaaaaaaaggagagagagagagtagtaacatcttcagggctttctgtgtgatcgatatgatgcttagggtctgtatacatcatcataagtatcttcacgccagctcagtgagatgtgatcacccccagattccagtggagctatccaagcctgagagtggttcagtcagttggccaagagcagaggtagccgtgggagggctggggtttggttccagctcagtccaatgccaatgcctgtgctcttaattatgttgcctctgctatactcataactctgttaacagccataaatccagctctgtctgttagacccagtaaatttcaaagtagaaaatcatttttctaataaaactacgcatagaaaaaaagatattaatgctcatacattctaccctcattatgacatcaacctctgagccaaactattttgcacattataaagagctgtttttatgatgaatgggaattatattggcactttaattgagttagaaaccaaggtacatgaatgttagtgcacaagaaatgcgataaaaaaagctgctcaatgtggttggaatacatcagattaatttaataccaactttaaatccttacaatctatacccttaaatatgttttatcaaattattagatgaaatttttatactgtttttttttcttttaggtaggtacctattgcacattccccccacccctgcttttatttttttatttttttttaagacggagtcatgctctgtcacccaggctggagcgcaatggcacaatcttggctcactgcaaccttcgcctcctgggttcaagcgattctcctgcctcagcctcccaagtagctggaattacagatgtccactaccacgcccagctaatattttgtatttgtggtggagatgtggtttcaccatgttggcaaggctggtcttgaactcctgacctcatgtgatccacctgcctcagcctcccaaagtgctgggattacaggcatgagccaccgtgcctggccctgcattcttaacaaatctgctatatgataaatttagatttcaattttgtgatcaaaactctttttttgctataaaatgaaactattgccctcttagcttcaaatatggtaatgtaggaggttggcatatatttggataaaattatgtaaacttaaaaaaaaacactttccacaataggatgttttaatattggttcagtttcagccataattaatgatttattttatgtcttttgttttagttcaaattagttcatcattaaaaaaaaaaaactgactccattcacgtgcccatacaattagtacttgtgtttgcttgatttagcattctgcaaatgaaagagagtttgttttaatttagggcctgtgctttccttaaggtcaaatctccatttgagagaaagaatatggtatttaaataatttagtcaaattggaggccttgagacaagtcagagtccccaggctttctgaaaatgagatgtcccacgtttgcacttttccagcccaaccaaaaatgatagagttgtcagcataaaagttaatgtacaacatgtggatttttaaaacatgattgggatgagtgttttgagtaattaatttgctgaaattgtgttgtgctttagcgcactgtactacaatattagcattgtgaagcgtgcattaaatagttcctgtcaattatggttggctgtgaatgaatctgagggttccttttgttataaattactatttcctaaaatggttttgcagagaagcaatggaacacttttagatttggaatgtttaaagagctgttcttgccagtggttgattttgagtgagctccaatgtttatgagaactcataaaacaaagcaaagtggggatggcccatttgctgttactccgttttcctcccactgaaatttccctccagtttttggtggtgcctctgccacagttagctcatctgataaagcagggtgatagctgcctggccacgtatctgatgataatgatatgagcttttgcatacggtcccttgatcctgctagggccccacccccattctgagcatgcaacattaacataaaaactaccacgccttttgcagctgtggataaaccccaaattccacagctgggggtcacaagagaaagtttagctgaaaatgtatatacctaaaactggaagttagagggagggttatgaaatatttccaggtgcaatgtatgaatttacagggaattctttttgctgtagttagttattaggcaaacagcgctgttcattggtttggcaagagttcctaggttttgcggatagttctctgggtcatttaggaaaaggggtgtttggaagatgaccctgtgagagttgagatattttgccatgatcccactggtggcagcacatcagaattctgcaggtcgctttgaggttctttgttttgccttctcccttgattcttccttctgttcttatggctcaccctgcctttgttttgccatttaaaaataactagcggcccactgacggttttgccagaggcccttggaaatctaaccgtcaaataaattttattggtgttgctgctgatttttaaaatgaattctctgcaaataggcagaagttactgccagccagttttgatcaccagcacctttttgcttcaacagttcccagcagctaacacaataatggggccatctttatgtaaatagacacaatagtttatgtttctaccagctccagaggggttcacagtgttgatcttgactttcagatgggcctttctgagctgagggaggggttgctggatgggagaggagcttcccaggagaaaaccatgggtgaataatctcaaaacggttgttgcagctacactcgcatttggaggttaatttagaaaaagaaaagcaagattggacatcggaatggggactgcagggactgggccgagctaattatttcaaactggcctttcaggccatcctagacacagattggccctggatgggcctcggtctctggtctcttgaaagcccttgcctggtaggaagaagccgctctgccaggcagcggaagggagaggcaagcagtgtgagcccatgacgaggcttcagtttatggtttacttaggcttgaaaagggaaaaatggtgctaaattagatgtgttctggaatcagatggacactgttagtttcctctaaatttccttggccccacctcctttttgtgctttatttttgcacacctatgggccccagtcttttagcttcctcccatagattcttgattatttaggaaggaatctttccacacaaaaaggaccatcaagaaatgggatttatgtccgcagactcggcctgagaagagccgttcatctcagctcagggctgggagggagctgagcaggttttcttgcaggagcgatcaatctgccaccagatgtctctgtagcccactctacaggaatgctcacaaacaccagggctggagcctgagctttccggtgaccttgtggtatatgctctgaattaataaatgaagcagaaatgactgtgtgtgtgtgtgtgtgtgtgtgtgtgtgtatacgagtgcacacgtgcccatgtgtatgtattttctttcctgagttgcttctcagagtattcccctaactccttggttatctctttccctacactgagttccttcctaaaagtcagagaagagttgtagggtgctcccagaacgggagattcatcattgataggtgcaagcaaagacagtggcagtgggccctgataatctctgtctccttccctaaggtggctcttgggtgcagttatcatgctagggacaggtaaggaatgtcacttaatcctgggctccctgctggtccccagccaaccagcaaagggaaactcaggtgctgctaggggatgtcattgttgaagggctgcccaggaaggctgaaaacaaggatttgctttactgcatgtgtacattcattttagaagctttaaagtatttcaatggaggagcaacttagcaagttaattaggcaaattaaaaatatgtctaggaaagagagaattaatggtgaatgtggtatgagcctaatctatgcagtgggagatgctgtggacactccaccagtttgatcacaaagaattcacagaaagcaagccgcgcacggtggctcacgcctgtaatcccagaactttgggaggccgaggcgggcggatcgcttgagtctgggagttcaagaccagcttgggcaacagagcaagacactgcctctaaaaaaacaaacaaataaaaattagccaggtgtggtggcacaggcttctagtcctagctactggagaggctgaggtgggagtaccagaaggttgactcaggaggccaagggtgcagtgagccatgatcaagccagttctctccagcctgggtgatagagcgagaccctgtctcaaaaaagaaaaaaagaaagccagccagataaaatgtctggctaaattgggcatctccccaagtccggctggtctgtcctgagtacagtgaagtcagctgttactgcccttccatgtggagtttgatatgagcagcaaatgatctgacacatacactctctataaagcatgcttctcagctgtctcactgccatagtacagagaaaaggtgtggcacattcggcgacgtcaggcatgaccacacagagacacagcccttgaggaacaaggtgactgttcgcaggaggcgttgctcatctgcttatctgattttagttgaattgtctggcaaggatcataacagatttaggaatttttccaaataaaaggctgggatacaaaaataggaatcattcagtgggtgagttggtatctgaagaaaacaagagaacatttaatacagaacagtcctatctatacatgtatacatagacacaaaatataatccagcaagattcacacacagcatatcactgtcatcaacagtgactctctctccctaatatagggtggaaattgggatacttatgatagaatcatgagatgtagtcctgatatattccgaagatgtagccttgggaattttcatagatctttcctcccccagaggtcacacacacacaaaagcatcacgtcttgttttacaaacataagttgaggctggatcttctgaaaacaaaatggaaacattggtgtcgagttggagtgcttgcagtggaccgtgatgcgctctgattccttcttcacagttattggagggtggtgaagagaggatggagacaccccaggaagaccacctcaggggacagcactatcatcagaaggggcaaaatggttctttcgacgcccccaatgaaaggccctattccctgaagatccgaaacactaccagctgcaactcggggacatacaggtgcactctgcaggacccggatgggcagagaaacctaagtggcaaggtgatcttgagagtgacaggtgaggtgacctgctgcacttgttttcttcttgaacaatgcatgtgtacttcctttaggtcctaaaatcgttcctctcttttggagtgtagctctagagctttggatcacatctgtggctgaaagtggaaatccgctgcaagcatgtcaccattttctctttctgtggcttaaatgatgccttttgtttgacttttgcccaacacttgttaggggctgagggtggaaatgataaaaatgtggtcacagagcccctgattccgtacaaccgttgatttctccttctgtcagggatctgaaaggaattggacttcgggtaatattattacacctgcaagagtacagtccctgtttaagggggcagtgtgtgctttttgcttagtgttgtatgcacacacctcccttaggccctcctggatctccagcccttcatcctggtttctttgtttcctggtacttagtacaactggcatgttatgtatggattgatttactgtctgtctccccaagagaacaagaacctctgcgttttcttctctgatgtatctgggcacatagtaggccctcaatgaatattcacctgaatgagaggaaccttgcagaggagagtggagagggcaggcatgtcctgcagggagtggagagaaaatgaagagaatagctgattttctctccttttcctcttccatggcgatattgcctacaacttaaggggtcagagtctacagtcacttagatctggctcaaatattaactctgccttttgttagtgtgtgaccttgagcaaatcacggattgacactaagcctcagttctctaatctctaaaatggaagtaacgtctacaacataggcttgttgtgaaggttaaatgagaagttgcgttaaaatgctgagtgtagtgcccgggatagactgaatgaccaatacatattagggaccatgaggacaatggctctcattacccacggctgtgagaatccatccctcgactgctgcacaaaatgtcgaatccattttcaggggttgacatctctggagatctagccattggctccaatggcagaaccccctccgctcacttgcactccacctgctcctgcctggggcatcaagcagattctgtttgcaagcacactatagccaaagctcaacttgcttccccaaacagcacattgggtgttgcacctgagtggggagaggcacctcccttcatgtctgtccctgggctaaaggcctcgctgctcttaccctcccttcgtgctgcaccaaaccctttaacagccctgagggagttgttcttccacccaaccatgctggcacccttgccgaaagagcttgaatgattctagaaaaatctgttgacgtatttggcaatatcagggcagctcccctgcttcctttcatagtccctgaaacctcctgaggtgaggacacaccacagtctacccaacagtgatgaagttaagataatttctggattaacaagtggtggttcatctggtaggaggacaaaataagccaggaaaggcttgacatccgaagtgcaggcagacaggccgcaggataagcctggaccagctgtctggctcagccgccttggtccttggtccttgaccctctctgagcctcggctctttcatctgtaaaatgggactactcaggcctgttctgaagattcggaaagatgccatgtgagagtcgcatgcagccagacacagagcgacagtgcgcgccggctgctgctgtcaccttcactgtcactgttactgtcgttcatcctgatggtgggaagaggagacaagcaggactccaggaccaaggaacaaagcattcttagctttttttcatggtagaaaaatcctgttaaaatggcttcacatgtcgcttacttttttaaaggatgccctgcacagcgtaaagaagagacttttaagaaatacagagcggagattgtcctgctgctggctctggttattttctacttaacactcatcattttcacttgtgtaagtatcttcttaaaacatcttctcttattaaaagattacccagggcaccaatccaagtatctcttgcagatagtgcgaatcatttaataatggtgagagagattattctttgaaccctggactttttgaggcccctagactgggagaatcattacaggaagctccctgaaatatttccagcttttgtctagtggctacgtttagagcattgtggaaaaaaaaaacaaagtaagatataggaaggacgtttgggaaatgacaaggggttctatgcaagagcagaggccctgtaggcgcagtgctagaagttgcagcgctgagggtcccccatcccagagcagaggccccgctcttcctgtgggtgagggagtgggccccactgccccagggatgccaggggatagatcagcctcctttggctgccttcaaactatttctcgtgggggttctccccttctatttttggtatttctgcccatgccttaagaattaatcccaagaagccagagcagtgaggcacagtgggaggcttccggggtgcaggatggctggccggtgctcaggcaccctagacatgcccatgagctgttggttgcaggttctggctcaaagccctcagagattctttctgcatggctgctcacctgtgttgatgatggttgtgggagagtagggccacatgtgtgtctgacccctctaggaagtgatctgccccctttgtctccatccaccaggcagggctggctacctaggggccaggacagacttcacccaggagctaccccaggactggttcttgccactcactgtgtccctctattcacttacttgcctctctggctgtgcactcatctctctggtttctattttagataccagtcaatcagagactccagtgagcacctactatgttcaaggcattatgctaggcactgtacagggcataaaaaggtgtaagacattgttcctgccctcaaggagcttacagttaggatgttagggttatttgcgtataagaagataattagagttaccaggcagtatgttttaaacatgaatgactttagcttcttgttggaaaatgcctgcttctgtgggcattgactttccatacagagacctaacagtagggggtcgaaatggccacaatcagtgaatctcctggtccaagtttagagacgccagtgaaatggttggtacaaatcccttgtggagcgagtgaggcagtgagtatgagagcttccagaatgggttgtctagccagctcttagtgaatagagtttaaaaggaggtgacaactgctgaatttttccaattattcacttcacatttctttcatttctttttagaagtttgcacggctacagagtatcttcccagatttttctaaagctggcatggaacgagcttttctcccagttacctccccaaataagcatttagggctagtgactcctcacaagacagaactggtatgagcaggatttctgcaggttcttcttcctgaagctgaggctcaggggtgtgcctgtctgttacactggaggagagaagaatgagcctacgctgaagatggcatcctgtgaagtccttcacctcactgaaaacatctggaaggggatcccaccccattttctgtgggcaggcctcgaaaaccatcacatgaccacatagcatgaggccactgctgcttctccatggccaccttttcagcgatgtatgcagctatctggtcaacctcctggacattttttcagtcatataaaagctatggtgagatgcagctggaaaagggtcttgggaaatatgaatgcccccagctggcccgtgacagactcctgaggacagctgtcctcttctgcatcttggggacatctctttgaattttctgtgttttgctgtaccagcccagatgttttacgtctgggagaaattgacagatcaagctgtgagacagtgggaaatatttagcaaataatttcctggtgtgaaggtcctgctattactaaggagtaatctgtgtacaaagaaataacaagtcgatgaactattccccagcagggtcttttcatctgggaaagacatccataaagaagcaataaagaagagtgccacatttatttttatatctatatgtacttgtcaaagaaggtttgtgtttttctgcttttgaaatctgtatctgtagtgagatagcattgtgaactgacaggcagcctggacatagagagggagaagaagtcagagagggtgacaagatagagagctatttaatggccggctggaaatgctgggctgacggtgcagtctgggtgctcgcccacttgtcccactatctgggtgcatgatcttgagcaagttccttctggtgtctgctttctccattgtaaaccacaaggctgttgcatgggctaatgaagatcatatacgtgaaaattatttgaaaacatataaagcactatacagattcgaaactccattgagtcattatccttgctatgatgatggtgttttggggatgagagggtgctatccatttctcatgttttccattgtttgaaacaaagaaggttaccaagaagcctttcctgtagccttctgtaggaattcttttggggaagtgaggaagccaggtccacggtctgttcttgaagcagtagcctaacacactccaagatatggacacacgggagccgctggcagaagggacttcacgaagtgttgcatggatgttttagccattgttggctttcccttatcaaacttgggcccttcccttcttggtttccaaaggcattttattgcttgagttatatgttcactgtccccctaatattagggagtaaaacggataccaagttgatttagtgtttttacctctgtcttggctttcatgttattaaacgtatgcatgtgaagaaagggtgtttttctgttttatattcaactcataagactttgggataggaaaaatgagtaatggttactaggcttaatacctgggtgattacataatctgtacaatgaacccccatgatgtaagtttacctatgtaacaaacctgcacttatacccatgaacttaaaatgaaagttaaaaataaaaaacatatacaaataaaaaaatcccgactttgggatgagtgctaggatgttgtaaa

SEQ ID NO: 22 - DNA, 43808 bp, Homo sapiens
tggattaggagagcttctggatagctgaacacatggaggtttctggagggtgtggcccccagagggcatggaagctctgcacccctgctcccatacctcaccctacgcatctcctcatctgtatcctttgcaatatcctttgtaataaaccggtaagtgtgtttcctttgattttttctttttgttttttcagacagtcttgctctgcggcccaggcaggagtgcagtggcacaatctcagttcactgcaacctctgcctcctgggtttaggtgattctcgtgcctcagcctctggagtagctgggactacaggggcatgccaccacacccagataatttttgtatttttagtagagacggggttttgccatgttggccaggctgttcttgaactcctggcctcaagtgatctgcccacctcgacctcccaaagtgctgggattacaggcttgagccaccgtgcccagtatccttgagttttgtgagcagctccagcaaattaattgaacctgaagagtgtggtgtgagaaccccaatttgaagccagtaggtcagaagttctggaggcctaggatggtgtctgggggtatgaggtatgggcactgagaccccaaccagtgggatctgacactatctccaagtagacagtatcagaactgagttggaggatgcccagctggtatctgctgcttagtgtgtggggaaaaaaacccacacattttgtcacagaagtcttttgtgttgacaactgttgtggtggtatgagagcagaagaaaaacatggtttgagagagttttttcctacacatcactatgttctgggtttttatttcagcaatagcatgtcatcaacaaaaatgtttttcagcttatcttttttccaaaagaaaaaaaaatgtatataagcaatataaaacatagccaggtctaaaagcaacggaggtgcctaagatggaaaatttaaggaggcatttactctcacttgcacaatcttagtatgaaatgtacccttggtgccctgaacactaaactgacaataaaagctagttaatttaagatacactggcaaaatagaatgatgtgtcttttactttcatggtttccttacacaagaatgaaagtactttcagtttaaaaggttttatttgaatgtattacctcatttaatcttcaaaataagtcttaaaattaagtgttattattcattttatgaatcagaaaacttagctattttagtaaactgtgacttaatacattagaaatattttttgagtgtggaataacatttgaagtttatagatattaaaactaaaactcttttaaacttctttttaaaaataaaaaagcaaatgaatagagaagcttcctagaattaaatattaagatatttatgactctttctttaaaacattttattaatttcttatttttcagctttatccatttactgaaaaaggaatcttttttcttagctaaaaaatagctaagcattttttttaagtctttcaaaacagtaatcctttcgctaaattatagactaagaggagatatttttaagaacataacaatgtttaaaggaatagtaatgttatatcaatgacataattttatacacatgaacaaacacattttaaaatgtgtttcaaatggatttattaattaaatgtcttaaaatgtctttcaaagtggatttattaattgatatcttggtcaaaattttcaaagaaaatgagagatatatcaatttgattaggtctgatttcaaaaatttttattttattttaaactaagttactttgtggtgttgggtatttttttaaatatttaaagtattttgaaaagtgcaatatgtaaaatatattttgtgattgttctgttaattttaaaatattgtttaaagaaaggacttcctaactcaaaattagccaagatttctaaaattgggtccaggtttacttgaggatgtctgatataccagctctgggaggcagctccaagggagatgacaaaattcatgtaattaaactaaaatagtcacttatctgaatgaggtgttaacagaagtcaaagtcctcacccatcattactatcttcaattcagtgagggtcttcctcctttctaatagccaggaaaaaaaccttgttaaagagtttttgtggaatttatcctaagtacagtaggaaagttaccttctgaatccaaagaaaaaaatcctgttctaactgaaataagacaaaaatatctatgatgaatatttgcaaaatgaataaaaactcatactatatccatcctggctaacacggtgaaaccccatctctacaaaaaatacaaaaaattagccgggcatggttgcatgcgcctgtagtcccagctactcgggaggctgaggaaggagaatggcgtgaacccaggaggcagagcttgcagtgagtggagatggtgccactgcactccagcctgggcaacagagcaagactccatttcaaaaaaaaaaaataaaattcatactgtaggaagaattaatactataaaaggaactaatacaatgtgagaaacagacattaaaagaggaataggaaagttcttgaagctagcatgtctgaatatgatgaaagtcaaagatgcctcaccaaattttgtagatgtagaaggagtgggttacgactgaatagaaaaacacaagaagggtgaattcgagtttaaaagtcagaaataaacatgcttgtactgctaagtgacaaggcatcaaattatctattaataatgctcatgactaagatttgtgaataagttaaaaacaagtgaataaataggtcctataattaaatgatcaaaattaaagtcatttttaaataattcctgcctcttaactaggatctctataccacagaatgaaaatcaccaggtttttgccaatgggaatctaactggtaccctttacccatatatataattctatgatagcaaattgtgtcaagtttaacctattcctagtgctaaacttttttgttaaaaattgcttgatgattaaacacagtatagttttattttctagtaaataacacttaaaaattaaacaacactattaaaaattgtattggttttttgggttttgctgcttctacttctaggtggacctactccaagttcccagaatttcataatccttaaagcttccaattctgaaacagaactagatctaagacagtaggagtaggcttattagctagtattgggttcctaccaagtgatttttgttgatatgcacatgttactacttctatatgtttggaaacccgttggtcattcttgccctagtgccttaaaatcaaaggttggccagatacaatagaaatttgatatgtaaaggtaacataagggtcttcaggcacaatttagtttcaacacatccctcatgaaaaggatgattagtacccttataaaagggaccccagagagctgccttgtcccttccaccatctgaggacatggtaagaaggtgccatctatgaaccaggaaacaggcctccgccagatatcagatctgctggaaacttgatcttggacttcccagctttcagaactgtgagaaatacatttctgttgtttataagccaccaaatctatggtattttgttaaagcagactgaacagatccagtgtaataagagttcagaaaatctaatgattaatttcaagcttagactatcaatggcctaggtcatccttagaatgtctgcaggattctttttttcttccctacattttaattataagcaaaccttgaatattacaatatagggcattcttagcaatacagatgagagtttaaaatcataattttaaaattgttttctctgataactatgtgttcaatttgctttttaagctcctttcattttctatttattatgaatacattaattttttaaatgaaaagttaagcaagtataagagatgtctcttttttaccttttaacaaagaaaaccctttatctatgagtgcaactacaattttaaatttaactaagttcttcttggttaaaacaaaatcatataattaatactgactctagcccttgatcataaattctttgacacagtagaagaaaggcaaggcagatcgccttaccccaatctttatatatatgaagccaaatactaaatttcaaccaaaaaattaaactttggatcatgtgcccatcaggctatgcatgtaaataacaaacattaaagttaaaaaatatgcattagctatttgtacataagtaaatgaaaattaacagggcccaacatagacaatatcatacataaaagaaagatgtcttcatcaactctagcctccctcctctttgcctcacagaacatagcaaaagttatctcccaaatttcaaccacttctatctcaggaaaaatagttaatattttgtagaacatctgactttagttttcggttatattttatactgtaaactcctatttcctgatatggcttgtaatttatttgggaggcagcatatatcagagtccccaaggaagctttattaaacatgcatgccaggtttcccttttactcccaagattttgatatacccaaaaagagagaatatctacatgtaagaaaagctcctaagcagattctaatgtaatcctactattctatctccttcctaccctattcctgatacttctctcatatacatataaaaatatttagacttatgtatatatgtatgcatgtatctatctaatctcctccaccacctccttaagaagtataaactatatttctgcatttttctaattctgatataaatttctgaaaagtgacttaatattctttcttaaatagcaatattgtgataacagttcaatttcttgtcttcttaggttcaaaaaggccttctttcaaaccttccccaaagcctattttctggaacactaaaaactcaggcaaatttgaggtctatcaaatgtaaaaagtacagactctactgtgaatctcagaaattctctaaatcataacacattcaatagctgacagaagacttttgtttctctttttcccagcatttgggctaaagtgatgatacggtaagaaggcagaatattctgaacatttcattaactttagtttatgaggattaatttttaactttatcccagactcagtgggcaaaaatgttgtgtggactggtgaggatattgcactataaggaagattaacaaccgtaatctttctatcatgcctgatttcgataactatgattaatgattcaaagtcattaccttatacttcatgattctattttatttctctcactacctcactaccaaaattctgtcttcatgattatcttaatttaataatagtactagttaatatttattgaatatctactatatgctaggttctatgctaaatattttacatatattatctcatttaatcttcaaaatacgtccataaagtagatatgtgtattttatagaaattataaattttgccccatattatatggctgataagtgatggagcagtgattcaaacccaagtctacctgtttctaaaacttgtgccgttagctgctatactagtatgggagtcacgttcctttgcttactgcctctttcactctttctttgcccattgtcatgcttttaaccatgtttctaggttgctgtttacccctacaattagttccactggccacaattccatctatcattcattcactgatccattcatctagagatgctaagagaaatagcacattcatagtagtacccactacatagagttgttgtgaaaataaaataacctatataaaaagtttggtatgatacatggcacatgataagcaatcaataattctaccctcaaagagcttaacagataacatttattgaatgccagacatagcaccaaccacattacttatattatttaattctcacaacaaactctagaaagaaggtaattattttttaaatgccattttataagtgaagaaaggtagacaaggagtaaattgtccagtcacatgaataagtggtggatccaggacacagttccaaactgtttgatttcagagcctttgttttgaacttttatgctatagtttacagtctaatgaaaaaaaaaacagataagtaaataaaaaatagcaatacaaagtgctaagtaccagaataaaagaatacacagggtgccatgaaaatcagaagagacaactaactcagattaggagcattagagaaaacttcttggaagagattatgcttgagttgaatcctaaagaaagaacaaattattttaagtaaaaagcagaagaatagtgtgctcagaagcaagagaagaaaaaataatatggccctggggaaacttcatgcagctaatctataagataagaaaaataatgcttactatagggctgttttgacaactaagttagataataaatgtaaagtgcttagaagggcacctggcacacaagcctttgagacagaaatttttctttccataatgctaaaatacagatttcatagcaaggaaatagcaaaatataaactcgctgaaggattttagacaggtgactaccagggttcagatgggactttcagggagttcttaaaataaaattccagtgccaagcatataatggacacttggtaaatatttctagaatattgacatatgatgcagccatatcatgagtcaaattaactacagcaaagcacaaacaagaaaactgataataggatttgttttctaattgacactaagtcataactatggcagccagcctccaagatcaccccaataatctctgacactgggtatttatatccttgtgcagacagttcctaaactgtaccagggttagtctgtgggccaatgacatagggcagaagtgatggcatgtcacttctgagatgaatttataaaaatctgcagtttccatcttaggttctctccctctctaggatctcttccactggggttgaggcagggagctgctatggagtagccctacggagaggctcacatggcaaaaaaaatgaagcccctggccatcagccagcaaagaactgaggcctgccaacaaccacacgagtgaacttggaagtagactctccaatcccagtgaagccttaaactagctgcagccttggttgacaatttaagaatctctcatgaggaaacatgagtcaaaatcacacagtaaagccactcccagtttcccgactttcagaatttgtgtgagataataaatgttagttgttctaacagataattaatatagcaattgatcttttttaactataaagaaaatatttcatggaatacttaacttttgaaagtaaaatatgtatatttctttctaaagcattgtttctatccaggacttgggcagtagttttctcttgtactcaactcatgttattacttatctactcaaattaactgtcagcctaattgctctctgaacaacgcttcactctgttttgctacttagtcttgtgaaggaaaccaggctctcactgtcagcaagattagtataaatttcactgggtaaataatattgatagaaaaagtagaagctataagtctgttctacatgacttttcataactaacatacatttctaaggcaagcatgaacttgtctagaaagtaaaggactccaaggctattaagtcaaggtgctcctaaaagagattctgattatcaaagtaagtacaagtcagtagtgctagtagaaaaattaacaatagaggaagtggaaggcagaaattgctattgttttctgggtattttaaggaatattattagaactacattacaggaaatgtttttgtgccaccctaagctaaattctaagactgttttgcctcgcaagaggaaactagaatagaaaatagaagaattttggcagaccttggcctttctgaagatcttttccattttaccttgctggtcctttaatactaatatttctgcagatctgcttgccaatacatatgctggctgagccactatcatgatttttttttttaagagagagtcttgctcttgtcacccaggctggagtgcagtggtgcaatcttggctcactgcaacctccgtctcccgggttcaagcgattctcctgcctcagcctcccgagtagctgggattacaggcatgtgccaccatactcagctaatttttgtatttttagtagagatgaggtttcaccatgttggccaggctggtctcgaacttctgaccgcaggtgatccgcctgccttggcctctcaaagtgctgagattacaagcatgagccacagcaattggcctcatgattttaactatatctatattattcctaagtctacatttctgactaaaactatgctttcaagttctagatccatatttccaactggacaccaaagatatccacatgaatatgtggcaaacatctcaaatataataggttcaaacattaacatgaactcatttccttcatcaccaaccagctatgagatggtctttcaatacctactttggttaattgtgttatcaaccacctaatcacccatagtacaaatcttaaaattatcctcagttaacctcagttccatccaggacctaatcttttcattcatccttttaacatattcgtgtctttatatttacaatagatttcttttagatagcatagagttgggttttgtttttcatccactctgataatctctgccttttaattgggctgcttagagcactgacatttaatgcaattattaatataattagtttaaattctacatctatttgtctcatcttttctttgttccctttttgacaaagatacaaaagcaaatcaatagaaaaaggatagcctttaaaataaatggtgctgaaacaactgaacatccatggtgcccaactcagcaccccctaaaaaaacctcaacccaaatctcaaactttgtacaaaaataaacttaaaatggatcatggacttaaaatgtgaaactataattttttaagtataagggaaaatcttcaggatctggagttcttagatttgacaccaaaagcataatccataaaaggaaaaagtgataaactggactttatgaaaattaaaaacttttggatgagaaacatgatgtgaagaagatgaagaaagaagctacaggccaagagaaaatatttgctaaccacatatctaacaaaaaagactagtattgagaacatataaagaaccctcaaaactcaatggtaaaaaacaaacaatccaatcagaaaatgagcaaagacatgaagagaaatttcaccagagaggaaatacaggtcacaaataaacagggaaaggttaatcaatatcattagctatcatcctgatgggaaatgcaaattataacctcactgagatatccttacactatcagaatgactaaaataaaaaataaagacatcaccaaatgatggaaagaatgcagagaaactggatcactcactcgtatattgctggcggaaatttaaaatgattcaaccactctggaaaatacttttgcagtcttttatcaaagaaaatgcaaaataaccatacaactcttcaattttactcattaggcatttatcccagagaaaagaaaacccatactgatactaaacataaatgttcatagcagctttatttgtgatagccaaaaactagaacctgtcctgatattcttcaacatgtgtctggccaaagaaactgtagtacattcatgctacaaaatactagtcagcaataaaaaggtatgaactattgatacatgcaatatcgtgaatggatctccagaaaattatactgaatgagaaaaaaaactaatcctgtttgattccacttacataacatttttgaaatgacaaaatttgagaattgaagggcagattagcagtggccaggtgttagggacaggggtagagaggctggagggatatgggtgcaattgcttgtggtggtggatacatggacctacacattttcaccaggtcaagctgcctggtggaatggtgtatagtggaaacccctgaatagtgtctctctacaggcctggtgttcctgggctgagaaagagtctcggctgtagggttaaagagacttcctgggccagggtgttttttgtggctgggtgccttctgctggtttcacttgcttgcctggagcttcctaatggggaagggaatcttaggagtcttaggcttgttggataaaagcacctgaagaaaaatgactaatgctatttccagatattgctgacagagcaatattgaaataatctatctgttaaaattttttttctccgtttttattatcaagactgaatccaaaaacagattcactgaagaataattttatttatttatttattaaatggagagagattctcactatgttgtccaggccgttctcaaactactggcctcaactgatcctcctgcctcagcctcccaaagtgtaaggattacaggcatgagccaccaggcctggctcattgaagaagaattttaaaacttcaatgtttcaatttataatataataaaatacaaagctattatgattggagaaattatttattttaattctcaacattttaagaacatatattcttgtaacctttaaataaatattgaggccaggcacagtggctcatgcctataatcccagcactttgggaggctaaggcaggagaataacttgagtccaggagttcaagaccagcctgggcaacatagcaagaccctatctgaaaaaaagtatatatgtatatacatataaataaaacatattgaggtaataaagacaaaagttgtaagatatgcttcttctcaagaagaaactaattcaaagatgatgaatggaataaatctgaataagccaaagtccttatttgtctagtttaactgaaagttttccaaaagatatcattgttttgtaatacaatgcatacctactaaaggtaaaaaaaaaaaaatgcatttttgttaacagtaaaacaaataaaacagtggaacagttttatcaagaaacaattatgcttttgtcataatatttggtgtaagttataaaaaatggtttcatttaaatacagtctatcctatgtggcatacttatttaagacttatttagtggcagaaattctctgaacaaaaattttttacagattcatctccagcaggtactctgagggagtccctgaaaaagctcttttaagttacaaagcaaggcaacagaatcccaattctcttcttcaaatagtatacatcttaaataagaattttaatgcttctaatcaaagataattttaaaatttagagttagtggtatatttaaataattttaaatgttttaaaacatcaaagtacattttcctatgttctatatttacccaggtatactcataaatagaaaagtacatatgtatctttttgaaaaaaaaattaacgtctaaaagaatctatttctaataagtcacgttttagatatttcataatactgaggtttagtagcttacatgtatgttcatatcagaaattaatttatttctcatattgtttaaaatgtacagtggttaaaatcactttgagaaacttatggtatgacagagtttataagacacagtagaaagagttcttatctaagagcacataaaaagaaagagcagtatcccattccaaatcttaaagatattattctctgatttcaactatataagcataatagcaaagactgaaattaaatctggaaaatcataaacagcagatttattagagttgtagggttatgctatcttttttccttttaattttattctgtctcttataattgcttttcaagagccttaatagtaatatctctcctatattataaattaaaattttattccaaggaaataaaattttatattcctgtacgcttactcaagcatagttaggacaaataattgacagaagtcaaggaagacagttgacataggctgtcagatgtccctgctatcagggaaattaaattcaggagaagaaagttcagtctcttgaggtaaacaggatgctaaccaaagcattaaagagtaaaagacatgaacctaatcaccgaatggtgagaagagacaagtcagggtggaatgtgactgaaatggaactgttgatctggggctctttaatgagagacagctactctccgagaagtatttagtttcagaacactggcaagtagcccaaaaaaaaaaacaaaaaaacaaaacatgcattcctattttatgaggtgccatgaaaaataagaatcagaagcagaaatgtagaatcttaccaagttgaaatactgtttagaaatttctatttgccccaaagatcttggggacatgaacatggtgagtgaatttctgggaggtgagctggaaatacagattggagaaggccttttaaagatgttgatcagttaaaggttaattccctgagacaaccacatgattcattccttcacttctttcaagtctctgttcaaatgtccccttattagcaaggccttctttgacctccctatgtagaacagtaaaagcccaccccctttttcctcctaaattatttttcttcagagaacttatcaccatatgaccagttgtataattgtttatttattgattgtcttctccaaataaaatataagctcagggattttgttttattcactgctatattcccagcacctagaaaagcacctggtacacagttacactcaataaatattttgctactggaaaaaaaaataagtatcagttgacccagagatgaagacaacataagcaggaaaaaattttaatatgcctgtcttaatttcctatttatatggccagggcaaaaatccagcaatctttttcggttaggttgaaatagtccacttctgtttaactaaaacaacaacaaacggctgggctttaacagggggccttttgtagaagccgtcctttggtcttttgtttctaacctttctggagtagtgctcgtatcttctagtatagacaggaaaccctcaaattttccaaacatgtgaaaacagttgattaaagcaagcacactagaaaaccaataaaaaaaagtaaccacagaaattttgctctgggaatagatgactagtggcttagaatcataccaataattcttccttacctttgagtatcagtatctgttaaagagctagtctctttgaattccaagtgggttaagagcgaaacatttatctgcataaatgcctaaagtcaaaatatgtttttggttttaagcatacttgctttaatgttcatagcactagtccttaaaaatcaatcatctataataaaaagaaaagaaagaagtctaatcaaatgtatagtcatttttattttgaaggccaaaacttaaaaaaaatacaaatattaaatttgggtacctaaaactgagaaccacttttaagttaaggacaaaatgatatgcttgtttagatgcatctcccacctttttgaatgggttgttattttttgttagtttgttctaacagacttgtttccataatttgtcatttaactattctgtaaatgttataactcatatgattcatatgatggactgatgttttcattccactttatgttgttcttgcaacaaaattatttagtcaaacctatctttttttaaacactagattttatataatacttagaaagcctctactgctatttttaaatatattattttattttaattgttagagttgggctgtcacccaggctgaagtacagtggcatggcctactgcagccccaaactcctgggctccagaaatcaatccttctgcttcagcctctttgctgggattacaggtgtgagccacagcaggcctctactgttttttttttttgtttgtttgtttgtttttttgtttttgagatggagactcactctgtcacccaggctagagtgcagtggcacaatctcggctcactgcaacctccgccccctgggttcaagccattctcctgcctcagccttccgagtatctgggactacaggcacgtgccaccatgcccagctaatttttgtatttttagtagagacggggtttcaccacgttagctaggctggtgtcaaactcctgacctcagatgacccacctgtctcgcctcccaaagtgctgggattataggcatgagccacagtgcctggcctctactgttatttttctaacgtgctcatttttttccagaacttatatggagtcattttttaaatggagtcattttttattgagattattgatctagctagaatttattttggtataaagaataaatcaaagtctacctctttttttcaaattgctatcctgataactcatgagcatttactgaattatcctgaattttctccactgatttgaagtggataaattatcatacattaaattcccctgggtatgggattatttctggactccttataactaaagaaatgcaaactaaacaagatactactttgacctgttaaaagtctaataataatctggtttgggtgaaggtgtggagaatgcaaattaggaggggatttttttcttagaaatgaaactgctaggtgatataacccacagtatctacaggtgaacaaacttgtaaaaacatgcactgaaaacatactgagatttttactggattggcattaaatgtatagatttgtcccagaaaaactgcctggcacatgttcaagtattctcttatggcctttattaaagttttgtagtcttttgctttgttttcatctacatcctgcactttgcctattaagcttattcctaaggtattttgtactatttgttattgctgtaaattgaatatttttcattacattttccagttgattactgctggtacataaattgtcttatttgagagattggcaccagttaatttaaaaagctaagcaggaaatcattttaaaataatatatataattccatataacattttaattttaaaaacacaaaaagtgtattcatttgaaaatctctttacgtaaggtcaaggttttttgttttttttttagttctaagttgtttttcttctataaaccacaccaataatgtgggtttatgattttcactatgtgcagggtgaggacagaaaaatgcaaaggagtctgaggcctagagacacaatccttctactttccgacctgggtgggttcgcccctccttgggcaacctggtagtcccctgctcccaggaggtcaccatattgatgcagaacttagtgtggacacctaatcagcatagcgcacagcccagaactcctgggctccagtgatcttcccacctcagcctacagagtagctgggactacaggcatgtgtcactgcacctagcaatcctttctagtttcttacgttgccccctcatatcttttctacatctaagtctacaatattttctgcaacttgcctctgagtcatttcaaagcaccgaacttggtttgactaaaacaacccttttttgcacttccattttataacattacaataatatgaaaaatcagcaaatataaatcagggagtaaacaatgcttaaacttttaatacacacacaatttcactactgggagcaaaagaattcaggtatatcagagaatagctttatagccacaagcatgcagcttccaggagcatcctgagagaccaatcctttttaacttctacccctcagtaataggtaaaagatacaagtcaataagtgtttactttaactgaagagtacttggatttctgataataatctatgctggaaggtgttaaatttactattcacagaaaacccttgttctaattatttgaaagcagcagagatatttcctgcttttgtataaaacttggcacattactatgtacaaatgcaaactttttaaataaataaagatgaagctaaaaatgaaggatggtcatcatacgattttaatctacagaaggatgaaaatgtctaaaatctcttaatcttaaatttctatcataatgttagaatttagtgttttaaaaagtctgcagagcttactcatttaaagacaaagttctttgcttaatatttacctaagctatggaccaagtttcctattttatgtctgatatggtttcaatgtttgtcccttccaaatctcgtgttgaaatgtgatccccaatgctggaggtgaggtttggtagaagatgactcgtgttgaaatgtgctccccaatgctggaggtgaggtttggtagaagatgactcgtgttgaaatgtgctccccaatgctggaggtgaggtttggtagaagatgactcgtgttgaaatgtgctccccaatgctggaggtgaggtttggtagaagatgactcgtgttgaaatgtgctccccaatgctggaggtgaggtttggtagaagatgactcgtgttgaaatgtgctccccaatgctggaggtgaggtttggtagaagatgactcgtgttgaaatgtgctccccaatgctggaggtgaggtttggtagaagatgactcgtgttgaaatgtgctccccaatgctggaggtgaggtttggtagaagatgactcgtgttgaaatgtgctccccaatgctggaggtgaggtttggtagaagatgactcgtgttgaaatgtgctccccagtgctggaggtgaggtttggtagaagatgactcgtgttgaagtgtgctccccagtgctggaggtgaggtttggtagaagatgactcgtgttgaagtgtgctccccagtgctggaggtgaggtttggtagaagatgactcgtgttgaagtgtgctccccagtgctggaggtgaggtttggtagaagatgactcgtgttgaagtgtgctccccagtgctggaggtgaggtttggtagaagatgactcgtgttgaagtgtgctccccaatgctggaggtgaggtttggtagaagatgactcgtgttgaagtgtgctccccaatgctggaggtgaggtttggtagaagatgactcgtgttgaagtgtgctccccagtgctggaggagaggtttggtagaagatgactcgtgttgaagtgtgctccccaatgctggaggtgaggtttggtagaagatgactcgtgttgaagtgtgctccccaatgctggaggtgaggtttggtagaagatgactcgtgttgaagtgtgctccccaatgctggaggtgaggtttggtagaagatgactcgtgttgaagtgtgctccccaatgctggaggtgaggtttggtagaagatgactcgtgttgaagtgtgctccccaatgctggaggtgaggtttggtagaagatgactcgtgttgaagtgtgctccccaatgctggaggtgaggtttggtagaagatgactcgtgttgaagtgtgctccccaatgctggaggtgaggtttggtagaagatgactcgtgttgaagtgtgctccccaatgctggaggtgaggtttggtagatgactcgtgttgaagtgtgctccccaatgctggaggtgaggtttggtagaagatgactacatcaggggggtggatccctcatgaatggtttagcaccacccccttggtgataaccgagctctcgctcagttagttcacaagagatctgcttgtttaaaaagggcatgggacctcctccttcctcttgctcctattgtcaccacgtgacatgcctgtttcccctccgacttctgccattaatataaacttcctcaggactcaccagaagctgaggagaagctgatgccatgcttcctgtacagcctgaagaaccgtgagccaactaaaccctactcttttctttacaaattacccagtctcaggtatttctttacagcaatgcaagaacgaactagcacaacatcagtaagaaaaaaagggtgaaagctacctgttactacgagaacatttgactagaagtcaagaaactaggattcgagttcctgctccagcaataatcagctatggttttagtttcctaagttgtacttgagtgactggaaggagagctaaactatataccaaagaagatgaatggctagttgtaacaggggtaaggtggacttttattctgaatttctaggatccagtgctagctccaacattagaggatattaagactaatgcaatatgcaatgtgttaaccaccaagcaaactaacttagaaatatatgtggtttttataagcaaagcctatgtctatttgatttaaattggctgtacattagcagtgctaaaaaaggcataccaaatgcatcacatgatcacttctttatctgacagagcacaggcatcctatctggtcaagaaaacaaaacaaatcttattgttccatgatttcccacaacataacctttatttctataaagttaagatattataggtgatgtcatctataatagtatctttttagaggtttacattcagaatatgttttcatttcattttattctgaaaactcttcataaggtcaaaagggcatgtcatatccatcttaaagttcagggcagagtttgcccaaggtaaggtcaaaatttagaaatcaaggattctggatctctaggtcacagtgctttctattatcctttatgcatgcactcactaagttgtattctttcattatacaaacatgtataaggaactgggttgggtacttcttgtgaggacccagtttttagttttgacttcgtcattctccaccaataatcactttgtaatcctaagcaagtcacaacttctctgaattttagtttcttggtctgtaaaattgaaacaataatatatgttctttcttgtcattgaaaattagtggggagactgaattagatagaaagctaagagctgaaaagaattctataggtctaatttaatactctccttttacaaatatacaatagagaagctaaattatttgctcaaggtcatgtcattttttttttcctttaagagttgaggactctctatattgcccaggctaaactggaattcctgggctcaagagatcctcctacctctgcctcctgagtaggtggggctcaggagacgcacattaatttttagtaacttggattagaatccaagtcacttaacacctagtgaaattggtcctttcattacactttgcagcgtctaaactaggtgaaaaatttttgaaagctacaacccacctagccttacccaactaaggttttatgaccaaattcagcctttatgccacaaggcatatattgtatgtgaagaattaacatcttccaggaattcagagtaggactaggttacatagcatccttgagagaatggagaaaatagtcactcaaatagttttctgtgtttttggatgagaaaggcagcatgactatattaatgggacattattaccaggaatggctctagccttcaagacctgaaatttaaaatttgtattcaactgtaaaggctagccttcattacacatcatctcctcaagaagctctttactaaattcgtagattctcatgtctatgtgttactaatagctgttgttatatcttgtattgcaattatttctttgttttgtattcttttatttttctttttttttgagacagagtcttgctctgtcacccaggctggagtgcagtggcatgatctccgtcactgcaacctctgcttcccaggttcaagtgattctcctgccttagccttctgagtagctgggattacaggtgtgagccaccacacctggataacattttgtatttttagtagagacagagtttcaccatgttggccaggctggtttcaaactcctgacctcaagaggtctgcccgccttggcctcccaaagtgctaggattacatgcatgagccaccacacatggccttgtttttcattcttaattgaattgcacgtatatgtcttaaaaggcaaactaagtactgtggaagtacagaaaaggaactgatgagattaaggagactccatagaaaagacgtgatatgattctaagagttggagatgaagaagcaacaagagagttcggaaaaaaagataaggaagaagggacaactcaagtgtatgcacagataaatatgcttattcaagttttaaatcttaccacaataacattttcactcctcttgatttcctttccctacttgtttgaacctgcttcaaccatcattcccatcaacttttactttgctctaatcatcattcatcaccctttaaatctttcctcttctactcccatccaactctataaaagttggttcaactctttgaacttgggtagatgactcacattccggtaaaaagtaacataaagtattaagtgtttacaataatgaaaggaaggtaaatcacttcgaaatgataccgatagacttatggtaatactagtctagaatttaagattttttctccttaggctaaaagatatttttatagaaaataaatatattctgtcaacataaattacaaatgttcatttctcaaattgaaaaaggtttatttgtttctatacctaaatagaaaattttatcataatgagcatcaaaagaatcccaaatgagaaaactgctttttgcataagtgtaaattaagagatggaagtcacatttcaccatggcaaacatttgctgcatgcaaaatgactgaagtaagtttagaataattctttttaaattttaaaatatcaatgtcccatacttttttctttctttcttcaagagacagtgtctcgttatgttgcccaggctggagtgctgtggctattcataggtgtcatcaaagagcaatgaagccccaaactcctatggccttaagtgatcctcttgtctcagcctctagagtagcttcgactacaggagtgtaccactatgcctggctcacactttcttttgaacttaaatcaatttatttctgttttaagtctcacatactctctcatttgatttttttcttttttctttttgcatatcccctgttctcaatgttatgtacaatttcaattatggccttcgaaacttttaatgagagaattctttaaagttttaatcgattcctctttgatcaattttatagtaaaagaacacggtgtcttattgtggaaaaaaataggtcttttaaagaagaatgctattgaaacataaagggaagccttttacagaatatttaatcttatacatgtttcttgtgcaacctgtttcaaaaatcagaaatccttaaacataaagagtgtaaggtgactccttgatctattatacctgagagtgaaaaaacccaacctgcggaggttgcagtgagccgagatcgcgccactgcactccagcctggatgacagagcaagactccgtctcaaaaacacaaaaacaaaaacaaaaacaaaaacccaacccagcagcttaagcagtgaaagtattcaaagaatcagaatcagatgtcattaaattttaaaaaccgatgcattacataatgaaattcactatatttcattctttttatttatttacttatttatttgagaacaggcctctctctgtcactcaggatggagtaaaatggtacaatcatagctcaatgcagcctcaatctcccgggcccaagtgatccacccacctcagcctccctagtaaccaggactacaggtgcccaccaccacacttggctaatttttggaaacagggtgtcactatgttgcctaggctggtcttgaaatcctggtctcaagtgatcctctcatctcagcctcccaaagtgttgggattataggtgtgaaccacagatcctggccaagattcactatattttgaattggttgtatatgtaggctatattctttcctttttgttttttttttagacaaggtcttgatctgtcaccaggctgaagtgcagtggtacaatcaaagctcactgcagtctcaacctcctaggctcaaacaatcctcccacttcagcctcccaaccagctgggaccacaggttgacatcaccacacccaggtaatttttaaattttttatggagacagggtttccctatgttgccaaagctgatacactatatttcaaatcagtctacaaggtcattatggcaacagtcctaaaaaaaggcttgtcttcaccattttttaaaagtattatactttaagtattgggatacatgtgcagaacgtgcaggtttgttacataggtatacacgtgccatggtggtttgctgcacccatcaacccatcatctatgttaagtatttctcttaatgctatccctcctctaacccccaaccccgacaggccccgatgtgtgatgttcccctccctgtgtccatgtgttctcattgttcagttcccacttatgagtgagaacatgcggtgtttggttttctgttcctgtgttagtttgctgaaagtgatggtttccagcttcatccatgtccctgcaaaggacatgaactcatccttgttcatggctgcatagtattcgatggtatatatgtgccacattttctttatcctgtctatcattgatgcgcatttgggtgggttccaagtctttgctattgtaaatactgctgcaataagcatatgtgtgcatgtgtctttatattagaattatttataatcctttgggtatatacccagtaatgggcttgctgggtcaaatggtatttctggttctagatccttgaggaatcgccacactgtcttccacaatggttgaactaatttacactcccaccaacagtgtaaaagcattcctattctccacatcctctccagcatctgttgtttcctgacgttttaataatcgccattctaacggccatgagatggtatctcattgtggttttgatttgcatttcattaatgaccgctgatgatgagcttttgttcatatgcttgttggccacataaatgtcttcttttgagaagtgtcagttcatatccttcacccactttttgatggagttgtttgcttttttcctgtaaatttgtttaagttccttgtagattctggactttagccctttgtcagatggatagatcgcaaaaattttctcccattctgtaggttgcctgttcactctgatgatagtttcttttgctgtgcagaagctctttagtttaattagatcccatttgtcaattttggcttttgttaccattgcttttggtgttttggtcaggaagtctttgcccatgcctatgtcctgaatggtattgcctaggttttcttctagggttttcatggctttaggtcttacatttaactctttaatccatcttgagttaatttttgtataaggtgtaagaaaggggtccagtttcagttttctgcacatggctagccagttttcccaacaccatttattaaacggaatcctttgtctcatctttgtcaaagatgagatggttgtagatgtgtggcattatttctgaggcctctcttctgttccattggtcaatatatctgttttggtaccaataccatgctgttttggttattgtagccttgtagtatagtttgaagtcaggtagcatgatgcctccagctttcttctttttgcttaggattgtcttggctatatgggcttttttggttccatatgaaatttaaagtagttttttctaattttataaaggaagtcaatggtagctcgatagggatagcattgaatctataaattactttgagtggtatggccattttcacaagattgattcttcctatccatgaacatggaatgttcttccatttgtttgtgtcctctttatttccttgagcagtgaagtttgtagttcttgaagatgtccttcacatcccttgtgtgttgtatgcctaggtattttattctctttgtagcatttgtgaatgggagttcactcatgatttggctctctgtttgtctattattgttgtataggaatacttgtgatttctgcacattaattttgtatcctgagactttgctgaagttgcttatcagcttaaggagattttgggctgagataatggggttttctaaatagacaatcattgtctctgcaaacagagacaatttaatttcctctcttcctacttgaatacgctttatttcttcctcttttctaactgccctgaacagaacttccaatactatgttgaataggagtggtgagagagggcatccttgtcttgtgccagttttcaaagggaatgcttccagcttttgctgattcagtatgatattggctgtgggtctgccataaatagctcttattattttgagatacattccatcaatatgaagtttattgagagtttttagcatgaagcagtgttgaatttcatcaatggccttttctgcatctattgacataatcatgtggtttttatctttggttctgtttatgtgatggattacgtttattgatttgcatatgttgaaccagccttgcatcccagggatgaagccgacttgtttgtggtggataagctttttgatgtgctatggattcagtttgccagtattttattgagggttttcacgtcgatattcatcaaggatattggccgaaattttctttttttgttgtgtctctggcaggttatggtatcaggatgattcttggcttataaaatgagttaaggaggactctcttttcttctattgcttggaatagtttcagaaggaatagtaccagctcctccttgtacctctggcagaattcagctgtgaatccatctgctcctgggatttttttggttggtacgctattaattactgcctcaatttcagaacttgttattggtctattcagggattcgacttcttcctggtttactcttgggagggtgtatgtgtccaggaatttatccatttcttctagattttctagattatttgcatagagatgtttacagtattctctgatggtagtttgtatttctgtgggatcagtggtgatatcccctttagcatttttttattgtgtctatttgattcttctctcttttcttctttattagcctggctagtggtctatctattttgttaatcttttcaaaaaaccagctcctggattcattgattttttgaagggtttttcgtgtttctctctccttcagttcttctctgaccttggttatttcttatcttctgctagcttttgaattagtttgctcttgcttctctagttcttttaattgtgatgttagggtgtcaattttacatcttttctgctttctcctgtgggcatttagtgctataaacttccctctaaacattgctttagctgtgtcccagagatttgggtatgttgtgtcttggttctcattggtttcaaagaacttctttgtttctgccttaatttcattattttcccagtattcattcaggaacaggttgttcagtttccatgcagttgtgcaggtttgagtgagtttcttaatcctgagttctaatttgattgcactgaggtctcagagactgtgttatgatttccattgttttgcatttgttgaggagtgttttactcccaatcatgtggttagttttagaataagtgtgatgtggtgctaagaagaatgtctattctgttgatttggggtggagagttctgtagatgtctattaggtctgcttggtgcagagctgagttcaagtcctgaatatccttgttaattttctgtctcattgatctgtcaaatattgacagtggggtgttaaagtctcccactattattgtgtgggagtctaagtctctttgtaggtctccaaggacttgctttatgaatctgggtgctcctgtattgggtgcatacatacttaggatagttagctcttcttgttgcattgatccctttaccattatgtaatgcccttcttgtcttttttgatcttcgttggtttaaagtctgttttatcagagactaggattgcaacccctgcttttttttttttttgctttccatttgcttggtaaatcttcctccattcccttatttagagcacgtgtctttgcatgtgagatgagtctcctgaatacagcacactgatgggtcttgactctttatccaacttgccagtctgtgtcttttaattgtggcacttagcccgtttacttttaaggttaatattgttatatgtgaatctgatcctgtcattatgatgctagccagttagtttgcccattagttgatgcccattagtttcttcatagtgtcaatggtctttacaatttggtatgtttttgcagtggctgggaccaatttttcctttccatatttagtgcttccttcaggagctcttgtaatgcaggcctggtggtgacaaaatctctcaacatttgcttatctgtgaaggattttatttctcattcacttatgaagcttagtttggctggatacaaaattctgggttgaaaattcctttctttaagaatgttgaatattggcccccactcttttctggcctgtagggtttctgcagagagatccactattagtctgatgggcttccctttgtaggtaacccgacctttctctctggctgcttttaacattttttccttcatttcaaccttggtgaatctgacgattatgtgtcttggggttgctcttcttgaggagtatctttgtggtgttctctgtatttcctgaattggaatgttggcctgtcgtgctaggttggggaaattctcctggataatatcctgaagagtgttttccaacttggttcaattctccctgtcactttcaggtacagggacaatcaaacataggtttggtcttttcacatagtcccctatttcttggaggctttgttcgtttcttttcattctttttcctctaatcttgtcttcacactttatttcataaaggtgatcttcaatctctgatatcctttcttctgctttggctgttgatacttgtgtatgcttcacgaagttcttgtgctgtgtttttcagctccatcaggtcatttatgttcttctctaaactgcttattttaggtagcaattcctctaaccttttttcaaggtttttagcttccttgcattgggttagaacatggtcctttggcttggaggagtttattattctctgtccagttttgttcccttgctggcgaggagttgtgattctttggaagagaaaaggcattctggtttttggaattgtcagcctttttgcgctggtttttcctcatcttcatggatttatctacctttggtcttcgatgttggtgaccttcaaatggggtttctgtgtggaagtcctttttgttgatattgatgctattcatttctgtttgttagttctccttctaacagtcaggcccctctgctgcaggtctgctggaatttgctggaggtccactccagaccctgtttgtctggatatcaccagcagaggttgcagaacaacaaagattgctgcctgttccttcctctggaagctttgtcccagaggggcacccaccagacggcagctggagctctcctgtgtgagttgtctgtcgattcctgctgggaggtgtttcccagtcaggagacatgggggtcagagacccacttgaggaggcagtctgtcccttagcagagctcgagcaatgtcctgggagatctgctgctctcttcagagccagcaggcaggaacgtttaagtctgctgaagctgcaccaatagccacccatagcacccttcccccaggtgctctgtcccagggagatggcagttttatctataagcccctgactggggctgctgcctttttttcagagatgccctgcccagagaggaggactctagagaagcagttgggctacagtgggctccacccagttcaaacttcccggtggctttgcttacactgtgaggtgaaaaccacctactcaagcctcagtaatggcagaagcccctcctcccaccaagctccagcatcccaggtcgacttcagactcctgtgctggcagtaagagtttcaagccagtggatcttagcttgctgggctctgtgggggtgggatccactgagctagaccacttggctccctggcttcagcccctgttccaggggagttaacagttctgtctcactggtgtttcaggtgccactggagtacgaaaaagaaaaaatcctgcagctagctcggtgtctgcccaaacggctgcccagttttgtgcttgaaacccagggcctgggtggtgtaggcacccgagggaattgcctggtctaagggttgtgaagatcacggaaaaggcatagagtctgggccggaatgcatcgttcctcgtggcacattccctcatggcttcccttagctaggggaggaagttccctggccccttgcacttcccgtgtaaggcgatgccccaccctgctttggctcgccttccatgggctgcaccccctgtctgaccagtctcaatgagatgagctgggtacctcagttggaaatagagaaatcacccaccttctgcgttgatttcgctgggagctgcagactccagctgttcctgtgttcaccattttaacatctatctggctctgtttaattttcgctccccccaaaaaatccatataagaaataagttgattctcagagttaagttccagaagtgtagagatctcacattaaaataacagtttgcctgagtttatcaaatacaaaagtatctattaaatataattgattatatggattcattacctccctttgcaagtagttactctgtatttttccaattctaacctaagaatttttcaaagtttctaaattcccctttggttccttaattagaggccaaatttaatatctggaaaaaatgcagtattcaattatcttcttcctgttcaaacagtccctctgctatggctcttcctcagtagaaacaactggcaacaaaattcaagtttatgattcattcatcagcaaacatgtgagaatcatctacaaagaaccaagaattgtggtaagaattatacaaacatttactatgatactgataataatgaaaagcctaattcaacaaatagtgatctatccatttttaagccccagtaactcaaacattaaaaaactataaatgaacaggccgggcacggtggctcacacatggaatcccagcacttggggaggctgaagtgggtggatgacttgaggtcaggagttcaagaccagcctggccacatggtaaaaccctatctctactaaaaatacaaaaattagctgggtgtggtggcgggtgcccataatcccagctactcgggaggctgaggtgggaaaattgctggaacctgggaggcagaggttgcagtaagacaagatcgcaccactgcactccagcctgggcggcagagtgagaaaaaaaaaagaaagaaagaaaaagaaaaagaaaagaaaagaaaaaactatagatgaatgacttaagtgaataacaagtcaagtgagtaatgacaatatgtagaaaaatattccaagtagaattaataaattttaattatttgaatgagaaaatgccgccatattcaaaatgaaagtaaaagtaggatgagatcagcatatacaactgcatatatttcattaattaaagatgactaaagaggagactatcaatttgaaagaagattactaagattttgtttttttaaaacatactgaaccaaataaaaaaaaaataacagtaagacataactactaacagaaaattttttccaatgagaatacaagcttattaaccactccttttttcattaatgctcactcagcttctaccagccttctaataagaacacacacatacatcttttctataccaaatgtgatataaaagatattcaacccttcaaaattttaagtattggttataagtaatactcatctttttttgtcatttgataatagatgaattttctagtccagacagtagaaatagattatagttcatcaacaaatgacaaaaattgctgagtgtgaaagaatggtgcaaaacaacacaaaacattttactgtaataagttatttttaagctagctaagtaatttatgagaaaaaaataaattgttcttaaattacttaatacccaagaggaagagtttcagcttaaactagaccaaattaaaaaaataataacagtaaggcataactagatctagccttttctgaagaaaatgatatttaaaacaagaaaaacatgtgccatagaggttgtgatatcctcaatctttgaggaaataacacctacatttaagtaccctcaccttacacacactttcttcttctgattttggagtctttaaaatataagtatactttttttttttttttttgagatagtctcgctgtcgcccaggctggagtgcagtggcttgatcttggttcactgcaacatctgcctcccaggttcaagcgattctcctgcctcagtctcctgggtagctgggactacaggcacgcactattgccctaggctagttttgtatttttggtagagatggggtttcgccattttggccaggctgctctcaaactcctgatctcaggtgatccacctgcctcggccttccaaagtgctgggattataggcgtgagccactgcacctggcccaaaatatgagtatactttaaatataaacatataaaccattcatagaaacttttagatggagacaaaatctgaaatatatttcaatatatagttaatgtcatattaaggggttaagggaagagctgggaggaagaaggaagataagactatgaacctaaaattttgccaagtagtaggatttttattctctaaaccttatttcaatcaatttaaggttaaaaaaattttgcttaaaaagatgcaatttcattttgtgcttagaaagtaaaattaacaccacaccaaagataaacattcttgagtttgttcttttggagaaatgagtaatttaaaaatttaaacagctctaaaatattaatacaactgcataggaaagaggaaagaatgttagaaaattgcttatcaaaaactaatgagacccaggataagagctactcataatgataacaattaaatattgagtatttttcagaaaccaagagtcaaatgcttgttataccttaaaggttaaaggcccctgtttcatagtcattaaacagttctttgaaatgctatgttaagatatcactaacaatttcaatttataaatacacacccatacacattttcttttctaaattgtcatatcccaaacacgaaaacaatcgaataagagaacaggctgaatagtgatttttttctttcaattattactactgaaacaaatcaaaacaactctgagaggttgccagcaccgcagaaggcatttccacataaaaagagttaatgagcagaccacgcagttcaacagccagtgaccatttgcaagcctcctaggtatattcccagcagacacattatcagattaaaggaagtgcaaacaaactgggctgaaagtttctttgtccaaacccagcctcttcttcctgtgatgtcatattacaaatctaggaagcctttctttttcacttcagagaaagcgacctcaagatacaactggcaactgaggaaaaggcctcaattcaacaagagctaacaagcttgggagtttatttcggaatctttaaaagactcttctgcttacccacaatctgggatccactgcaggaaaacaaaaaaggaaaacttcatttaaaagaagcaagaagtaaaatgggacaaattgggaatgtttaagtctctgaaactctgcactgaaaagaaaataagattgataacttaagcttaacattctgaggcataaagaaacattaactttggagtattcatcttgactactgaaatacaagtttagaagacaagtggtttcattctggtcacagatcacagcttttctttaaatttataatcctatgggttggactcgttgactgtattttttaaaggttgctcgtcagttaactgagccttggaattcatggattttctaaagactaacaaatgaaaatattttcctgttgaagaacccagcggaaattttacagcaacaaatttcatgtttcttttgggtatttctgagaaaaaggaaatatttataaaaccatccaaagatccagataatttgcaaataaattggaggttatagaggttataatctgaatcccaaaggagactgcagctgatgaaagtgcttccaaactgaaaattggacgtgcctttacgatggtaagcgttaacagctcccactgcttctataatgactcctttaagtacactttgtatgggtgcatgttcagcatggtgtttgtgcttgggttaatatccaattgtgttgccatatacattttcatctgcgtcctcaaagtccgaaatgaaactacaacttacatgattaacttggcaatgtcagacttgctttttgtttttactttacccttcaggattttttacttcacaacacggaattggccatttggagatttactttgtaagatttctgtgatgctgttttataccaacatgtacggaagcattctgttcttaacctgtattagtgtagatcgatttctggcaattgtctacccatttaagtcaaagactctaagaaccaaaagaaatgcaaagattgtttgcactggcgtgtggttaactgtgatcggaggaagtgcacccgccgtttttgttcagtctacccactctcagggtaacaatgcctcagaagcctgctttgaaaattttccagaagccacatggaaaacatatctctcaaggattgtaattttcatcgaaatagtgggattttttattcctctaattttaaatgtaacttgttctagtatggtgctaaaaactttaaccaaacctgttacattaagtagaagcaaaataaacaaaactaaggttttaaaaatgatttttgtacatttgatcatattctgtttctgttttgttccttacaatatcaatcttattttatattctcttgtgagaacacaaacatttgttaattgctcagtagtggcagcagtaaggacaatgtacccaatcactctctgtattgctgtttccaactgttgttttgaccctatagtttactactttacatcggacacaattcagaattcaataaaaatgaaaaactggtctgtcaggagaagtgacttcagattctctgaagttcatggtgcagagaattttattcagcataacctacagaccttaaaaagtaagatatttgacaatgaatctgctgcctgaaataaaaccattaggactcactgggacagaactttcaagttccttcaactgtgaaaagtgtctttttggacaaactatttttccacctccaaaagaaattaacacatggacattttaaagtctttagtataaagaaaatttgtattcaatgtgttaagcattaacatgtattttatttgtgtatccactccatctgatttttctgagccattttgatttgttccttcattaaaaaaaatctcttaaagttatttagtgtctaaaagtgactgacttaaattatgtggtgccaatctgtaatgtctttgaattcctttttatattaaatgatttaatttactaaattattttatactaatttatgtttatgtaatattttattcaacataccatttttattttgaattaaaactactaatcatatttcttaaactatgattaacaaatgagaaagaagagtaatttgaaataaatgttttgggagtattttaaaatatatgtataactaaaaacgtagtcttctgtagaaatgatgacatattaacattgttggaagatcttgagcagtaacacattgataacattttgggagtttggtctgtgtaggcaatttgtagaaagcagatgctatctatatggtatgctttgaagttactattttgattttctgtatataatgcacccaatttcaaaatgatatatgccacaaaaattgagagggagaaaactaataaaatgtcattttgctaagtttttacttagcaaaaaaataaaatactaccagaggtacattttaaaggtgcacttacatcacagtcaagaacttatgttttaagtatgttaggtcggagaaacatcagagatagtgaaatatagtacttggcatttagaaagtaatatactgtcacgtgttgcttatgatgcttgcttaggtaattatgtcgtgcaaacatcacagtgtgtacttacacaactctagaaggtatacactattacacacctaggcttatatggtacaccctactgcttctaggctacaaacctatacagcatgctactgcaaagaatactgtaggcaactgtaaaataatggtacttgtgtatctaaatacatctcaacacagaaaaggtacagtaaaaatatagtatgataatcttatgagaccaccatcgtttatgcggtcattgaccaaaatgctattacgtgatgcatgactgtaaatattttcttttccttcactcttctggccattttaagccaaatattgggaagttcaaaacattatttcaagtaggcaagatgttattgtacgtcaaaatgattaattaaggacacagttccttacattataaagtaacaaaactacaaggccaaataactaaacaaaactatattttcatttcactaaacataaaataggtctggctctgaggtatactttagaaaaaaagtaccaagtacactaaaacttttttattatccaacatattccttttttaaaaaaattcaggccgggcacggtggttcacacctgtaatcctagcactttgggtggctgaggcgggtggatcataaggtcaagagatcaagaccctcctggccaacatggtgaaaccccgtctctactaaaaatacaaaaattagctgggtgtggtggcacatgcctgtagtcccagctactcgggaggcagaggcaggagaatcgcttgaacccaggagtcagaggttgcagtgagccaagatctcgccactgcactccagccgggcgacagagcgagactccatctcaaaaaaaaaaaaaaaaaaaaaaaaaaaaatcaagcagttctccaaagttaactaaaaaagaatgccttctatttaaggaaaaggacatgtaattaaattcagcatccaacctatctgatttctactgtcttaatctttcaagtcctcaatacaacttggacaaaaaactcttttaagacataaatttgatttttgctgttctctgggtttgaggtgtaatgatttcagaaaaatcacaatcatttgctagacaggtaaacccattttcaataaaataacagtggggggttttctttagggatccatggtttcctttagataaacctaaagcaaaatacatctttaatgccttcagcccaggagttccaagttagagtgagatatgatcacaccactgtactccagcatggacaacagagcaagatcctatctcaaaaaaaaaaaaaaaagagaaaagaaaaaaaacccaaaaaactagtgaagatactaaccatggtcctttatatcccaagagaaatatatacataatataaatgtgttttcttccattgacctgaaattcctttatttgatattacacttcagtaaataaaaatacactctttcttaaacatactgagttgagaagcaactaccaatctactgatctgggggaaaggggtggagaattgtataactttgagatttctcagaactctcctcagcttaaagatctcaacttaaggcaagatcataaaacatgaatataactttaaaatgcaaataaaacagtcattaaatagttgttattactatgttcataaagaaactttttggtgtctcttgtcaacaggaagataaatgaatcaaaagttttgtaagattcttcataaagcaatacataacagataacaaacatggttttctcatctagaactatggaaaaaaagtgtaccagaacaaaatttattttcctttgctagtgttgtactttgtggtaagtcatatattctgagggttttctcttcccttccccctttattcagaaaaacctatattaatattagaactctgatgattttacttttgattacctgaaaatgatagcactaagcccccctataaaaactgtgcccactgttattaacattttcataaaacggtagatgatttgactaatcttccttcccacattaactcccttcaaaggaacacagtaagctgagaaaatttttcaggtgtggaaaaatggctttccagcatcctaataatttctgaacttagaaatcatctttactgagaaaatatcaagtacctagtttattttaaaaagcataaaaatatatgtattatatatattatattcacagaaaattaaactgaagacactacttaaggagctatcaatgaaccttaatattctacattcaaaatgctgaaaagtaaattggaaatagaaatcttaattatagatattggtatttaaagaaattagtcactaaattgagaaatataaaatagaaaatggagcaaacttcatattcccatccgagaaacatttggttcatgaatggtacatagttatcaagaatctgaagcaattgctttttggtcctacaattttggacacctgatgaaccaagtattttgtcctttgtcaatatattaaattactatttccaagaagaagcatcactaccttccagcacctaaacttttttcgtgcctaaatgccagtccaactctggatgtcacaaatgttcttagttgtgaataaatttttgtgtagaaacaattttataaacagtgcttaggcagggatgaaatcttaaagactccaaaaacaaactttttaaaaagctttttggggctttcctgaaaactgaattacccatttataacatggcttctaagaaataaattacaaattaaaaaggactaatgaacaaacttaagaatgtagaacacacattaatatctaaaccgaccagagtacttaatgatcaacagcattacttatttagcaatattttccagagatcagcatgtacataactcctaaaatctctaattctcaaatttctattttctctttatcatttttacttgatgtcagacagttttataaaagtacaaagaatgtcaattaaacaaggcaacagatcagataataaatgaacaggagattaacaccaggcaaacttctctctcttttttattaccttaaaatgatagtgttaagcctctcctaccttcctgtcttcctgctcccaaaagatttactacaataacctcttaaaagggtagaaaattacctctttcattggaaaagcagtgttaaaaacagaattcaaaagatagagccccagaaggggtataattcaaaaatttaataatcagttttctcaaaacttggtttactcataatagatttcaagtgatttttaaaaataaataattgtaagaaacaattatgtgttgtatacttacagcagcgttacagttaatagccatggggtaaatgtgctaggttccattatcgtcctatcaaaatggcttctggaacattcacaacttagaacagaaagggcctgatggtcatctgatgtaactacaccttaggctggggaaactgaggaactgtaagactaaacaacagacacaatgtcacataacaaattaatgtagcgccagggtaagaaccctgtttgtttgtttgtttgttttaatagaaagatgaggtcttgctatattgcccaggctggacttgaatacctgggctcaagcaatcttcccacctcagcctctcaagcagctgggactacaggtgcaggccactgcacctggctgaacccagattctttgtttttacttgtctagttacttaatggtggcaaggcaagcaccacaggcaaaggccctgtgggagagaatttggatactgaaagaattaaaacattcaaagtggctggagaaatagggctaacatcttacacgtacttatatgccatgttaagaccacgttaagtgctgagaagctgtggaaagtcctcaagaatttcaaggtaggggagacatgatcaaataaagattcgtctgatacagggtagagatgcatttgtcttcagcaagaaaagaaaaataatcacaacaagaactatatttatacaatttaaagggctcttcttatcctttttttctgatttgtcctttttcctttattaaaatgggagaaattcttttttaaatgatggtgataatagatgagaagaatattttaatgtcattacttggcaaaatttggacagtggccgtcatggagaaattgctaccttcatacatttctggtgggaatgaaaaatagtacaaaccttatggatgggatttggcaatatctaacacacacatacacacacacattaaccctttgacccagcattcttacttctaggtattgatcctcaagacacaatttcaattacataacacacacatacatacatacatacacacacacacacagagttatttattgtggtaatagttgaaattgcaaaatactggaaaccacctagatgtccaatcatagaaaactagttgaacagactgtagtatatatacaaaatacagtactatgcagctgtaataatgagaaatatctctataaattgatatggaatgacttcaagaaggtagtgttaaatgaaaaaaagcataaaagagcacacatagtatgccaccttttgtataagaaaaaggcaaaataaaacgtgcatacctgcttatttttataaaaagaaacacaggaaagataaaccaaaaaacaagggtggggttggaaatgggatagaaggaatatcaaagaatatgacatttttcagattatacctttttgtatagttacgactttgggaaacatgttaatgctttatattgggtattgacaaactttcttctcaaggagtagatagtaaatattttcggtttgcaggctctactttctggctgcaacttctcagctctgtactgcagtgcaaaagcagccacagacaatatataaatgaataaagcggctgtgttaaaacaaaatttatggtctgtgggctgtgcatgccatctcctgttatatgcagtcaaaactatgggccaacaaggatgggagaaaaacaccctagaacttcatttattttagtgtctggcacataattggtctcaataattagaatgaatcttaaaattcttcaaaagcccgaggaaaaaaggcaaattttcttttgttaatacacaaattcattattactcttattacttgatttatcaactttaaactgtatttgttaaattcccaccatttagatgaggttatacaattgttaaaagaaaccattttgttgttgaaggcattctttatgaaactatctgatttctcatgtggaacaaacattttctgggcttgttgcatcgtaggattttttgcatttttctctctgctctggtgtgacagtttttttattaggtcttatgatttcccttttgtggattcttttttcatttttttaaagcatattccctagtaatttcatttcaaaagggcagtcaaaagataaacattctgagtccttgcatttccaaatttcattttgctgtcatatttgacaaattttaggttataaaatatccagtattcctaatgagaacttctgtgctgatctggatctcattcccctaaaatagcttactttttctctctggaagcttttataattttctcattatctttagaattctgaattttttgctgggtggggtggctcacacctataattccagcactttgggaggccgaggcaggcggatcacgatgtcaggagtttaagatcaggctaaccaacatggtgaaaacccgtctctactaaaaatacaaaaattatctgggcgcgttgtctcgtgcctgtaatcccagctactcaggaggctaaggcaggagaatcgtttgaacctaggaggcagcggttgcagtgagcggagatcacaccattgcactccagcctgggcgacagagcgagactgtcattaaaaaaaaacaaaaagtatccacattcattcatcatgcttggcactatgggccctttccatctgaagccccctggttttcattagttttggaattttttttttctgttcttttttattattttctctcctccatttcctctggtctttcttatggtaatgaataaatattgaactgaggtacctgaaaataccaaagtaaggaactacataacctaccagtacaatactttgttgtattttcctcctaggaagaactgcctttcctatttctttttctttaggtctgttacagaagtctcggtttacttcaatttctgttctgcttctctctttggcaccatcaggaaaccctagccccgtgtctgtaagtgtacacaaaatttgaaggtgggcgcgggcttgtatctgtacagtttatgcactgcacaacagcatggggcttcagcctaaactctgcataccaagcttagggttgctgtgtccggacggcatctttttataatccattagtaaagaggaaggtgcttttttttcgtttttctttgagacagtgtctcattctgtcacccagactggaatgcagtagtgcagtcacggctccctgcagcctcaacttcccaggctcaagcaatcctccctcctcagcctcccaagtagctgggactacagaggtgcattttttttattctcataggctggcatggccttagatgggggactggtccaggtgtttcatgttcttaaaatgttgctcacaaagtgtagtacccagaccagcagcatcagtatcacctggaaacatatcagaaatacaaattcttggaccctacactggaaactttgtgactgggcccagcaatctgtaatatgtgttttaacaagccctcctggtaattttgatgcatgctcaagtttgaggaccattgccaaacagcactttagaaaaccttcctgattattgccccactctctgtatctgctactttgagcttgggggctctctaagactcccacttccaccagtcccctttcctgggggtgttgtgtgctgtggttttctctactttattgtatccacaatacactcatcatttattttttatactaaaaaaatgaatcaactcctccacttccctccacagtttttctgcttcacagtctgagtactgctgggtttcactcccctgtgatatgtgtcttttttgtcacttctgtagggtttgcggggagaaaggaggtagaagtgtgtgttcagtctgctcttccgatacactgagttccattatctcattataaatgagaaatagtttcatttttaaaagcaattgcacaatccaagttacacaaaaagtcatactacttaagccctttgactgctgctaaaaaatagtgtttttacatcaaaacacaggagatctttaaattactaacaacataaccttcaatttaattttcttttaaaactgataattttccaactaattttaccaattattgttagctcatattttaataggacataaaacctatgaatcataggttttatatataaaaaaggtaaaaaggttttatatatagtactttacgaacagaagcaatttatttaaataaaaatgaatactacttaagacttagcactaaaaaattataccatttgatttatatgtcatataggtaatttttgctaatggccaaaattattggacaaaaattactatactttatgttgtggtctcataagacttcctgagatgacaaagactgaaacacacatgattcaatataatcttagctacctaaaacgaggggaaaaaatggacctgcatttaaagaaaaataaagcaaaggacacatataaatagtttctgtaggccaagagtggcagctcatgactaatcccagcactttgggaagccaaagcaataggatcacttgagtctaggagtttgagaccagcctgggcaacagcaagaccccgtctctacaaagaataaaaaaaattagctgggtgtgttggctcacacctgtagtcacatctactaaggaggctgaggtgggaggatcacttgagcccaagagttcaaggcttcagtgagctatgattgtgtcattgcactccagcctgggaaaacagagtgagactcatctgtttaaaaaaaaaaaaaggttttctacaagggatttctttaccactctccatcccttccccaggccatttgttcttcattggaactgaaatgtgcaaacgtttattttcagaagaccccgttaaaatatgtgggttcaactaaatcagatgccaatctaaaagtgtacactattaaaggtgtctgatattcctatgaaaaagataatgcaaaaaaattatattttcaagaacagatagtaagttcagtattggattagtgtatcctatgttcatttttgtttatgactcatgtaaaagacaagtaatttcacttctccacctttttcatcttaatgtttaaaagaaaaaaactaaatgataaaacctaatataaaaactatcattacttaatatgtaaatttaaaaacttttagacaattaaattatcttaaaataagaaaagggcataatgataaaatgaccagacttaaaagatagcaagacagatttatgttagtctttgaagaattcttaaggaatataatcaaaatcttaaagataaatttgttgttatatttagtggagataagaaccactgaaacttagcaaagtaagaaaaggcttttttgaaaaggctaagaaacaaatccagctgtttcctattctacgtttccttatcatgttctaaatctagcacttacaggaagacaccaaaaatacctttgatatttggccatttctgagaaaagctgaaaatatgaagacccaattaagtaaattagtaacaacaccaaggaccacaaatgtgtatgttgaaacagactgggtcgtgacagttcagagtttttaaaacatgctataaatagttggaaaaatgaaatgccaaaaagttgttctattttataattaaaggtaagtaagcttagatgattgaagcataattgccttagagtagttctaaaattttagtaaactcaataattaataacagccttttattttgctgcagaaattcagaagccacactaattaggatcgatttctcctatttctcttctttgtttcttgcatatccagaattctagagcccttcctcacaattccagttaagatttgactgtaagtttacaaactgaaaattctaaaactaaattcaagtaattatctaacatcatgactctttataaaattctctgaataagagtatatgtgcttccatcccacaggttaggtacagagagtatgtcctagctattcttctaccattgctacttcccttcttgtttgtacttgaatagtgaactaacaccaccctcagggtaattactgacatgattcataactaaagcaacataacaaattccaactgtaatataacagtgaacactgcccatacttaacaatgctggagtcccatgatgccttttccccctgaactttttccattttgagaaggtgatgggggaggaggggtgcctcaagagaagagaaaaattctctgtacttatagtaagccaaga

SEQ ID NO: 23 - DNA, 479349 bp, Homo sapiens
gggcttcgaaagtttcattgaaggtggagaagcgcgcgccgccggggagccccggctgcgccgcgagggcgaggctgcaaggcggcaggcggtggtcgcgctgggcgacgggacggcgctggtttttctcttgagttttaaattgaggcggtggaggagggagtgggagacccactcacccgatatgcgctctggtctccatttctccccacgctcgcgccgttccttcgagtgagggagggactcgcagcgccgcccgcgcaccggacccacaaggcgagccccgtggtggcggggatggttctgcgcgcctggcagctcccaccccggtctctccggcccgaagctggggggcgcaggggctgagctgcgctgcctctcggggatccgccgcgggccgcctgggggctggagggcgagacccggagcccgccgggcagctccgagagccggggccgaggccagagcgcggcagcctgcgtgggcagcggagacgaggccgggcaaaggagacgcggtggcttcagaggggcttccaagtagaaaactccccggccgcccccaaacgacgccccgggagccaggcgggagcacagcacgcccttcttgccccctttgctcgccgcgccgcctcccaggaccctcccaaagcgtccctctccaaggccccggcatcagctacccctgaagaagccgccgccgctgccggatccaggattcacactaaatgggccggccgcagggggccgggcgccgggctaggtggccgccaagagcctggtgaggggctacccagagcccggtgggcgaggggcggccaagagccccgggagcgtgccctcggggcggagagcgtcgcggcccgcgccgaggcgatgctcgggtggctgcgagctgccggcggcgagaggccatagacgggcatgggccttgcgtcccaccacccctagggaccctcgagcctcgcccctctgctccgactcgccggaccgacgcgatggcctcagaagtggtgtgcgggctcatcttcaggctgctgctgcccatctgcctggcagtaggtgagtctggtccgctttccgagggcacttgaggaggacgaggggggcgcctgggtgggggacttcttaacaaagtgaagggctctggtgctctggggttcgattcgggaggccagcggcgtcagacgcgcgctgtccctggtgcacagcctggctctctcacttcccactctggggcgcgcgatcggggtatctcttaacaggatgctcgggacgggcatgtgctggaaactgtttatgttgaatttagttacacgtggattttctttcgtggagtactgacttgtgtactaaggatggccattgctgtggctggaaggcggatgcgtccccatcgtaggtacagtcaggctcctacctgagcccctcgccccagtgaccctgcaagcacagcatgctgtgcctccagacggcccagaggccatctctcccagaccccaaatcccagcaaccgtgaaggaagaagtgaaggactccggtcattcaaaaaagaaaaagagggacgaggtacagggagacagtgccttgacgtttcttacttattttttaaaacctccacaaaagcccctactacaaaagtactggatgctaaggctatagacccccaacacctagtcccgcctcccagcggccgccctctccagattttaaagggttagaaagcagggttggaactccttgggactggcaagggcccagggaggaccgcaagggagcctcctcgacgcccagacaagcgttgcaccgtttccccaggactggcctggcgtgcaaagcaactgggtgctgcgttctgggagtcggaccgtttctgatcttctcctcaaacaggcagtgcctgtgacattgaattcctctcgtaagaatgccgggccctggttctttgctctccctctcaccaacaagagctaggaagtagagcgcttttcaccaagtagtaactgtatttacagagggcgtggccttcgcagaaaaggccacctttttgcatcttgaccgaggttgatgactctgcatcttgaccgaggttgatcacacctgtgttaaatgttttctttgtgcaagcaatcgaatgggggctgtagcgtgattggtgagggtcaggacagttgccgggagagtttttgtaacacacttcgtgagtgaagagtctgggaggcgtcttttcaacaaacctcagcggaaaacccagaaaggcgctccgagtggagggaaggtgtggccaggcggggtcccggggcagcaggagggacccacgggtggatgctggcctcgttctctactttgcagtttgagtttccattttgcaggggtctagtctcactcgcatagatgaagagctaagcttccacagagcggatatgcacctctctccccgccagcttgaaaagcgatttgggaaagggattcttcaggtgccttacacacagagggtgtcactgctcagggatcatctctgtatcctaagcgcttggcactgtgcctggcacatttactatttgtgaattggaagctagtgaccgagttaacaaagggcttttagcatgaagcgtgatttatggtcctcagtgcagaccggggaggggtcctggggagtggcactaaggttaaaggccgctctgctccctcccagtccctctatccaccgtcctcctcgccactgttcctggaggatggacaccctcttccccatcccccatcccgctctccaagggacagcagctcactgtgactgttggaagagttaggcatgtggttccctgcagccagctcggtccactctgtgacttggcaccagtggcggaatgaagtgccagcagcgattgcctgcgaccttgccctgagcataggctcttgcaggttgggctccctggactcagctcacctgcctccaagccccgcggatgctggggttggggcctgtcagtcctactaaaggttggtggcctatgctaaaaactccttcagtagggctgtagtactctgccctcccaaggggagctggcctggttcacagcactcccagcttgggttgctgggcacaggggctcggggcggtgactcgcagccagggtggaggtggggggactggggtctggattcagccctgcctctcaccactgggacccccaccgagcttcttctgtggtgcccgcacactgttcacctcctgctggctggcttgtgccccagggcaggctgggggctcccgctgcctgagtccactttgatcctggactttctgggaggagctcggcttccaggggcgacaagataataaccttggccaacatgcaaactgcgtcttgcctcggggacagctgagtctgcccaggagatcctggggctgccttctttatccagctcattcttcaggactcccacacctctctgggttcagggagactaacctgggtgtgcgagtgtgtgcatgactgtgtaacagtttgtgtgaatgtgagtttgagtgcataagtgtgagtgtgcacatgtgttatgagtatgtgtgagtgtgagtatgagtgtgtagggggttagaaggtagtggtcccccttgctcagcctggaacctgttgctttcccctgccctaggaaaagcctcatccaggagaaagcagaggaggtggactggcccctggctggaagagagcctgagctccctgggagacctgaccctagtgacctcctcacgtgttgggtgcttagaaaagataacctgcattctggaaaattattgacatcttctaatcatgatacttacttacagggatgaaagagggctgagcagatatgccaccttatttgagcatttgattcttttctgcaagaagtggagatttccaaggttattggagggttctggtctgcctactcccaaggtgctgctaagtcaaatattcaggtttctctcctgcgcatagtgagtgcaaaggtctgcttgccattagaatcgattttacattttagccatctatttttatatctggaaaaggcagccttcaaagctaagcctttgtagaagcttacatattttcctttaagctcatttctttaatactgatgttgaaattttcctgcacagagattcctagtgtttttacttaatgatagatgttaaaaattaactgctattgtgtttaatataatggttacagattttttttctttttccgtataagataaattttaagagaagtgataagtgaactcaggcctcttcaatgcagatgttatgtgattcgtgagtgttaaaagcaaaacaaaaccataatagaatatgttatttaccatccaaaatgaacatcctgtgatggatatgcatatagtcatagccaccaaaaactttaaatatctcccaaattatctgtgactagttgctaagtcatctgattttttttcttacacataatacacaaaaaggtaaagactttccatattatgcaatctctaataattataactgataattattgaacattttacacatattttacgtttagtttctttcaacaggattctactataccacccgtctttaggtatatgatttgagattttttcggtcaagaatgcactggtgtatttgtttttaactgatgttcctgactattttattccatcttgcccagtgttgcctggagttccctaatgtcttgcctggaagaaatgacttacatattttcagggggaagaaaggggaagccttgcttgggggaacaggggattagagatcatggctgcccgtcccctaaaacaggcaatcagagcttaggaaagagcagagcagaaaaggggactgtgtcccacaaacaagaatcaaccaatcaactagtgctctgaaaaacaatattccaatccagaaagaatctctaaaactccctttaaggatagttggattaaaatgtgagtaaaaatttgggctcatttttgaaatatattagatatggctatctaatcataattttctctttatagcatgatgtattttcctgtgtaatatatatcattttgaaatcacacttccacacagtccaagaattacaaatggagctaatgtctatgtgatcagcattggcctcccctattgcggtggctgtagctctcagtggtaggtggctgcagctgccaaaggattcatggaaggcatttaagaaagtaacttgcttttctgtcacactttctcagccttatataagtagatactatttatcaagttcagaaatgaaaaaaggaacagtggaaaggattggaaatttagagcttatttctaaaataaaatatttcatccacacagacgggcatgagcatgttgtctcctgagctgtgggtgctgcagctatgtgtccgtcctgttgctttgtaagtgtgtgtgtttctttacgggtgatgtgtgtttgttcgtagtcagagataagcagatggctttggacttcacctttgaggaaggatggtgttgccactgggcagtttaagagactctcattgacctcatggctctgcccttcactgtatgattgtggagttccttttgtttgtttctcttttctttctgtaaaatggtaaataacatattctattatggttttgtttcgcttttaacactcaagaattacatgcatggttgtgagatagtgtgcacagcacaccttgtataaagcctgacacacagcaggcgctgccttacctttatgaagatgagcagagagcagaatgctcaggcgatgtctcagtcaaaattaacagactaggaggtaagagcatgggccaggagaaggctgatctgaggatgtgggattcacgggaaggcaacttagtgccttcctagagccaaattatgtgagagagagagagtgagagagagagagagagagagagagagagagagtgtgtgtgtgtgtgtgtgtgtgtgtgtgtgtgtgtgtgttagagatttttagttctcaggatttttctcaccagttttactcaatattccaaatctgcagttgcatttttctgattaataggacttaaaaacaatatttagaacaattacatattgttctcactagatcaatactgttaacgtttgcttttgtttttcagcaccatttttgtagtctttatttaatgtgattttatttctaacatgtcattttccttttgggttcttgtgctactaacagtgaattgtatgtgaagttatgtagtaatgatgtgtataatatgcttttttgcataaatattcaggagaacttagaatagcataagccatctggatattgaagaacaattgatgaagaacaatatgataccatgtgtataatctacaacattacagcttataagatttttgatttaaaccgttgtcttgaggacatggaatcagtcaaaaaaaaatcccattgaactgaggctaaaaacaaaaatattggaaaactttttctttttcttttttcttttttttgagacggagtcttgctctgtcacccaggctggagtgcagtggcgtgatcttggctcactgcaagctccgcctcctgggttcatgccattctcctgtctcagccacccgagtagctggggctacaggtgcgtgccaccacacccggctaatttttttgtatttttagtagcgacggggtttcaccatgttagccaggatggtctcgatctcctgacctcgtgatcccccgaccttggcctcccaaagtactgggattacaggtgtgagccaccgtgcccggtcctttttttttttttttttgcgataatctcactctgatgcctaggctgcagtgcagtggcacgatctcggcccactgcaacctccacctctggggttcaagcgattcttctgcctcagcctccggagtagctgggattacaggcgtgcaccaccccagtccgctaattttttgtatttttagtagagatggtgtttcaccatgttggccaggctggttttgaactcctgacttcaagtgatcctctgccttggcctcccagagtactgggattacaggcgtgagccactgcgcctggcctggaaaacattttttaaatgtttggctgtcagtcgaggtttgtcatattcctcagagcttccacttgaccttccagacctgtctaggacgtggcaaaatcaaaatgatgagaagtacatactcaacatcgtgaaaagcccgtcagagacacagtgtctaataatttcataatttcttaactgtctagtgattatctaataggcatagaaaatttagctaaattatttttaaaatttaacagcaacgtatagctttgcattttttcaatgtgttgttgggtttttaaaagaaaatatatgtaacagttaccagcttataaaatgttttcattgcacctgcagcatatacatataagttttatttgccttgctttatcatataggatggtgatgttttctgattatgacttgctatttttaaattccccttttgtgccgtactgtttgggcacaattctgcattaaactaggatattgtggatggacatatttaaactccttttgtatatgaacttgcaaattataaatatattttataaaaaagggatggatttggtctatctatgaggttagttctgcagaaactacttaggctttctgtggccatttcaccagtcacctggagggggaagcttctgctgagatcttcactgctctcttcaggagtgatttcattctgcaacccaaactcaggttattgtcgcctcagtattgtcgccaactctgaactctccaccccacttcagattcaacttggtcaacaccaagcatcctgtctccccggggccttctctggtgtgctcagaagagttctaggtcaagtgaacaagccgttcgtctgctccttagcctgcacatttgtgacgagactgtgggtgccactgctgccttgggtgcaagtgctgtccacaccaagcaccttgttcaagggcacgcttctaagttttgcccttaagttttcatctcggtccacatacgtgttgcgtggctctacattctgtgcgccccgcagcatgcagaacctcaagcctccaacctggcctcttggactcattccatctttaccctgtgtggtgctagatgtgccttcccctgccctaagccccccagaatcttcttccgagaagcatagttggggcttttctcagtgggcaattacattccagccttaaccttggtcaaaccagtcaatccactgttgccattcttccttaaatacaccacttggtcattagcccaacaggcttgtagtcctgactggcggcaaataggctcttttctccagttgatagaaggccccgtcagccagttctaagcaaagacaattctgttcttcttgagttctgttttccatgtaggtttctcagcataatgatgcttagataagacaaacttagtctgtctcccctgatagtcaagatgtaggtgattggagcgggtatgttaactctgcttattaaagtttcccagggccgcagccatactcttccatcccacatgggttgcactcatctgcatgggtcaagacagcctgttaccatgtccacatcaagctgaaggctggaggtaggagatgcagaaggaacactccttccccaccctctacgggtacagccaggaagctgcaagaatcacttctgctcacatccagttagcctgagtgtaggaatcttctccacctaccgtactgtaaaggaagctgggaaatgtcattcttattttggtggataatgtgctcagctaaaatgggaaaagtcggtctgtggccatgacagagagtggatattagcatgcaataacagtatcatctgtgcctcctgtggttgaaggtaccttagtgtgccttgcagacaccactgacatttttctgaggatctacactaacacccatctttgtttctagaccttagctagactcaagtccctaagcatctaaagatgaggcacaaagtatgacccatgagatctatactccaaaataacatgattttctcaatttagacataaattagaggaaagtgtgtgggaatgggtattagggtgtggaataatgatgcaaggaacatgaaattggatctggtcagtgttgtacctccagggcttagaaagggctctgacagtttggttggtggcggaaacaggcaccaaaaggtggcctacactaaatgaagttgaaatgccagagctaccttggtatgctgtagtggaagggatccagaggcttagggagattgggatgttacagtggatttatcataaaagatctgctcatccaccttgggagggtgcagaggacacactttcaccagaagtatggggaaaaaaatttttgaagggagcctcaggtgtccatgaagagctctggggctgctcttctctgcaggtcagagattgcagtggaagctgctgccactgactgggggtccttaactgcattggggatggttggatcccaggtggcaggggccatgtgatcaccaaagaccaggtgggtgcattgccatcatggagaacagcagagtcaaagcagcaatctgaacagcctgacttgagagtcctacggcattgggtaggtggtcatggtgtccctagaagagaactcgatgggcagtctactgaattctgactcgatctgtataagcagaagagttctagatcaagtgaacagaagtctatcttgacataccaaaagaaagagtcacggtccctcaatcacttcccagatttgagtcccagaacccgttaaaggaaggggaggccggtgaccctactacactgctgattacatttttattttatttctcccaacccatttctttgagtaacaagtgtcttcatttgaagtgtaaatatctgtggaaagataaaatggctatttattacccatatattaggtcaaatagcttatttgctcccatcgtctaggtgggatgggatggacattttaaataaatgggagagagagtatttacattgtgggtacaggtatgatctagatgcccatatatttattagggcgtcataatatcactgggcaattaggggcttatcaagatgacttccaacacagaaagtagcacatctttctcagggcctgctctacacaccagaaacaatacaaaaattctttctcttcctccttcttttatttgcattatatggtttctgatgttcaaggtgaaatgtactatcttgactaagagccccaggtctaacgccagattatttgagtactgatcttggctctgtcattcagctgtgtgaccttgttcagattgacccctgtttttgagatatttcatctggaacaaggtaataatagaacatagctcagaggattgttgcaaaccttagatgtcagtgcttatagagtgcttcgagcagtgcccgacatacggtaaatactcaataaatagttgcttttatgaatagctccagatacagaagttaggcacgattatgagtaaaacattggctagtgtgagttccttctcatcgagagcagcacagtttcaatgggcagataacttagagaaccaatcagcttacgagaagctttggaacatgacctgttgaaagttgagaatggtcttgtctttgccgtcttctccccaatcagatacatcagacagcctctgtgctatggttcatggttacctttgaaacaacgtgacatcttttctcctttaattctccttcccaggcagaaggatttgttccttctgtgctcacccgccactttgcatactcattacagaatgttgtattaatattcagttgtaggagcactgtcttgccttctatgtgtctgtaggttcagggaccttgtatagtccttgttgatatccccagcacggaacttactcctcaatatacagatagcagctatttcaaaacatcttttgagctgggtgtggtggctcacgcctgtaatccgagcactttgggaggctgaggaaggtggatcacctgagcttaggaattcgagaccatcctgggcaacatggggaaacctcgtctctactaaaatacaaaaattagctgggtgaggtggcacacgcctgtagtcccagctactcgggaggctgaggcatgagaattgcttgagtcccagaggcagaggttgcagtgagctgagattgtgccaccgtactccagcttgggctacagaatgaggcttgctctcaaaaaacaaacaaacaaaactacaacaacaacaaaaaaaacactatatcttttggattgtaggtttttcaaattgtgaacataacctctgatcattacacttcagctacccagcaaggactataacacacaggaacactgaagaaatatttaccaattgactaaaacattcactgactaatttttgttttgaacatctcagaagtctgaaaatagagttaggtctagtttcctatagcgattggtttttaagtctttgaatataaaatttataacagcctaatatatactctgtgactttcataaatgtgaattgtatcaggatggcaattaacaccttttacttgctttgcagggaacagagaaggaaaaacccatttgacaatggtaaaacttaagtcacatccttgaaatgcatattatttttaaaaatgtttttagctctcctggaaccacacaaatcgatctgttttctcttgcggtcaaaccctctagggcagcagtttggccacaggtgcagaaaaggaagaaggatgaagacccttagcaagctggtaatcttgaactgaagcaccacggaagtgaattagagagatgggcagagttgggccgtccctgctcctgccatctccctcctgctgctttccctggactgtccctgccgggcagcactgcctttggcattgctgcaggtacacggacccctgctagggaacctaggcagcatgcaggttggaaagggcccaggtttgaaggtctaacgaacaaatctggatcctgttcataacgagctatgcgactttgccaagttacagaaactctctgtttttcaattacatcatctctagaatgaggtgttcaaggctaagaaatattttcacaattctcagggtaatatttctgcacatgccttttttaatattaaaaggtatggccataaatcactgctttttaacctacgggccggaatttttatatctaaatcgctctggcctccttaataaccatcgtatgtacatacacttaggacttgccctcaaagaaaggttaggaactgctaagaacaataatttttttttaccatgttagagatgtggttcaggattttacaaaacagttgattatgaaggagagacattctagtttaggctttgagcttctaatatttcgatgatcctccctcacctgctcctaatacagaatcatggagactgtgcacaccagtgatgggaatagcatgaacaagatgtgtgagcatgtttagattcgaattggctttctgtatctgcagaaataaaggagcttcatcacccatagcttattactagacatgcctttaaagaaaaccaagctacattatagttattaattgaagctaaacaatcgtataagaacacaggatgatataaacaagatttgagtcagaaaaagatactgagtaaaatactgaatgtaatcagttgcagtattacattgacattgtagactatgagatctcagataattctattatccataaaaggaaagggtaggctgcacaaacacctcaggtgtgtgtaggtcagagactcacactggggctccctacgcaggtgttgctgtcatggctccagcattagctgtgggggtgtgagcttcctgttcttcaaccccctctccttcctctcatcaaactaaacactggtttccaaactaaatatttttcaaactaaatattagagcttgctcatgcttagttaatcctgactcgtgttggccttggggcccaaaatcagtctagctggtaagcaaggaaatgttgttagctggagccaggcttgcattgcaggccagacaaggctgctatagcacacagcctctggcaatccatcctcagtcacaagagaagatgaaaggtcagattacaaggcagtgagaagagggatcctcataaaatgggctttgtttcttgtgagccagtgttttctagaaggctccagctcctaggatttttcactaacaaccacaaacctcttagcaataactttcaaagcatgatcagttttgctgcaaagcatcatcgtggttgccattgcatcaccttagagccacactgcatttctgacccagtgccggatgcccccgcctcattcactggactccacttatcactattttgagctgttttcaaacgttaaagtcactgtcaaagtgcaacaatttcccaccatgtaagttattttaaaagatgtgacacagtccctaaagcatttcttaaattgggtatcaaaattttttgagcaaattatctttagagtaaggatgtatccttccaaacttattacttaggagaaaacaaatgtcagatattatcttatccttatgacaccagttggttatctattccagtagatccatactcaagatttgcaaatggaatctagttctgggatctatgttgataatgcagtgctaatctcccaaggaaggagaagtatcccagtcaaacaaactctttttaaaatacctttgcaggcctaggtgggcggatcacgaggtcaggagattgagaccatcctggccaacatggtgaaaccctgtttctactaaaaatacaaaaattagctgggcgtgatggcacgcacatgtagtcccagcaactctgtagactgaggcatgagtattgcttgaacccgggaggcggaggttacggtgagccaagatcacgccattgcactccagcctgggcaacagagctagactccatctaaatcaatcaatcaatcaatcaatctgcaacgtgaaccaaactgtaatgttttatagctttgaatatgcatataatgcattttctttaaaagagcatatttgaagtgtggatttaatagcccactggtgattttgtctttcagttgctttttaaaatcatactctgattttactcaattttttctgcacccctgcagtgagatcttgtacattccccaccagaatcgtacagtcatccaagatgtttattcacccagcttctcctaccttaaaatagccctggcgtttgttttctctgaagtcaaaggaactcatgtctgagtttttgttggtccatatctcgttatcgctttggacattactgctttctaggtttctgttttggctcttgcccaaagagaggttgaaaattgtttgaaatcttattgtgaaagtctctaaatattcccatctgtgtattcctcatcccaattcttggcacttcatctcttaatagaaacataagaaaaaaaatttttttttttttttgcttacttaatttcttctttccccttaacaattacacaacaccgtgggtggggtggggggtcaatattagagggttcagagcttatccatggtgtctgtagttcagtgctgatcctccttgggcactgatttttgattctccattcttcaccaaatcatgctttgttctttcttctcatgtagcactttgaattttgtgatgtaattcctattgggaaacatttttatttattttattttatttattcagtaatttatgacagtgagatactgagtttcatgattaggtctttttgagaaatgctgggctaaaacatggcaagactgttcagagcttagtgtctactgcaaatggtgaatttctaagagtttagtacaacgtgcagtgttttccaaacttatctgaccacagaacccctatttcttacccttggcactaatgtcctgggagcacacattgaaaaattctagacttttggactaccagatagaacaataaaaagagtgtattttgggatgagggcctttttagaagaccagaaatctcacttttcaggtgtgagcatgaagccagcgctgatgggtggtcactgtcacagccgtgagagggaaggacaattgggactgcctttttcttacgtgtgcttgtggactttggtttgtactctttattttagaaaaacaaagtggccaaaaagagagaaacagtcttagaaactagatattccagcagctgtagaatgccagaaaataaccaggctacacacatttgcaggtgtagcagcagcatagtggaaaaccaacaagggagttaaagtaagtcacacagcatcctgcatcctcgccaccgcctcatgactggacggccagtggcctcctgagggtcctcctgtttcatatttctctgtaatgtcccttctctatgtgctgatcacatgggtcttttcaacactgaagtcagatatcattcctctgccttaaaccctccagcactttctcgttgcacttaaaaagcaaaccctaaatccttaacttgccctataaagcccctggctcttgcaccctctaaccacactggaattatttttgttactcagtgtattagtcaaggttctcttagagggacagactaatatgatatgtgtgtgtatatgtatatatatatagagagagaggagtttattaagtgtatatatatataggagtttattaagtatatatatatatatacacacatatatatagagagaggagtttattaagtattaacttacgcgatcacaagttcccacaatagactgtccgcaagctgaggagcagggagagccagtccaactcccaaaactgaagaacttggagtctgatatttgagggcaggaaggatccagcacaggacaaagatatagactgggaagttaggcccatctctccttttcacgtttttctgcctgctttatattcactggcagctgattagattgtgcccaccagattaagggtggatctgccttccctagcccactgactcaaatgttaattgttaatctcttttggcaacacccacacagacacacccaggatcaattctttgtatccttcaatccaatcaagttgacactctatattaaccatcacaagtctaccccttgtcaacttgaacccatacacatttcctgagatcttcaagtaaagacaataataaggtcataatttaacgcctaccataacacaactatcccttgtacaaccggaaacgtgccaatccccaacccaaatactattacataaagttaacaatacttaaatgctgatatgaagtcagtaaatcttatgtcacatgataaaggagaaaggaaataaaatgattttctgagtacaagtgtatacatgcacaaacatgtttttagcaaaaaaaggaggaaataacgcataacagttacagtccttatttctgcagctggtcacgtggtcatggatggtattgatgactaccttcttctactacccattctgtatcccctttgccttcagcaagcatctcaggagatcatggtttttttcctggtggagtgacccaaaccttcattcctgaagggtttgggtcatttgtagtgctgcctggtttgggctgttgtagtttcccattgaccttaatcacagagcatggtaatactaagagacgccctaatggatctcctgtattccatgcatgctggagatgacccagtgattctgggtcagtcaccgcagccaacactgtaactcccttcttagcctgttgacttaaaggtaggaggagcccaaagtgtccaggtggcaatcttaactcccagtttaatggaatcattgtgtctactggtggcagtgctccttcttctggaactaagacctctaggccagcagaacgtaatgtcacgggaacaggaagcaaaaattttgctagtggatcactagggatgattgtgagtggtgccacttctacttctaccttctgattcccggacatatgaatcctggctatgagagaaacagtaccatatattggatgttgattcagagcatacacggccttctggagaactttgccccagccctgcaaagtactgttacctagctggcattgtaattgtgacttcaaaaggccattccaccgttctatcaatccacctgcttcagaatgatggggaatatagtaagagcacattggattccatgagcatgagcctgctgccacacttctttcaccataaagtgagtgccttggtcagaggcaatgcggtgtggaataccatgttggtggataaggcattctgtgagtccatggatggtagtcttggcagaagcattgcatgcaggacaggcaaacctatatacagagtaagtgtctattccagtgagaacaaatctctcctctttccatgttggaagaggtccaatataatcaaccagccaccaggtagctggctgatcaccctgaggaaaggtgacatatcgagggctcagtattggtctctgctgttggcaaattgggtactcagcagcggctgcagccaggtcagccttggtcaatggaagtccttgttactgagcccatgtataacctccaaccctgccaccatggcccctttgttcatgggcccattgggtggctggggaaagaggctgagtggtgtccacacaacaggtcatcctatccgcttcattattaaactcctcctccactgaggtcacccattggtgagcactcacatgggatacaaatatcttcacagtttttgaccactcaggtccatccacaaacctcttccccaagtttctttgtcaccaattttcccatcgtgctttttccaagtccctgaccatccagccaaaacattggctacatcccattaatcagtatataatcacatatctggccatttcttcttccatgcaacgtgcacagccaggtgcatggctcgaagttctgcccactgggaagatttcccttcaccgctgtccttcaaggatttcctagaaaggggctgtagtgctgcagctgtccatgttcacatggtgcctacatatcgtgcagaactatctgtgaaccaggccctagtcttctctgcctctgtcacctgatcatagggaactccccatgaggccatcggtgcaggctgtgggagagaagacagggtagcaggggtggagatgataggcattcgagccacttcctcatgtaacttacttgtgccctcaggacctgctcgagcccgatcatgtatatatcacttccatttgatgatggaatgctgctgtgcatgacacgctttatggctagatgggtcagaaagcacccagttcatgataggcagttaaggtcgcatggtgacttgatgaccgatagtcaaacattcagtttccaccaaagtccagtgtcagccaagagctgtctctcaaaaggagagtagttatctgcagaaggtggcagggccttgctccaaaatcctagaggcctttgctgtgattcacctatagagcctgccaaaggctccaaacagcatccctatctgccactgacacctcaaacaccattggatctgctgggtcatatggtccatgtggcagagcagcttgtacagcagcctggacctgttgcagagccttcccctgttctgtaccccactcagaatggcagccttttgggtcacttgataaatgggctgaagtaacacactcaaatgaggaatgtgttgcctccaaaatccaaacaggccatgtgcctctttcttggttgtagtaggagccaaatgcagcaacttatcctttaccttagaaggaatatctagacaggccccacaccactggacccctagaaattgtactgaggtaaaatttagttttacctgaagtttagtaggatttacttccctctgctgccacacaaatgtctctccaataagtccagtgtgtttgctacttcttgcttactggatccagttagcataatgtcatcaatgtaatggaccagtttgatatcttgtggaagtgaaaagctatcaaggtctctccgaataagattatgacacaaagccggagacttgatatacctctgaggtaggacagtaaaggtatattgctggccttgccagctgaaagcaaattgcttctggtgggccatatggacaggaatggagacaaaggcatttgccaagtcaatggctgcataccagttaccaggagatgtgttaatttgctcaagcaatgaaaccacatctggtacagcagctgcagttggagttaccacttggttaagcttgcaataatccactgtcattctccaagatccatgtgtcttctgcacaggccgaatgggagagttgaactggaatgtggtgggaatcaccacctctgcatcttccaagtccttgatggtggcactaatcactgcagtccctccagggatttgatattgtttttgacttactatttttctaggtagtggcagctgtaatggcttctatttgacctttcccaccatagtagccctcaccctactagtcagggagccaatgtgggggttctgccagctgctgagtatgtctatgtcaattatgcattctggcattggggaaatgaccacaggatgaggctggggacccactggatccactgtaagtcagccctgagctaaaactccattaattacctgacctccataagcccctactttaactgaagtaccacgatgacattttgggtcccctggatccaacgtcagctcagagccagagccagtagtccctgaaatgtctgatcatttccctttcctcaatgcacagttaccctggtaaaagtctggaggtctccttggggaagaatgggagaaagattcactgcatatattgtccgtaatgtagtggggttcttcctcaaggggactcagcctccccttcattcaaggggttctgggtgcataaactggctcaagtctggaaattgattgaggggctgtgattctgtttttataattcaaattagtcttttgtccattcgacctagaagttttctgtttgtataatttaagtaagaatgcagtaggcttcctatcaatttcacttctaggaacaccatgattaattagccaatgccagagctctacacgaatgagactattctgattgccgctttgcctctgctgtccattatggtagctacgcctaccttgcctttgacagttgagtgctgccacttggtccctgccacctcgggatccaattattctcattgtatttaagttttgtagttgagtgactgtggttccaaagatgcaggtgctgccctcacaaatctgtttcacaaggcattggtcaagggtatatcttctggaccctctcagctgggatgcgtaggtctaaagtgactaatccactccaccatcccaatctccctaagcctttggatcccttcctctacattaaactgagggagatcaggcatttccagctcgctcatagtgggccatcttttaatccacattttaaccaaccaagcaaataaactattagaaccttttttaactccctgatctgcaacattaaacactgagtccttacttagtggacccaaatcaataaattcaggctgatccaactctttgttccttccactattatcccatacccttaatatccattcccaggcctgttctccagattgttgtttatataaattagagaactcaaacagttctttttgagtgtagtgcacctcctcatgggtcacactttcaacctcatctttagggacctgccaggactttagtctatttataggtctagaagcaaacagaggtgttgggggaggcttctgaggagaatcaacattatcttgcctagaaactgcttcaggggaggccatcactgttgcctcaggcagcgcagggtttatgtcctcagacaaaggtggaaaggctgatggcagcgtggtttgggaagggatgttgccgctactggggatggggaagctgttccttctggcaaaaaaggttcatcagagtttacaaactcagtgtcctcagcttcatcagggtcctcccacacatccccattccaagttgcagggtcccattctttttcaatcaatgccctcactttaacagtagacacctggcggggctgtgcatgtatctttcgttgcaggtcagccactctcatgataagagcttgtgtctgtttttccacaatttcagctctttctctaaggagataagactctcactcaaggcaatcttagcagatttgaggctcagtatgtgcttctgaagcctggagacagaatccctgagttcatcattttctttcatcactttgtccactgaacttaggagcaaccaaccagctttattacgttccttggttctccacatatggttaaaggtattaggtatagagtcactaaactccttgcctgtcatgagtggtgaatcaggagtgtcaaatgcatttattttgtgtaactctctaaacagttcatgcccaggactaccagtgttctgcatactgttagcagtagagtccttagcattttcaggtctaatcatactaagcagccaactccagaaaccccaaaaccaacgaaagaactccatccttaatattctgttcctctagaaccactcctgataccaaaatctgtattagggttctcttagaggaagagaactaataggatacacacacacacacacacacacatgcacacacacacacacgtatatgcatatatatcatatatacctatatatgtcatatatatacacatacatatatatgtgtgtatatatatacatgacatatatatgtatatatatataaaggggagtttattaagtattaacttacatgatcacaaggtcccacaataggctttctgcaagctgaggagcaaggagagccagtctgagtctcgaaactgaagaacttggagcctgatgttcgagggcaggaagcattcagcacaggagaaagatgtagactaggagactaggcctgtccctccttgtcacgttttcctaccttctttatattcgctgattagattgtgcccaccagattaagggtgggtctgccttccccagcccactgtctcaaatggtaatctcttttggcaacaccctcccagacacacccaggatcaatacatcgtatccttcaatccaatcaagttcacactcagtattaaccatcacattcagatgcaactatttttgctttaagttctttgcagtggctgtgtgctctgatgagcgtttcctcctatatctcagcctaaatgtcacctcctcagggacctctttccgcacccctcaaacacctgatcctggtcactcaccgtcacaacacacttctgtcattatctccacaggacttactctgtctcaattctttcatgttagtgagtttggttagtaatatctgcctcctgcctccttctctctcctccaactaaaccgtttgttccaggaaaacaagctcccactctctgtcttattccctgctgtacccacagtgtcttgggtagggcctggcctgtagtaagcacacaacagttcagtgcattgccttaaatgttcacacaacagcaatggaaatgacaccagtgtgttcattcattcctccattcatttcagtctctgtttcctcatctgtaaaatgcaggcaataaaagtaactacctcatagggtcactggggctttaaaaaaaaaatagtaatgtacttaaggtactgtgtaacagtacctggcatatagtaagcatctaataaatgtaaattattattgtgatgttgatctttcattgattcattcaataaacatttactggcctatcaggatggctcgattctgggaatacaaaaaaaaaaaaatatgtaaggcatggctcctgctcttgagatcctctttaaaccatagatagttcagcttctctgtagttctcagagtaaaaaaattgctgatggtattcatcagatcacgtgggccttggagtattttgaatgatggcgggagatgaccaagaaactggcactaaaggtgggaagaggactgtgtgaggagtgccctttaccaggcctaggggacagtaagatggaacagtcatcactgtggccatgggcgctcaggctggcgcagtgcaatgaggtgagtccttgcatttgaacagaaaggagagaggggagtgatgctgggcaaataacagatcattcctcaccaccaaaaccgatttctggaaaataataaacaaaactgtgatagtaaaaacttcatgttgaacctactgggaatattgactttaaaaaagtgaggtggagactttaaaccaaagcaaccagtctctatgcgggggagcatatggctcagctacctgtgctgcaggcctctggtgggcatggacagaactgcccgctgttctacttgtaatgcaggtctaagggtaagtacagactgaaagttaacgtattttggaaaataaatggagtcattatgcatgctttgacaacactctggataaaaccacagtcacgtgctacttgtctgtccatcttatggtaggcaccattcttcctctaccgttgggcactagagctgccctggcagccctcaagttagcaggtgtgaatgactgtgtatttctcttgccctatcttatctcagactcactcagccacttcatacaatcaaattgatgaaagccaatgctggcagggacctctaaacactttggaaaaattggcactgctcagagagaggatccggagttgctgtcagtgggggctggaatgttgtcctgccctgaactagactctcttttcctggcatagacctacgcaatcctggctttgaagtttcttttcctctttcattatggttacaacaggacttcataaaaccaggatgctcttctctgcagggtaatctttatttggaatggagtgtgtcttggtttccgcagatgtattgaggaaacaatccaacaacgtaatgaagtgtgctggactcttagcactaaacacgtgttttgtcagctaaacagaggggtctagttgtttatgtgataggaatgacttgtttcctttctcaagtatcttcagataatggcaaaagttggattttaaaattgctgaaatgccacattcaacattgtaagtgttgtaacaatgctgatgacttaacagcactgtcttttgtcggacacatcgtagtttttaaaacatattcgcatactttttgaattatcagctcaagagggcttataatggttttcttgcttattgcagtatccccatcctgcctggcaggatagacggtgtgtgtattttgtatgtgtgcatgtgtgtgtgtgtgtgttctttctcccatttaatatttgcaaatgctctgtgaaatgggtatgactctagattttacatgtgaagaaatgaaaggaggaaaggttttacatgagaaaatagaaactcagaaaaattatctaacttttattttgtggttaaatatcaagaaggtggtagatctacacctggacttaatttgagtctagtatacattcaggtacaaaaaagcttttctcaacaagtactgaccctcataagtggtccataatctggctctttcaatctgttttctccatttctgccagaatgatctaaggtgaaaatctgaccatgtacgatccagcgcttaaaatggagcactggcatttaaagtgtattgtttattctgaggggcaggtaaaggggccagagttccctgctgggtttttcttgactctacctacaggaagatgatctcatcatctctctgaggatctcatcctggggcttgaaccctgcccagagttagtcttctgctgggtactgagacacatgcctgccagtctagaggggcaggtggtggtgggtgagtggtgctccccaagtctccatcaaggaactatctggtttgggaaacccttagctttaactgcaaaggtttaaggtgctgaccattcggcacgtatcttctagaggagatttgtgcatgaatgcatatcctgcaggtattttcaactggcattttggggttctttttactattgcacagtgatgttgtatttctatggcttgacacaataaatgatttcttaggtaacacaacaaatgctgggaagaactaggaagaattcattgtcttcattccttttgggtctttatacagtagccattgtgatcctagaggaatggaaagtagccaaacgatctgattacaagtggctgagtctcccatgcaaatattgagcaactcacattttcaactgcaggttagcctacattatctcttactggatttttgctcattcattcattcaacacatatgtgtcaaatatctattgtctgccaggcacaatattatatatacttacctaaactctggttagttttttgtatttattgatttattttaattgacaagtaaaaatggtatgtgtttttggtgtgcaacatgatgttcttagtgtaagtatacatcgttgaagggctaaatcaagctatttaacattatctcacatacttttcctttgtggtgagaacacttaaaatctactctttaaaatctactctttcagcaatcttagtttatctttataataaagactgcagctctctgcaatgtatagagattaacttaaatcagtttactttttttttttttgagacggagtctccctctctcgcccaggttgcagtgcaatggtgcgatctcagctcactgcaagctccgcctcccgggttcacgccatcctcctgcctcagcctcccaagtagctgggactacaggtgcccaccaccacgcccggctaattgtttttgtatttttagtagagatggggtttcatcgtgttagccaggatggtctcaatctcctgacctcatgatccgcccgcctcggcctcccaaagtgctgggattacaggcatgagccaccgtgcccgtcccagtttacattcttcaaaaggaaaggattcatccctaaatatactgtggtcacatttcacatgaatatagagtgatctctactaatcaacttaatttagtaatgttttacttgtctagaaatttaacagcatatggcagatttttctttgctggaattagcttgccttcatttcattggaaagcattagtaattgtagcatctactttacctgccctatttaaattagcactttagaggaagcaaaattaaaatccaattaaaatcagatgcaaaagctaagtgtaattgtgtatatctagaaagactaatattccatttagtgcaaatatgtttgaaaccatatgcataacccatagtaagcttttgtgatctgttgggacatgcttttctctactctgagtttcttaggagtcagaatgattttagagctgttatagtaagcagcattttcttagactagtttaatagattcaaatatgttcattccgacagattaaaaaagtacaatgcttacttttgggaaaaagccgcacattatatgtatgcattgatatataacatatatatcaatgctatcatataacttatatataacatatacatagatatatatgttatataaataaagatatattatacatataaccttaattctcagggaagtaaatgataaagacttgtcgtcttgtttgctttgaaactctgatgtctgcggattttataaaattaaactgtcagcctgttagaatgatcatcctggctgcatctggatgaagacaattttatccaagtgtcttatagataaatcttcccatattcaaggactagaactctgagactatctctcctcaataatgttactaatgagtttcacctcgttttttaattaatagaaatacattcttgtgaataatgattttgaaaaattcatttcagaacttcggtttttttctatgcattattgctactagttttcatattggcagatgaaaagagaatgaccatatcagatggaagatattgtgtgaatggttgttctcaggtcagaatttagaggaaggaaaattaacattttaatttttcaggtaaaatttgtgaaataaaattcttagtgatgatattcattgtcatttgcaactgctgaggagcttacaaaacagttcctggctgattgtttaaaatgagactgttaaaaagtaaatcttgataatgtctatcaatggtcctgggaaagttaaaaagttctaaataagattgaaagaagtcttcttgctgggtgcggtggctcacgcctgtaatcccagcactttgggaggccgaggcgggtggatcatgaggtgaggagatcaagaccatcctggctaacatggtgaaaccccgtctctactaaaaatacaaaaaaaattagctgggcatggtggcaggcgcctgtagtcccagctgccggggaggctgaggcaggagaatggcatgaacctgggaggcggagcttgcagtgagccgagatagcgccactgcactccagcctgggtgacagagcaagactccatctcaaaaaaaaagaaaaagaaaagaaagaaggcttctcattttggtacatgatttttataatgaagcttataagtagaattcacatgagaattgaacttgttaattgagcagagaacaaggagaacttatctacacatcaaagagaggttgaatgcacctatatttggtcatgaaaatatgtcctctcattgctggatttaatagtgtaatagagatcattttcactgcttaaccacatttgctatcagagaagactttgacctttcagactgaaatcttttggaattcaaatgaaagccttgccaagagatatttgagaaggctggggagcaccggacttactgggcaagccgaattcctcagatatgtgagaatgaactcatgctccatcagctttaaaattgtttaaaaacagggtcttgctctgttgcccaggctggagtgcagaggtgcaatcataactcactgctgccttgaactcctggaatcaagggatcattccacctcagcctccccagtagctaagactacagttgggcaccaccacatccagctaatttttaaattatttgtaatttttttgtagagacagggttctactatgttgcccaggctggtctggaactcttggcttcaagtgattctcctgccttgacctaccaaagtactgggattacaggcatgagctactgtgcccagccaattcttattttgttttgtttcagacagagtcttgctgtgttgcccaggatggaacgcagtggcccgatcttggctcactgcaacctccacctcctggattcaagcagttctcatgcctagcctcccgagtaggtggaactacaggcgtgcatcaccacacccagctaatttttgtatttttagtagagacagggtttcaccatgttggccaggctggtcttgaactcctgacctcaagtgatccacttgcctcagcctcccaaagtgctgggattttaggcgtgagccaccacacccagtcaatgtgaccagccaattttatattttgtaataaaacattttgcttaaattaaaatgtgatttaatttacatatatttgtgacttaaaaaaaattgcaagtaaatttaggaccaggaaagatatattctttctctgaccgcaggtcccagatccatagatgcaacaaaaatggtaacacagccttgcatagttaggtattcaagtcatgtttacatgaatatcctcaaagccttgtagccaagattgtaaagatatgtccttagatttacagttgatttaatatttagaattttcataaattgatggtacttctttaaagcttcctttttaaattttcttctttttaaggttttgggatcatatcagaggctgttcagtagtcctttaactccatggtgtgtggaatcatttgtttgttttcctgcttcgaaaccctctctttcctgtcttcctgcctttgcccctaccaaggcactttgtaaaatagcaggtgctcaagaaaacctctgtcattgttttctttttgccagtttctgcatttgtcctgtttaaatgctgaagtgactgacttccctcaggatgcaaaaaaatgcaccaaagaaaatttagctaacaatgcaaatcaacaaaccatatctttttgagaaaaaaaaacatattttgtggtaaatatttttcatgcaaaagatgcctccgaacttgcccttgagtcatggcaatataattttattggtgctttgtaacagatgagaagtttaaaagaagactgggtgatttattaaccaagtattacataacaaattctggactgatgttatctgtggctggtcgtcattttagggacagataggtctggaatgctggttggtaatatgattgcaacacgaccacattggtggaggacttagtgccctgtgcaattccgactgattctgatggatggagactgattatcctgattatcttatgactattccaaattataacatggaggtacattgatctctaaagcttacatttgggtgcaaaaacaattgcaatttatgaagtatcaactaggtagtaatttcaggttgtggctgatttttcattgttctcatattcttactattgtttatttactgttcgaaactctgagactaatagtttaatgcattttaagccacagaaaggaaagctattttgcaacagtcgcctcccacatctattcctctagtgtgatctggcactggctatgacaagaggcagtgtttagatggaacaaagggctacactcagcttcatggaggtggttcaagtgctgtatttatactctggaaccaagttttgttgcctcgtccctactctaaacccctgctaccttcgtaatatttcattgtgttaatatagctcatagagctaaatttttgcttttagcagagaaagccacaaacacagttcttttaaagtataattaggcaagggcagttatcaattgatgatgttttaattaagccataacttggttttatttttaatcaaatgcaagtatttggccgggcgcggtggctcacgcctattatcccagcactttgggaggccgagatgggtggatcacgaggtcaagagatcaagaccatcctggccaacatggtgaaaccctgtctctaccaaaaatacaaaaattagctgggcatgggcctgtagtcccagctacttaagaggctgtggcaggagaatcacttgaacccaggaggcggaggttgcagtgagccaagattgggccactgcactccagcctgggtgacagagcaagactctgtctcaaaaaaaaaaaaaaaaaagcaaatatttgttccgtggcttttcctccattcacccaaataactattcttattatctttttagtattactacaaattagtgaagatgtagattcaactctcttattttcctcctcccaaccaattcatattcttttagaggttctactagggaaactgcaagaataatgtaactacacgacaggatataagtgtccctaaagatagattttctatgttccagttgctttgaaggtgaagaattaaaaattctccagtaggattgtgtctatatttcttgccttgggtctaactgtgtctgcaaccgttatctaagatatttacttgtactacagatttttcctgcagagtcagaggtttacgtcgctctctctctctgtttttttttctgtaattaacctgatctaaaggatgtgattttcatttgaccaacttattaagttaaaaactcattgtgaaacaatattcccaatctttgtatcagtgacttatccttaggaaattatttttcaataaatcagggcatgtgagaagtttctcatacttttcattccacttcttgatggtatgttttctctttttacattatttctgttatgaaacattccagcattggttggcatttgaatgagatccaaaggttagatgcaatcgatcctgccttactattttctataatgttctgatgctgcttggaatagtttgttctcatcttaggctacttggaaagcaatgacgctaacacatctcagagttgtcactccaggcatctcaatcatttgtgcagtggaataaaaaggaaatgagtatgaaagaagggccagtctgggacaacacctgtacccccagggcccctccaggtcccagcgttggagaggcagattgtgtggaagtcaaggtcatgcactgtggaacaagacctagctgtggaccatgggctgtttgcttcagcagtgcttcacaggtgcccatttgtagggacatctgtaccctgaggaatcatttacacaagtagaatgaacagatgatgaacttaacagaggtggaagtaaatgtcaactctgtggaatgtgtcaagaagtttatggggattgaaggaaacataaaaattgttacatgtgtgctgacaacataaacttttagccatccaactagtacataaacagaaagcttaatattcttagtcaaaggagtagaagccaatatgctgatcttaggaccctctttgaatgcagctactgtatcccttggctttcaagtggctgtatttgagtgtgaatgtccttgaggaattcagtctgttggaagcagaaggcactgacttcatactcctctgtgggactcagtgatgctcccgctgaagactgacacctaaagaagagccccattgatttcacagcctctcccacccaacatgttttaaaggttagctggatctttcaaatagaggccacgttttgatcccatatacaaacatccaaagggacattttctttctccaatagaaatgtttaaattcttaggctttggaaactaggatttactgatgtaggtgatgagtaaaagtttcggaaaacattctaaacgaacttggtgtgttacattgaaattatgtaaatcagtacaggatctgtttctccttggatagacagaaaagttgcaatgaacaccattatttgtgtcttttaggaattccatgactagttggtaagtgcttttggagctgtcatgttgagggtcccaaaggctagaatgtgtgctcatccgctagttgggtacatccctggtgctggttatttacaaatcgaattgtgaaatctgtatactagaatgattttgatttatttgatttttattgatacataataattgtacatttttatggcatacaggtgatattttgatgcaggcaaataatgtgtaatgagcaaatcaacgtgtttaggatatccatctcctcaggcacttagcatttttattgtgttggaacatttcaaatcttctctcttagctactttgaaatacacaatttttttgtgggggggacagaatcttgctctgttgcccaggctagagtgcagtggagtctcggctcactgcaacctccacctcccaggttcaaatgattctcttgcctcagcctccaaagtagctggcactacaggcacgtgccaccaagccaggctaatttttatatttttagtagagacagggtttcatcatgttggtcaggctggttttgaacccctgacctcaagtgatcctcctgccttggcctcacagagtgctgggattacaggtgtgagccaccgtgcctggctgaaatacacaataaattattgttaactatagtcaccctactgtgctatacagttagatggagtaacattcagtagataaatggaatgatttttttttttctttgttttttttgagacggagtctcgttctgtcgcccaggctggagtgcggtggcggatctcggctcactgcaagctacgcctcccgggttcacgccattctcctgcctcagcctcccgagtagctgggactacaggccccccgccaccacgcccggctaattttttaattttttttagtagagacggggtttcaccgtgttagccaggatggtctctgtctcctgacatcgtgatccgcccagctcggcctcccaaagtgctgggtttacaggcgtgagccaccgcgcccggcctgcaaatttcattctttcacacccaagaaacagatcacccaagcattgtcgaggtgcattttcacaccgttgggcagcttcctcctcaagagccccttgcacatattctattagtggttttggggctcagagaaactctgcccttcctgggatccccaaactcctagacatttccaaaatcaaagaccagataggatttgtaaagctggatattgaaggcagtgggcataatctgagcactggccatgtttttatttgcataattgtcctaaaatcttttatgaagaatgttgggaaatagcaattatagctactgtatctttacagggtactgtattatgtttgttatttagctctaaacactgtgaaaatacatttttattactaatgtttcctcctaaaacatgtttgagaagtttctcccaaaccagttaaaacttaaaactatctattgatatttacatttcttttcaaaatgtccatctgtacttgtattttatgttatttatattttatcatttaaaggaagaaagcttctcttcataggctgtaacattcatccatgtttctgtccctctctactgggacacaaacttgtttaattaaatatagcacttacggcattttattttatattttatattagtaaaataattttgtctagtattatcattgccagataaaaatacaagattcccacttaaatctgaatttcagataaacatagcattttcttaaagtatagaatgcttcttgcagtattttggactctgaaggttacatatgttctccatattcataaatgttttgcttaggactttatacatgtgtgaaattctgcattcttctcttattagtattatatcataatatttgtctcaatacataggctttgtggttattacttggatggttgtatgctatcatcatggaattaaatcccatgcttatctaacatttccgtatttgggacatttaggatgtctcaactatttttacttacagcagtaatttaaaacctatccttcatgacctcagaagaatttaggaagtgtagcatagatagagatgaacataaaacaaggattttggttcttttgtaatgttttcttaatctcattttcttgtaggctattttaaacttaacaactgtgtataaaactcaattttcaattagcaaatgtgtagcaaatgaacatatttatttatcccaaacacttaatataggagtatttgtttctgaattccatgtttgatgaatactcatttaactgtctataaccaaactgtcaatcctgaatagctaagtctgaatgtaccataaactttgaagccctttaatattacatagaagacaatagagcaacctggaaaacattatatctggggagagacaggataaaagaagaggatcttagtacttaggaatgttcacattgtccttacttataaccagatttagatgatatcaacactgcttgcctatttagttcaaagtcaaacaaattgctcctctgttgttagttatctgatttaagagctaagtcagtggaagtattgacattcagaaacggccagtgagcttctgtgtgtttatttgatgattcagaagccctccagccttatcttactcttggtggtaattcctgacaatctgtgaaaattttctctatcccgtcctgttaactgcagtctatctgttggcactagctctcttttcaaatatgtggggggaaaagcaccccaactgcctttttttttttgtttaagacagagtctccctctgttgcccaggctggagtgcagtggcacgatctcagctcactgcaacctccacctcccaggttcaagcaattctcttacctcagtctcccaagtagctgggattacaggtgcacaccaccacaccagctagtttttgtatttttagtagagatgacgttttgccatgttggccaggctggtcttgaactcctgacctcaagtgatcctcctgcctcggcctcccaaagtgctgggattacaggcgtgagccaccacgtttggccgtctctgctaactttagaaaatcctttattagtgaagacagttgtacatgcctctttcttgtcattgtaaagagctctattgtaagacaaacagtgtcctaggtagataagcttgaaaagtcatttgagaggaggtttctgagagtcttgagtgtcagattcaaaaatttggaacttgtgcagagaggcaccattacatgagtgatagcatctcccttaatctaaacatttaatgtgtttactttaaggttatgtaatgcaaccagactagtgtaatgacttattataagaggcatatagtttttgaagattatcaacatggaatgatatttgattacttagtgcatccattacattaatgtagtgaactccactgttcatcaacaacgttgtcatagacttggctttgccgtagctattgaaattacatgaatatttcatcacagtcaaggtagtgctgtgataaatattaaaagaggacaatgctaaaaaattacatctgaaaggattatgtggttgagaacacaccaagaaaggacacgaaggtggacatcctccacttctgatctttctttcttgtcactcctcgggggcagtttggagggcggtggccaggaaggcctgcgttgtcacagagaatgtgctaaggggatgacttacttgctaatatttgagtagttccttttgtcaaataaaaaatgaattcagactcaggtaaggagaatcttcatctgaaaagactattgtggtagaggtaagggtatcatgtgaccatgatacctgcgagggcctcccaggtctgtaagaaagggcttttctgttatacggaggattgcaggagtgaacaaggccgtgagggtgggcagagcaggaagaaggatgggacagtgaatccgcatatccggagggttttccctgaggtctgtggatccttaggaggccctttaggagggctgtcctgttatttgctcaagggggagtcaaggtcctgattaaagtttggtcaagttgttagtgggtattttgtccaggttggtcaatggaaacaaacagtttggctaataatttatgagataaagattgagtacatggaaggcctgtgtctggccttggaggtaaatacggtgtgcatctgtgagtcccatctaagtcacacagggaagacaagttctttgcagtcagcagtttcctggaagacaaaagggtttcaggggctggggtgggagaagatgttaactgttgctgttttccaggagcataaagcccaggtcaagttcaacattgcccctttataccaaaggtctgtttctgggatttcatgagtcaatcagccagttcaagtccacagttcttgaaggcctacatcgtgctgggcactgagttaggtaccaaaataataaacacaccaggacctttatcctgtaggtctgaatctagagagcagcttgaacctgagaaaaccctgggaggcagtcttagatgggcccagagactgtttgagagaacctgaggatcaggatatttgaattctgcacagactggcttgctccttcttctccatagcgcctcttcctcttgtcggtgacctaactgcagatggagagaaggagcccacattttcagttcagtcctgtggcattatgcatttctcaatagacagtagaacaccaggtgtcacttgcattattttcagaaagttatataggtttgtttctgtgcctaatctggcaattgttgacttacgactaagtgtgtaagtcttctttacaaccctggtgagcctctgactagtatgcaatgtttatgtggtttcgatagctgctccaaggccaatctgtgttaactttgttgatgtacagaagactcatcagtcagtgtaaaatttggagacttgactctcagtagttccatgtaaataaatgatggagttggagtacatattttggtcatgacacttagattctgatgttgtaggcctctttaattaaagcgttgaagggttgttctcagaatgactggaccaggcctttacttaaatgggtggatcagaatatctcaaataactgtttttattttaaactcaaatgaccttcctgataccaaacaaaaaacctcagttggtattcagaacttgaaaagtcaccgttatctttacaaatatccgaatatctgatcctgtagatacaaaatacctagaggattacttaaattagaaatacatacataaatatgagtatctggttattttgtattcataggaattcatcagaaacctagaaactccatctttaaagtttaatcattctaaaaagtcttaaaatcctttcagctgtgaagttctttattaatataaaggactatgaaacttcattcacggctcccctaccattttccctcttaagtcagaacctcagaggattcaaggggactcatgaagtggcctgcagaagatcgtttctttgagatcttgtgttttatcttaaaagagacacattgttatttgactttataatctatccatggttgtttacatctaaaagtaatatttaagttgcttctcatcaagaataatttaacctacaaggagcctcctggaaggagccaggtttctactgtgcacgctttcggtgcagactggtgcctggctacggattccccgagggtgtgacggtgtcagttcaagaagccttgtcgacttcaattaagtggggattggatgtcatgtgagcacaggagagaggaagttgggggtggcaggagaagaactggatcaagactcttgagttaaagtccctacagggtcccaggcagggcgggccctgaaggtggtatagagaatggccacggcatcacagatttggagggccctggccactgggtggtgcatgcttctccagaaggggcagcctattgttgccacgtgccacgtgagcctagttttgccagatggtataattttttaaaaagaaattggaaatctaggtttttatgaaaagtcttacattggttcaggacttggttaggaaaacagaagccactgtagataatccatgtatagagggtttaaatagaggagattgcaggctataccactgttgaaagggatgggaaacgaaggccagggaagttctcacagaccccagagatctccatctgggggacccaggtgcggccagagtcctgggctggcgtcagagccctctgacactcccaggctggctgtggcagctggcagccccagtgctcctgctcctgggcctgaagaagcatctgtaggcactgaggcaggcacctccctagtgcttggggaggctccctgtctgtcctctgccctgtctgcccggacgtccatttgcagctgcactgaagtatctcagcttctcctccgttccgaagccctgcagtggctctcatggtggactctgacgcagaccacatggaggggagcttgcggggcacagcatcctggcctcacctcgtgtgtggagcagacctcaggagagggtggcagtgacccagtggaccacagacaatccagcctgatcctatacttcaagtttaaaacactgtgctggtcaatactgtgtgttccaaaggaaacgcacacgtgggccagagctgcctgccatcagcttgacggaggcaaggcaggaagcacaagacccggggcgggcgggccggggcggggaggggcggaaaggatgacgaggcatcgcatcagaggccactgacttgctagcctggcctggggctgctcaccggctccacctgctcccctgcccaccaccgtccacctctgaaggaaccgttatgtggcagctcccactcccccgctctgctgtgtctttgttgtttgaggaaaggcccagacacttacctcaggtaaacaggtggactgaggtcacatggggacccacgggacttgtgaggagttaaggccgcagcgcccatgctgaagccctgtcagccagaatgcgggggaggcccaactcccagggtgggatgatctttctactgtcttcttaaataaaacgatatttctggaaaagaaagaacagaattgagatttaccttttaagacatcttctgtgtatgtttattagaaaaatgaggaggcttgcacctgtagtcccagcactttgggacgctgaggtggaaggatggccaggaattccaggatgcagtgagctatgatcacaccactttactccagcctgggtgatagagtaagatgctgtctttaaataagaattttaaaaagaaaaggaaaggctgaaacttcccaagttgtagtcttgggaaaatgagagcattgcagttactcctgaacctgtcattgtccacccaccatggagataaagatggaaatggaagaaacatgttttcagactcacatggtcaaatgttacctttgtcccaattctagccctctacctttctgtctgacttctgattaaaaaataaattcttccgttccactttagatgactataataaagtcaaatctaactagaaatttcagtaaaggaaagcaagaaaagaaagatctgtggaaaaatctgtatatctaagatttcagcatctcacttgtatccagaatagacaaacacatacacatttttgcttcttagcattaaggattctgtttctagtaccttttttttttgagatggagtctcactctgtcttccaggctggagtgcagtggtgtgatcttggctcactgcaacctccacctcccaggctcaaacaattctcttgcctcagcctccggtgtagctgggattacaggtgcatgccaccatgcccggctaatttttttgtattttcagtagagacggggtttcgccatcttggccagggtcgtctcaaacccctgacctcaagtgatccacccacctcggcctcccaaagtgctgggattacagacatgagccaccgcgcctggcctatttctaattccatactgaaatcagagctacaccccccagctcccacctgccaccccatcaaatagctaacagagacggccattaaaatacatgcccagtaatagtgattttcatagcacagagatttgctaaggtgatttaattcagcaatacctttgactggagctttttaccctccttaaatgatcatgtggaccataaagtgctaataaaatctccagctgcacttccatgaggttatggacgtggtggagttgtcaagatgtgtggtttgtaagctgtgcagactgtttactcagcgtccttaggagagggatgcatagttctctgacatgatgtcaccctttgcccaggatgctggaaacagaggggcctctggcagctgcagttgttggtgggctgggttcgcccccaccttggtgctggtggtactgacagggggcaagttctgcccaaggaaagataactttgttctgttgaaaatctcttggaaagagtttctgtgcaggatgaagtccacatgactgtttaacacttcctttggtgttatttatgtatttttttactgatgtgctggagggaccgtgtgaagagtggaacaagctctggtcttcagcttgccagccctgagctctgctacaaaccagctgtggcacgagcatttcccctcgcacctcaatttcccctaacatgagacagaccagacccaccacacagtgggtgtgggaataaaatcagacaacatatatgaaaatatgttataaactgtgaaatcaatgtcagctgttactcttttttttttttttttttttttttttgagagggagtctggctctgttgcccaggctggagtgcagtggtgcgatctcagctcactgcaaactccgcctcccgggttcaagccattctcctgcctcagcctcctgagtagctgggactacaggcgcccgccaccgcgcccggctactttttgtatttttagtagagacgaggtttcaccgtgttagccaggatggtctcgatctcctgacctcgtgatctgcccgcctcggcctcccaaagtgctgggattacaggtgtaagccaccgtgcctggccccggctgttactcttacacatgttacatttaacagcttttcctagtcagctgattatactgtgatctttcccgtctaagattctgcaggtagaatctggctatgttttaagaagaaaataccaagcgttttaatttgaggcacttttttttgttctgttttctttcttgaatgaatgcagagcatattgatgttactcactggatgtagagttccagtgaaaatttttcgtaagtaatttcagtggtaaataagtcaccctaactcttgtattgagttaatattataacaaatactagtgaatgaggattcctatgtattgtttgtttctgtgaaacccagttgactttgattttctcccaactctacttggaggtaaaagtcagaaccagtgaatataaagaatataagtttagtaacgtatactgtgtacttaaagccgttgccaagcagcaaatatgtgctctggatttccatcattttgcagaaatgctcagggaggaggatgtgtttccctttgctgcaggcttcactattagctttcataattaaatcatacttccaaccctgtcgtcctaatgtaaaattaccttatgatttattaaaagagaaggtgaaattacagggattcgtagtggcctccttgaaatttattaataattttaggcagggccagcatttcaaactcattaatattaaacgtgagtctcagtgttttgagtgttctttaacgccatcattcagaagaatttctatgaaagaaatctgactattttcctgtaaaccacataatactgcatataaaattttagatatttatcttgtaaaaacagattcaactgagttttttaatgttttactttggagaagcagaaaaaaactctgtacatgaaattattatatattattttattcaaatacttaaattttatctgtttattttcagtttactgttatcaccccagaattcctgattgctggtaatctgataacaccctctggcatatttgctcatactttcagaacaaaggaagcttatcatgatattttaaagtataataagagcaaacacttctattgtatttatgacatgctgtgcactgttctaagtcctttacgtacatttaatcctcacagcaaccctacgggataatatcgatgtgcaccatttctatagaaatgggctctatctttaaaagaattcagacagcttgttaatctacctccccttccccttgctaaaaagggtgtgaaaagttgcggtcattgagatcagagaaagaagtgcactgggggggtcaaccaatgacgttttttgtcaaactgaagctttgcttagttcctagtcaagagctctgcttagtgatctatctgcccagggcttagggaagtccctgagcttatttgtttctcagccgaactgcctcaactccagtggggaactgtggcaagctccagagcagtgacttaagtgtttgtaagtggctcagcccaaaaaacagtcccaagccatttctttccaaggaggtttcagggaaaggagcactgctggtctctctttgtgaaaagatctttatttgtgaaggcattcactgtatgccactgtccttgtccactgccaagctgggtgcagtggctcacccctgtcatcccaggactttggggaggctgagatcggaagatcacttgagcgcagagttggagatcagcctgggcaccataatgagacctcttctttactaaaaattaaaaaacaaaatatcctggtatggtggtgtgcgtggttgtggtcccagattcttgggaggctgaggcgggaggatcacccgagcccaggagttcacggttacaatgagctatgattgcaccactgagcaacagagcgagaccctgtctcagaaaaaaaaaaaaaaaaagagagaggaaagaaaaaaatgggccgggtgctgtggctcacgcctgtaatcccagcactttgggaggccgaggcaggcggatcacgaggtcaggagatcgagaccatcctggctaagatggtgaaaccccgtctctactaaaaaaaaaaaaaaaaatacaaaaaattagctgggcgtggtggtgggcgcctgtagtcccagctactcgggaggctgaggcaggagaatgacgtgaacccgggaggcggagcttgcagtgagcccagatgcaccactgcactccagcctgggcgacagagccagatgccgtctcaaaaaaataaaataaaataaaataaaaggctgccaagtgggtttcagcatagtgtagcatttttagttatcttaagagaacaatggccaaaataaattttaagaatttgttcatgaatgacttttcctcctatgccaaaaagtgaaagctgaacatttcaaataaacagagaaacccttggaatgacctaaatcagtcagataaccctacagaagaaggactagattgtttgggagtaattgtggcccattaagccactgatctttcctggagaggatcaatgtaaatgtgctgctggttgttgtccaacgtaattttgcttatcttttataatataacttttatatggttacggagctttacagtcaagcctcaagcagcactagcattcatgaaacattccccagctcaggctttcagaggacacgtgatgttgaaatattgctttgtagcggcttccaggcttctgtgggaccatgtggtcagactccagcactgtgcaggtgattatagttgtacagataaaggatgagtatgttcatttcgtcaaaaccccacacctaaagctttctgagctcataacaagcaggagagaatgagataagctgtgctgggattctcaccacgtggtagtttgaagtgtggaagtgtgtcgtgaggatgaagatgtgaggtgctggaatgcgtttctgagctattacatatccatagatttattacaaatggaacatattcttgtcgagtttagttgtgtggtttacagtctagaggagtaagtctgaattttaagttccctttcagccaaggcactgagtgtgtcaaatgggcgttgtgagtccatattggtttgcagtctttgggcgtgtaactctttttggttgcaagtttcagaagcaaagccaaatcgtggtcaaagaaaatgggcgatttattgatacttcctccatcatggcaaggcctgggacccaaacctcactccccttctccatttcttggctatgttttcttctgtggtggtgtcgtgcttagtcaagctgttctttgccaaatgatagtaagtggtaattttaggctaacagacttcgagctagtgattcccatgacaaaagtatctcttttccattagctccagcgaaagtcccagagaggacacgctgtggccctgctgggatcccagcaccaaacattgtacctggggagggggcctcattagccagacccagtcacatccagtcacacctaggactggagtggttcaaccactcctggaccatatcaagcatgatggaggagagtggtccccaagagaagcaggcgccgttatactgcattgtagttatgtcccaacatctcagtgctttgcaacaacaaaggttaatttcttgcctgccctgcatgttcatggcatcttggctcagccgggccacagacctctttgttgtaggtaggctgagaaagctgctgtccctgggcactgcccaccttgtgacacggggagaagagaatgtggctgaccatgtggcagcccttctagccagtctgcttgggcaggacttcagacttcagatggctccaggccagctttctctcctgcccaggaggccgtccctgccccacccctagagagaagggcagctgcgttcattgatctctgctgccaattcagaatccctagttgggagaaaactccaggccacggtgtctcctaaatccaaaagacacaaatcagactgtcttggtctaggagaaagagcctcctggcttgaggtggggtggctagggctaacagcatagctttctgcataggattcttcctcacgatattctccccacactgccaccttttacattctcagagtatgtgaaaagcctccaaattctgggctccaagtgttacatagaccattctcctggtgcattatgcatttgcagggtccgtctcatactttggtactagacatatgttatattgcaatcccagtgaaagctatgataagaagaatccaattttaacatcctattacactattgtcttcaactggaaatgaagacatgaaaaccagtaactttcagtgatccacgtgttttgaaagtgaattaaaaatatgaccacttagctgggtgtggtggtgcgtgcctgtagttccagctactcgggaggctgaggcaggagaatcgcttgaacccacgaggctgaggttgcagtgagccgagattgctccactgcactccaacttccagcctgggcaacagagcaagactccgtcacacacacacacgcacacacgcacacacgcacacacacacacacacacacacgaccagcatctgtcttttttaaggaaggctgtgtgcttttaaagtttgttgaaacttacactttgcttttcttatttgtgcttggcattttctctagacccaggggcacagaagcaatggagagtcatagttttctatgacctgtcactgattatggtcacagtggaaattctcagtaaggaaatggagatgccaattgttataaagggattgttataaaaggcttaagcctttcattttccagtatgtattcttcacttggtttaaactgaaatcacacagagcaatgttctttataaaatgattttttgttaaagttcagattctatctggcttaggagtagaagcacatgaattggccatttggatggattatgagtgaatggatcttggaagtcatgtctccatcactcttaataaataaaaatcttgcctgtaatcctagcactttgggaggtcaaggcaagcagatcacctgtttgacagttaaaactgtctaaagggcatgaatcttagtcaaaaggtcatcaaaattattgtataagttgtttatttaatctaagcatcaattactaacacacaatttataaaacacatagtttttatgtccagaatcacagagttgaacaattatgtcatgtgatagaaatccatagtttgcttccatgtctcccctctcattgtcaagaatcagcacccttttatgtgggggacacatcctctcaaacccctccacaaatatttcttcctagtgattgtcccattcctagtgcacccctcccctagccaagagtgattggttcaggggagacacctgacccacagaagaccagtgagagtccttccctgggatttttaaaattacagctggaaaaatagattcagtctctctcaagtggcaaaactggaaagtgctgtgccttggggacggggcagcctcctgggagggagaggaggccggcctggaaccatctgaagtctgaagtcctgtccaagcagactgtccagaaggccaggaaccccaacattgaggctgcagggtgtgggccataggagaatcatgggcagaggggaatcagtctgcaattggaagggggcagtgcctttccctctggagacagatcactgggggcccaatgggaagtggggtgctccaaagacaccaggggagagcaagtgtcagagatgatccaagccagacgcaaaacaagctggcatgatgcttcacccccgatgcttcctctccccatagccccatcctctgctctgccctaggcaggggaaggaaagggaataagggtaaaggctggccacctgccactgcaccagcctggtgggggacagggtgagattcgatcttcaatcagatcagggttttgcccactgacaggaggagaccattctactttgtaaattgagattatgctggtaacttattaccaaaaactgtctgttatctaagagagagcagaaaagtcatgggatgtgccaggtttttatcgcagggcaagggaagattaagctcactggatacattttaaattagaatgtattttttatctcattaatttagaataaggtgaaaataaaatcacatcttgcatacaccccacaatttgtgtttgttcaaccagggaccatggtagacggtcagtctctttgtttcttagtttagaagggttttggtctatcctttcagcattttgaaaaagggaatacattaaaggcataattctgaatgcttaagtctatagcctccaaatcagggccccaggatccccaggcacacaatcaccttttatgttttttggtccatcagaatatacagtcagaggtttaaaaactaaacatatccagaaatgtttacatactcatgttacaaattagtgtgtggtttcaaatttgatagcttataagtagtatagtacaagagtacaagagcttgtgtgtcccaaaaatttagcatgggagtagccgaggccttctgcctggtcggggtctacatttttcctcaggatatttatcaatctagcattttttaaaaaacaataacctaagagaaaaatgaccatctcgacttaaatgctttaggaaattctctgtgaggatataaacactgaacatagtcatcggtttttcaaattgacaggtttgagaaatagaatgtcatgggggaaaatgtcatgttttctcacttaaaaatttcaacacctctacactggaacgtcttttaagaattattgatatgttaaattttgggcagctttttttctcactggtgcttaaaaataatgttgtgttttataatagatggtctcttgtataaaatggtacatgaatgaaagaatttgctgaaaacagaggttttttatgttatcctataactttaagggaaccacttccgtttctgctcctggggccctctgagagtgcttcatggggccagcaagtggtgcgtggggacccacgtgcagcactcgaggcctcaggattgactctccattgagtcccagaactccagaggaagtttggaagtcggaaggagtgttcttgaggattagggaggtcagtaaagggcttgggctggcccagatggaatgagcccaaaatgggcttgagtggatgaacctgatttaggattccacttagtggtggggaagctcatgaaacatctgaaccagactctggccacatgggactcatctgtcccctggggatgccatgcccattaaactctctgaagctgcatctccagtgggaaagccatcccacccactgaattccttgagttaactatgaccccctgagtttaagttggtcttctttgcccttcttcgtatgaccccaggcattgaaaggcatttgttgaagcattataaaagtgaaaatgtgggccaggcacggtggctcatgcctgtaatcccagcactttgggaggccaaggtgggcggatcacgaggtcaggagatcgagaccatcctggctaacacggtgaaaccctgtctctactaaaaatacaaaaaattagccaggcgtggtggcgggcgcctgtagtcccagctacttgggaggctgaggcaggagaatggcgtgaacccgggaggcggaggttgcagtgagccaaaactgtgccactgcactccagcctgggcgacagagtgagactccgtctcaaaaaaaaaagaagtgaaaatgtggtgagcatgaccctgaaatgaatcaaatggagcatcatgagagagaaggaaacaccttttggcatggcacaagttgaagttgttaatgggcaggccgtcttttaaaatgtggtgcccttggtatttactgtggagttggctaagttccagcctgttagatcttctccatcatcactttagtgtcaatgacttttaactctaatacatgaatatttttgtgataattaattccattgctttttggaaaagcattcaaatgaaaggaaaaatcaaatggagcactctgttgaaacatcaattattttagcaagagaatcaagtgattgtggattcaaggcaatggatgtatttaatcaaaacactcattctttgaatcattgtagaaaacctctttcaagtctaaacttttaaatctaccctacagagcattgcacaacttcatgtatgttcagtgagaaaaatatctgtcaacaaattgatgcttcagttttccattttatacataattattgaaatctataattatgttgatgcattttaaaatacacttacttttcttaatataaaataataagttttttatgacaaaagactataaacaaactatgaagacaaatgacatactaggagaaaacatttgtgattatataattaacaaaggcttggtttctatgatacataagagattataacaactcagctggaataaaagagaaataacctataggaaaactagaaaatagtattcatcagcaacttacaaaagaagatatacaaatcactaatgaatcaaataaaaagaaaatcaacctcattaagaataaagatataggacgggcacagtggctcacgcctgtaatcccagtactttgggaggccgaggtgggcagatcacctgaggtcaagatcagcctggccaacatggttaaacactgtctctactaaaaatacaaaaattagctaggcatggtggcaggcacctgtgatccccgctactcgggaggctaaggccagagaatcatttgaaccctggaggcagaggttgcagtgagccgagatcatgccattgcataccaacctgggcgacaaagtgagactctgtctcaaaaagaaaaaaagaataaagatataaattgaaatgttaagaagaacccacatcttgcctgttgaaaaacaaacgacaaaaataaatggaccaatttggtattggtgagggtgcatttaacaaggaacttctatgtgggatatataattttcaaagtttgttttttggagacaagtttgatattgtctatcaaaatttaaaatatgcatactttatgatccattaatatgttaacctacagaaatactggcacaaatgtgcagagatatgtctataagacttctgaatgcaggactgtaaaaaatagtgaaatgtcagtccagtcagggaattggttaaataattcatgttaactatgaaaaatctgcagtctttttaaaaggccaggtgcagtggctgatgcctgtaatcccagcactttgggaggctgaggcaagaggatctcttgagccaaggagtttgagacagcctaggcaacacagggagactccatctctacaaaaaaaaaaaaaaatttaaattatacaggcatggtggctcatgcctgtggtcccagctacgtgagaggttgaggtgggaggatcgcttgagcctaggagttcaaggctgcagtaagctgtgatcgcaccaatgcactgcagcctgggtgacagagtaagaccctgtctcaaaaaaaattttttttaaataaacaaaataaataaataaatttaaaagggactgcaatacatacgtatgtactgatatagtaaatagattgtttagttaaaaaggcacgctgtcataataggcaggctttcaaaacaaactccttctgagataacaatatgaatgccttcatggcggggagccctcatgacctaaacacctcccattaggccccacctcccaacactgctgcaccgggggtcaagtttccaacacttgaactttgaggaatacatttaaactgtagtgcacactagatgctaataatgaatacttgtgggaaatggaattcaaaatagagtgtgggagaactttctttttgttttatacattttttaattttggaaaactttatgaaaaacatgtatgactttgtaaagaaaaaaattagaaaactggaaaataaagaaacctaggagagaaaattgttaccataattctaccacctagatataaccattattaacattttgggatactacttttatatgtttattttttcgtgtgtgtgtgtgtgtgtgtgtgtgtgtgtatcttgcttctgaattttccaaagtatcaatattttctgaaatacatacttaataatggctttacaatattccattactgaacagtgtcataactaatttaactattccacattatcttgcttataatttttaagtattacaaataatgttgagattgacatcctgatacacaaatctttgcctctatctctggttatttccttaaaatagattcttagaagtaggtttactggattaaagtatatgagcattagtttttattattaattcatttttaaagatgagtatattccaatcttcaaaatcatagtatggaagactatgaggtgaaaaataaaagcctcacattttttctttgttgccaccatgtagcattttaaattctttgaataaagacaaaacatagaagtccacagaagtctttagaaaacagcccagtgggtagactttttctgatttaggaatatatatctaccatacaacagtatttccatacatttcattacaaagtaatctttctaatggctaatcaagtgttcatacaataagtatacagaaaatacagtcaggtgaaaatctactaaagaggacttgaaatgaaactaatatgtgaaggggagcatccaggtgaagacaacttgttttggtggtggtgattaggctgtactcctctaaatagcttttgctgtcttcaaactgtgaagcagttatggccaggccctgtgttttctggtcagagggctccccagttcagggctttctctgtagtaaactctggactcaatccttctacatctgtgaccagcaaactttttctgtgaggggccgggcagttaatgagtcaggcgttgcacagcacgccggctctgttgcagtcgtgagactttgccattgaactgcagaaacagccatagaaaatacttagaagaaggagcctgacttggctccaagaaaacttcactgatggacactgaaattgactttcatataattttcatgtttcatgatctagtcttcttttgactttttttttcaatcatttaaacatataaaaagcattcttagtttgtggggcgggatttagccggagggatgtagtttgcagacacctgtttgccgaaaatggagcagggacaatttccaaggagaggatgaaattgccttgtatacaaaagatcgtcctacactggagacagacttaactcattagctatttttatctgacagtgtcctagaggaaaagccttgctggcgttaggcatttaaatctttcctagacaaagcaagtgaaaatcttgtgccagcttccttctccaggatagggattggagggctgcagatgaaagcatccacctttggtgattctctgccactgtggtaccacccccctgaagtccatgttgttcccattttgctggcagtgggcagcaggaaatgcagaagaatgagtgctttttatgttagtgtggtcagcctgagctatgtaggcgactaggcaactcactgtcccttctctcctaatgtctttcacttccacagtttttagatatatctccttgaaagacaagaggtagatacgtgtgtgtgttgggtgggggagatgagggtgaagggcaggaaataagccataaatctgagaaatttaaaggtcaaccacttcctgtttctcttggaaatccctgcagaaaagaactgggaatggccacagagaatgcttagtaaagcgtcatttcagttttatcaatgaggaaaccaaaacccagaaacagggaggcatttgtccgagagctcttaggaggcagaaccaggtgtggagcccgggaccaggctcctggatttctgctctgatgtccacctttgtaagcctgatgcctttggacaagattcagcattcaaagccaagcaaattatcacagaagccaatgaaatggtatttggtagcaggacatggcccctaatgcttgggccagcaggttccattgggtggacaggcttggtctggcaaagggcacgtggtccttctcatggcttcttcaccccagggctctaggtggccacaccccacagccaggctggcggtgtctcagccaccttgggcaacagagtgagggctccatgtggaccggcttagagaatggaagcctcacttggacagctccgctggttccaagccctttccatgcagtggaggcaaagctgcctccctctcatagtctctccttgggcacacacacaagaaaggtttttcagtgttgaatttggaagaagtgatatttctccctgacagcatctgaatttaatttatagtcttctccttcaactaactacaaataaacttaaggccttactcaacagctgggccagagtattatttttggaagtcatggggaccagtaaatggaaggggaaactgattcatttctatctctctgatcatctgcatcgggggatttcagggctatttagacaaaagcttccaaatcggttgaagtcctgagttaggatccaggaatcatatgaagtaggggttcatgttgaggttattaacttttataaaccacaaaacaggatatgcctatttatttcccagtcccttttgatccttgcttggtatgaataaaataattttcactagtgttagatgactttgttatgttttatgcactcttaagaaatatctttggccaacatgttgcattaactctaaaaatgggaggtgaagccaaagtgtgggctgcagtgggggcagagccaatgttgacctgtgttctaactgaggtctgacttggggcaactcgcttcacgttgcaaatgaaagctgtgccagtgtagtgcatagggtctctcttaggttacgcacaccgtgattccaaaacactgagtcaatggtgtctttcttcgtaagtagcttgtgtcttcctggcatggcaagaaagggagtattatttatttctcactggattccaagagaaatgagaaggcagccaatgtctagacttcaagtccaagtgctgataaggtttttgtttatatctgtgacctatcaatggaataagaatggtctacctgagttctgaggctcagcaattaatggccattttcactcattccatgtagcaaacttgggaatctctccgccattcaaaagaactcaatcagtgtctccctggcaggaatgagagccctttgatgtggggcaagctttgccagtgtacagggctgcagcaggctccttccacccccacacttggtggcatagtttcaatggcacactgaaaatggccctggggcccccttccagcgggtggcttttggagctgtaggaagaggggacagagttcctcagatggctttcagtcaggccatccctgtggtgtctcactggacattttactaagtgcttctaaatctgcagactaatgtttacaaaggagagacatttttatgagaactggaaaatgatcccaagcaatgtttaaagatattttataatttatatagaataatcagctcttcatccagctcccatttttctttcctgttagaatctgtacagaaaaattcaaaaggaatttcttcactttattgagagaaatggaagagcagctggagttaggtaggaagggccagggtgccgttgccatctgtcttcagagaggggacagcgaggcttctgagtgcctgcacttattaattagcgactgcttttggagagttgctggcttgctgctgttactctcaggcacctacaactgtctgagtctcctgcatgttggtcctgtgtctttaagagaactaagttgctttacccatgaaggcagctgtaaaatggtggaaaagtcgttaacttgactcaaagccctggttttgagtcctactgaaactactttttctctgtgtgacattgagaaaatcacttcgcctcagcttccccatttgtaaaatttcaatgataaatggcttccccagtgatttgggaggattaacctaccatacatacgttcaagctggaacataaaggagctaatcaaattatcacagtagagagaagagcctggccaacatgatgaaacctggtctctattaaaaatagaaaaattagctgggcgtggtgatgagcacctgtaatcccagctacttgggaggctgaagcaggagaatcgcttgaacccaggaggcagaggttgcagtgagccgcagtagcaccactgcactccagcctgggccccaagagcgagacactgtctcaaaaaaagaaagaaaaaaaaaccccaacaaattatcacagttgaaaacgtgaataattttagctatccgagacttatgctgctctacatgtaatgttcactcacttattcaatgcttattgtgtggtaggctctgccataggtcctgaggggatgaacagaaaagataacattacttaccttcatgatttagcccactgaggctaacaatttgaaacttttaaagtttcttttaagatagtttaagatgttgatggtggtgggcgcctgtagtccgagctactcgggagcctgaggcaggagaatggcctgaacccgggaggcggagcttgcagtgagccgagattgcgccactgcactccagcctgggcgacagagcgagactccgtctcagaaaaaaaaaaaaaaaaaaaaaaaaaagatgttgagtgaatggactggatgtcaaggagaaatccgtctttcgacacgtcaaaatttgtaaaggaaaaaatttgtagaacagtgtagtgagagtccccaactgaagttgactatagtcatctgatcccatcatcagaagaagcctgttttcttgctgaatttatatggagtctgaaaaagatggaaaaattatattgttattgtttgtttcttaaattgtacacattgcaatgaagtgattttagaactgcttcaagatattcctgttagatagacagggtttgccatgtagggtgttggctggggatctggcttgaggggtgtgtataggtcactcccgcaaatggctggctccgctttacccaggatgcacagggtttgtggaaaggtcaggttactatataattgagagagaaaaggtactgtttttagctaagctacctaacaatctacagcatattattcttccaatgtatcactggtaatcaaagctgctgaagctgcagtgtttccagaaatcattctctggtttgaaaatcttctggaaaccaaatggccctgacctcaaacacactcgatattataagctcttgggctcgttaggctttggggtaagtgagaatggtttgatttaaaagaacactttacgtgcatattaagccaattttttgagaacagttcttgagggggaatagcaagagatgtgagagctggcgattgctccctggacagatatgtggccctgtgaagggatgagggggccacagaaggtcctcatgccataaatgttctcagttccgaccccaatcacataggctacattactaaaaggcaaggctgcaactcatttgtgaccctctttcttggtttgacaaagctctttttgttcacatttttcaggatccaaggtttggatcaggttgccttgtccaattacatttattcttggttgtgtaaaattgtgtctaaggttttttcaagggaatttaaaaaagaattttaacattaataacttattttcctggtttcaaaagtatttatgctaattctagaaaatatagactaaaatctgtaaccacggaatacaaatcgtttctaaactatggagtgataattactgctgttatgtcttcttactatagcttttttcaaacaaatatgagatatcatttcacatatcttaataaaattgaatcacatggaatatagtatttttagttttctgtatttattatgtttaacaatctcttggcaaatactctgtcaagctaatttcaaatggatgaacagtattccataatatggacttttcttaatatcttcaaccattttcccattgttatttcctgttctttgtttttgtaaatagtgcttctaatgatgtgttctcgatcttggacgagaattatgctccattaatctctgtcctgagatctctttctatagtcaggtagcagacaacctttcaaaaaatacccttttagccacctctctgagtgaaattaagccttgcatcaaagaccacatttgccacaccctccaaagagtcttttattgggatactggctatgattcactaatagcgtggggaaaccacggcctgccttttactgactcgtgtggcaggaaattctctgctttaggaggttgtcgtgtgaaagcggagccttgcccttgtgctgtgactgagtggtgacactgagacgtgagacttgacttgtggtcttgagttggagctgctgccactggggttcagttcctaatccctaagtcagtgagttggcaatgaacaaacctttatcccagagaacatatttccaataaaaacaacaacactatgaacaagaacaaacccctttctagcgctcaagatggacaagccgtatgccagacatgggctggcatctcattgaacccccaccctatcatccatgaaatagttagccttcttatccctattttgtagatgagataacagagccagaatcacaccaaatgacgttttgttcaatcacttgtttgttaagtaatttgtctaaaaataattttttcaatgtaaaaatcttttattaatgccagtgctcaaaagctaccattcttacagcttttcttcattatacctatacatttagtagaaaatatttcttttcttttcctttctttttctttttttcttttttttttttttttgagacggagtcttgctgtgttgcccaggctggagtgctctgtcaccatctggactcactgcaacctccgcctcccggggtcaagtgattctcctacctcagcctcttgagtagctgggattacaggcgcgtgccaccatgcacggctaatttttgtatttttagtagagacggggtttcatcatgctggccaggctgttcttcaactcctgacctcgtgatccgcccaccttggcctcccaaggttttgggattacaggcatgagccactgcgccgggcctgaatatttcttattaaatttcaaacagaggttagagaggtgacatttcatatacactagcatagtgatattagaagcactatatttgtgaatttcttatctttacaaattggtcttctctatgcaaatgtacagtgccgctttttaaagagcaatgtgccccacatctacttttttttttttttttttttagacggagtctcgctctgtcgcccaggctggagtgcagtggcgcgatctcggctcactgcaagctttgcccccccgggttcacaccattctcctgcctcagcctcccgtgtagctgaggactacaggcgcccgccaccacgcccagctagttttttgtgtttttttagtagagactggtttcaccgtgttagccaggatggtcttgatctcctgacctcgtgaatcgcccttctcttaaaggaagtgggggatgtgtttgtgaaaatctgattggaaagataacatggttgtgcatttattttttgccttgtatttatactttaagcttactgggcagtttgcccagaagtaattgacttcctttgccctccccactaccgaccacccctaccctttcaggttggaaataggtttccatagcatttggtcagtctggtcagtgggtattgtaaacccattagactgtgtcaaatttggtgcatcctgcattgagtggcctctcattcacttctatttcggagcttaaagccaaatatagatacttatgtttcactttgtttttttgcccagcagtttgtattcctttctccctccctcccttttttctttccctccttcttccttctctctctctcttttatttctttcttgtcatttaatctggcagataaagtttggcagccagcctatcaaaggtcagagaggacctctgttttgttccaggaaaaggcaccgttacagttacagatgctctgtgatggagaatccatagaaaagaggaaccttgcgctgagctgagcaagaggcacagaaaccggcagaatccagcatccgggttgtcaggcttcctgctctcccttcctacccttctctcagaagagccctgctggctggtcaatactgtgaagcccactttagaatctctgattacactcttatgctcttcccttctctgtaaggagaagaggaattagaaactcgtgagatcaatcggttctcttcataggcctcgaaatggcctggacttttatcagaggctaggtcagggctgcaggaaggggctaagacaggaaatgctcgttggacagagctggaagaggtttgtatttgacttgtactcacctcctcagagactgcagatgtggcgtctccttttcctcctgaggacccctgcaaagcatttgtgcctaagacagaatgtttgaggagatggacactctgtctgtcaacatcttgtgctaccagctggatacattgtgtgctcaattggaaaatcctgtaatggagttgatggggatttaacgcgtgcctaccacacagtgttcagaaatgccggttggaggttttattccttggaagaggaatggctgccctccttgcctgtcttcatttgaaactcagttatacaagcttatctcttaaaacaaatttcaagagtttgggcaggcacattacctgtcatcactgcttggttgcttatcttttagtgaagtgaatgataccttgagctcaattattaaactcaattacatcttttctgttgaaagtgcttgatgacacattgatttcgcctgtgttaactgaattcagcaacaggttttaagtcttactcgataagcctaagcattctgttgtcaagacagattaagatgaattgagccctgagagcttagggggtggttatcaaccatgatacatatctaaattgcctggaatgctttgggaaaatgtagtcattgaggtgctactcctgaggatttggactcaggaggtgtggaggggaccgccccaaagattctgacctgtggccagttgtaaggacccctgactagtaaagaggatgcacacatgcacatacgaaccctagacagactgataactgctgttactgatagataaacagtacactagaaaagtggtttctatggtaatttaaactgttctttgcatggttacctggctaattcccatttggagtccatttctttacacctcctggtcttcatccccagtctcagtcactgtggttggatattttccatttgcttctccagaccatgagcccccttggtgtgagttatgaggctggcctgtatgggttgcactaagatgcccttctgccttctggcttctgactgggtttagccaatgggggttgatgggagatagggtgctaatggttgccaccgttgataaccctgtggttctctagtctcctttgtagcttcttctaaacctagactacaccaatcaatatcaccccttcattacactctcttcagtcccacaatttaagggaaccttctgtgttctgcctggatgtgagaaacggtacatttgataaagaaaacaattaacacattaataatgctagtgatcaaagaatttaaaaaactagaacataggaaaactgatcaatacaattcaatcagagcatgttaggaccttaaggggttctcctatgaatatcccttgtttctgcattgcagaggtgaagtgttgtttaaaatagaaatccaatgaataggaagtcacagagaattttctgaatttctcatttaagaaatgtgttgtggcacttttttttcatctatgtttcctcagtaaagcagcttttagaagagagtcagagtgggagctctgtcctctgcttactgagacttggtaacccacttttcatgcattcatttcaggacctcctctgcattaatttcctggggagacaggaatgaatagaccatagtctctgcctgcaggggcttataattgtgggggtagggaaaagacttgtaaccaaatagttcaagtgtcccaagtatacattgaggtctgcctaaggtccagggggagcagagacaaggaagtgcctccctcagcagtctgcgtccaagcagtgacttcttgaaggatatatgtgagtggcatcacaaaggaaatgtaggaagcagcattcttcatttgaaggtgaacagagaaacagaaatgaagcaaaagcagcagggactgcaagcaggctgttgtgcctgaagttctgtgagtgcttggagggtggcaggaggaaaggcaggcaccgtgctcagcctgtgcagtgcacaagcccacttgattggcgtgccttgattcaaacattggagtagcttcccttggagaaagttgaaaacgttacggaggtagacagaagcacatgtgaaaacctgaaatgacgattttagttgatcttgatgaaaaactgtgggaaagaataagggagggaaggaaaatgcagagtgattaggtgatgttaaggggcacataaacaaggtgggaaataaaattatcaatgttcacaggaaacaccagagcttaaagctgatcttcccactggacattgaggtcataagcttcttgagaaccacactgtgttcttacccatttgcacaggaaaaatatttttattatctatactcagataaatatatttagattaaaatgaagaaaagccaagtgcattgcttgggagagagatgcttatgttacaggggatgctgcctgcagagaaggtggactggccctgggctagcataatccaagatctgacagtgtgcagggatgaaaatgacactaagggtggtgtcattgtctgttcctgcctctgtaagtaaatttcaaagactgagcagcttataaacaacagacatttatttctcacacttctggctgggaagcctgaggtatagacaccagccgattcagtgtctggtgagagtccatttcctggttcatagacagccccccttgctgtgtcctcacagggtggaaaaagggagtcccctggagtctcttttataagggcacgtatcccactcacaaggactccacgtgtatgacctcatcacctcccaacagctccacctaacaccatcactttgaggattaggattcaacataggaattttggggggacacaaacattcagaacatagcaggtggatttggccaatttcttgccatgctacacatgggattggccactcattttaatctaaaacatacatgacaggcattttgttttctgcggaaaaaaaccttggaggttgaggaacggttttgaattaaaaatcctgtttcctttaaatatgacatttttagctcctcttcctgttaaaaaaaaaaacccgaaattatttatgtgtctcttttttattgtaagaaagtttggctggagcagcagggatccattatcacaatatagtagtgtttttcatatctatcaattccttcagaataagtcctgacagatttgtaaatttgtgtggatatttcataacaatacagttttcctcctgtatgctttgcacttatttatcagtctcattagcctgttttgagacttaaagaacctttttttttttttgagacggagtctcgctctgttgcccaggctggagtgcagtggcgggatctcggctcactgcaagctccgcctcccgggttcaggccattctcctgcctcagcctcctgagtagctgggactacaggcgcccgcaccacgcccggctaattttttgtatttttagtcgagacggggtttcaccgtgttagccaggatggtctcgatctcctgacctcatgatctgcctgcctcagcctcccaaagtgctgggattacaggcatgagccactgcgcccggccctgttttgagatttctctgtcgaattttcgtatcattaggataaataagacaccgttttaaaaagtcagcttcacattaatttttatgacaccaataattttaatattacccattgctgatatatcagtttctaaaattctttgtatgccattataaatataattttttgtaagtcatgtcaattcaattacatacaacgtatatttattgatgactcactctgtcaggatattgtactcgatgctggaaatgaaggaggattaatttatagtgtctgtcctgggtagtacacaggcttcagatgaccacatgtaccattagggtttccattataccccctacctccctttttttctcccaccctctcttccactctctccgttttttttttttcctttcttgccaaagtagcactttttgagtgccagtaagcattacaatttaagtaagctttaaaaaaaattttttttctatattttcatagtgatatctggtgttccatatttagcttccagttaacgtctaggaaattgcagccttaatagataagggagaaggggactcaggaggaaggaaggttaggagatccatttcataattgatcaagataggagtactggcttttagtttattgccagtgaacaatctaaacatcaaacactaaaacctgtgtgtactaagagccccctaaataggggttggatgtagcaagggctgagtggagaagcttggtcagcaaatgggcttggagctgcattttgcctgatacgttacagggggaaggaagaggagaaatattccaggaaattaggcagcacatcaaaaggaaaggaggaataaaagatgttggagtgtcttaggaagggcaagcaggtgactggagtctgtgttgtgatgaggcctgatgcgtgagagatgggttgtccagattttaaagggtctggaatgctggggccaggtagctggggttggggagagccactgtgaggaaccaggaggagtctgaaattgagtcaggctggtccagttttgattcttgggactgtgatctaggagatctagctgccgataatacttggggcaaaatatttatcctctctgagtcctcttatgttcatcttgaaaacaaaaatgacaataccttgtggaactttgtgaaaacgaaacaaatatattcatgtgttaattcattccgttattcacttatttacttagcagctgtttttcacaggtctgctccatggcagccaccttccaggtgaaggaggtgaagcagatgaaccaaagagccaaatggtgtgaagtgtctgacataaggacagctgatatgtgacagaatcggtttactgcaataattgttattaccattagtctctaacaacttgttgaggcaaaggaggggcctggccacacttgtgtactagaaagctgatcctgggagcagtgtttccttctgtcgtgtctcaaacctcatctcctgaaattcacaactgagaagttctaatgtgctggtgggatgatgtctggtggagtttttatcatctgaaactgttgaaatggagttcttggtaaagaaaatagcaaacaaaagcaggatcaaagttgctaagggtaaatcaaatcaaatcacatagggatccacactcaagccaactccatggattcaagcgggagggatgagagaggaggaagcccgtgggaggtgaggaaagggggcctccatggcgagggctggagctttgcattctggctacacaacccgctcctcctgggatcacttgatctctcttatctcctgtttcttccttccctgaaagaagaatgatgccagttcgtacttcacaggactgtactggaactcacctgaaagaagggcttgtagcctaacagtgctagcaggttactgtccgtggcacctggcacatgccctacaaaatttgattgattcaacaaaggatgataaagaaaacatttaattataccagatatcaaataagtagggtccctttcctgcctctcctttctctctctctctgtctttttttttttttttttttttttgagacagagtttcactcttttgcccaggctggagtaaaatgatgtgatcttggctcactgcagcctccaccccccaggttcaagtgattctcctgcctcagcctcccgagtaactgggattacaggcacccaccaccacacctggctaatttttgtatttttagtagaaacagggttttgccatattggccaggctggtcttgaactcctgacctcagttggtcagcccgccttggcctcccaaagtgctgggataacaggcatgagcccccactcccggccctctcctttctcttaattgaattgatcgattatttaattaaaattgactaaagagactggttgttttgatatcaaacaagtatacagctggctgtcacatggaagctttcctgttccttgaaccttagttgtgcctctagcctcggagagcctaccgatctcaggacaatttctgcaaattttcttagtcttctgcctgaggattcctactaagtgtcctaaatgattctacctcacatcggattaaaggcaaaactctgtgccctcagactctgcaccaagcctttcataagtaactttggaagttctgcatgccacaggaagagcccacaccgtgccctgcagggctggcaccacctgagtggctccccctttgtgtacaggcttctcctctctctagttcccctccatttccccaagccacagccagcatcattccctggaggagagcatttctgcccttacctggactccttcggatctctcattctacgccaagaatttaccaaggaaaacatccaaacaaatatagttcctcttctgagagaaattctgatcctggcctctaagtgaatacaaatatttccctcttttcataaagaaccacaaagtagctttttagagtagctggacataaaatgaagttaaaacatttaagtcatttggccctatagtcttcatctgtaaaatcagcatattcacatttgtctaagagaagtctgtctttataccagcttcaggcaaggtatgcaaaggtagagaacggtgatggatgcttagcatgggattcccatgggccacccagaaccataagcaacggcctaagtgaactctgcagaatcaagaggtgatgtccacatccataaggcaacttctgtgaaaggtggtgccacctcctactcaaaggatgctgccgattccatcagtcaggtgcagttggcattcctgcatcctatgtgtttaatataatatgatagaatcaaattgtggtcttttcctttgcaatgtcgctcattacaatctggagagaggcattttgaggtcccagggtgtactttttaaagaaaaccgagaatattggagtttgctttactttggtttcggggttgtaattctgggcaatctgcagcaaaaattaacacgttccagatgatagcagaggaaacacacactcacacatacacacatatactctagttctttttctgataaaaaaaactttaagaattatttgtttctcaggattcatttgttccaaggaagggctaaccaagttttaaaaatatgtgaaacatcacgcctgtaatcccagcactctgggaggccaaggcaggcagatcacgaggtcaggagatcgagaccatcctggctaacacggtgaaaccccatctctactaaaaatacaaaaaattagccgggcgtggtggcgggtgcctgtagtcccagctactctggaggctgaggcaggagaatggcatgaacccgggaggtggagcttgcagtgaactgagatcgcgccactgcactccagcctgggtgacagagcaagtctctgtctcaaaaaaaaaaaagaaaaagaaaaaaatatgtatctatgaaacaaccttaaaatggtacatattcgagtagaagaaaattagtatttgtcatacatatttcctttcccttgccatcctaattaagttgtcaatataaagtcttaattagatttcctatgttaggtcttactgataaagtagctgcagcatgcaatttaccccaaactgttaaagtttagttttcaaactttcctccccatttttgtctgcaggagaaagaaaaagaactgaagttgaggccgggcgcagtggctcacgcctgtaatcccagcactttgggaggctgaggcgggtggatcacctgaggtcaggagctcgagatcagcctgaccaatatggtgaaaccccgtctctactaaaaatacaaaaattaactgggcatggtggcatgtgcctgtagtcccagctactcgggaggctgagacaggagaatcgcttaaacctaggaggtggaggttgcagtaagctgagaccgcaccactgcactccagcctgggcgacagagcaagactccatctcaaaaaaaaaaaaaaaaaagttgagttgagtagggtgtgtttgctttcaaatggccagtgggaaacttttggtctcagttcagagtttttctttgcttccctctgcacagagctccccaagctaggcatccaagcctggcccacagatcatgctgggttagcactgggaactcggtccctctggctgagaagtggccccaggatggctcaggaggtcagtgaaatcatggcaatgcatcccatgtgttagttaagcacttctgatggaactagcttttattaatgtttaaaaaaattatacatggtttagttccatttttgtgaagttaccttgaggcttaggatatcaatggacttgctcgactgggattacaattttgatttcctcttctcctggctgcccactgggactcatgcgataagtttccatgtttcctaatgattggcattggaaagtgtatttttccactttctttgtatatgtggttaataaatatctttcttagccctgcaagctgaccaaagcctcaaagtgtctgctgtggttaaacagaatttgcattgaatgtatttgtaagaaaaacatggttaaggcctggagcttagcttcacacacctttgcctttcagtagaacctccctgggcttaagttcttgtggcagaaagaggttcatgactcaggaaactttcttgtttcttgcctctttctggatgcctaagtggaaattattacccaaatattatttttccagcactttcatcaaattcctttttaatattgttattgtagccatgtcattatgttagccagatggtatgttgcagaataaccaatttggtgaagctattggacgttgactccattggtcaggtgtgataacttttctctgatatctctgctttatttatttatttatgtgtttgtttatttatttattgacagagccttgctctgtcgccaggctggggtgcagtggcaccatcttggctcaccgtgacctccgcctcccgagttcaagcgattctcctgcctcagcctctcaagtagctgggactacaggcacatgccaccacacccggctaatttttgtatttttagtagagacggggtttcaccgtgttggccaggatagtcttgatctcctgacctcatgatctgcccgcctcggtctcccaaagtgctgggattataggcgtgagccccgcacctggcctgatgcctctgtttttgagggccaaggaaggtaacccctttattcctttattcattctgcactatcatcacaggcttattatgtgcaaggcactatgctaggttctctgaggacacagcagtggcaaagccctactcttaagggggttacagtctaatcaaggaagtagcatgtatagatggtgaaattctacaaggccatatgtaatgatgttgtaagagtgttaaaaccaaaatgctatgggtattctgaggtggaagagacaactttttccttagatttaattttattttgtaaatacaaaatatacacatagacatcgtgaaaaactttaacatgataaagataaaaagccatagttttcccttcagttcttcttagaagcaactactgttaatagtctgttatttttataggtgttttctgtgtagatgagagaggtagcagtgtggagtggttaggagtggggatctggagacagcctgactgggattagttcccagtttttccttgacactggacagtgtgtgcatccttctgagccttaacttcctctaaatggtggatattgaccgtatctacctaataggtcagtcctactataaacaatttgacaacctagtttttttacttgttgcattgtgaacatcgttccatgcccaggcacactgcaacagtcattctttgtaactgttgcacagaattcccattgcatgataatccttactgaattattcctttattggtagacatgctttttcattcagaaaatgttacttttctttaaggttatgagggcattatgagagacgagacaaacatttgagctaatttgaaggatgcttatgaatttgtggtttactgttgggcagggggcattccaggttggcaaagaaacaggcaggaattaatttattccttcagtaaatatttactgaatgcttactgtgtgcagaaatggagtagagactggagtaatcggtaatgaacaggaaacagctcctgttccaaagtggcctaggacctgttgataaacatatttgaggaatcactaataggggagtttggctagaattggaggtgcatttaaaagggtacgttgttgcttgactttttcaagtgataggccaagagtggtgggttctgtaacctacttgtcccccagtaaaagtttgccaagtggtctagcaaagatatttgtggaggttaacttagcctctatggaattttgacttaaaccatccatcttaactcacaggggctcttgagtcatacctactttttggaagtagacactgataccaaagcagcctcactttaggagaaagcagggagagttgtgaaatattatgcaccatttcgtaaatatatggtggaacgatgggccagggaaagtgaaacaacgtctatgcctgggtttaggagacctgagattttttaaatctagtgatcacaaaatcaaacaatctcaagttcatgagctgatggaaacacctatagtgagctcaaaaatgttattggaatacttactctaatttcctgaataaaggatgccaccagcaattttttaactaccgtaactttctaaggtatgacgctgtggtgtagactgaaaagaagggtaatagagcagaaggctgaggcagcctgggaaacatctctttagactggtccctgcaaggattctttttcacccctctccattctcagtaacacagactctgtgattcgatgaaatgtaaggccaaatactctgagtaggtagagactgaagagatctggcaaaagaggttcattttgaggcattcatccaattcattgctatttggatgttgctctgggagcgaggttttcacactgtggtcagaggccgcatgtgtctcattagtatggtatcataagcataatccccagacagagtccaaggctgaattcatgccataaaaggtgtgtctacttctctagcaacagaaatatttgaaagcaaaagcgatagttccatatatgtcagggaagaggatgttcccaggaagaagcagacaatgtcaaagtaaattcatcaagataaaacagtaattttaatcaatttacggctgtattagttgttaagatgtaatgttgggtcgcatcatgtgctggagatagaagaaataggactgcattatagttagttgaattgatttcttttcgtgttaatgcacacctcagtccaaggcggatgctgccaagaataatatagaatattctaaagtctacagtaaaagtctacaaaaaattctatttttactaagttcttgaaagtaggaaactatggcaggcagtaaattaatcctgttataaaaagccactgctgcttacataaagcccatacaagtgtgtgtgtgtatgtgtgtgtggtgtgtgtatgtgtgtgtgtggtgagtgtgtgtgtatgtgtgtgtatggtgtgtatatgtgtatgtgtttgtgtgtgtgtatgtttgtttttgtgtgtgtggtgtgtgtgtgtgtgtgtgtgggtgtgtgtgggtgtgtgtgcacgcacatgtgtttttgcgtgtatgtgtgtgtattgtggccttggctgtcacccctttttccattgctgtttccagttgcttagggatgagcatttggcatttgaatgtcaggggactgaataagattgaaactgatttctcttgtttgtgaaaatgaaaaatgacacttatgctctactttgtaacacagtctagtaagccattcccaccttattttatgttgaactgaacgtgttagtatctacctgtttttgacatatagaactaccaaggtcagtggttcaaagtttaaaagtactgatattaatgaaaatggagcaacaacttcccaaacttgaaatctctatgaatctataaagagagaacttctgaaacaggctggagtgcagtggtgcgatcacagctcactgcagcctcgaactcctgggctcaagcaatcctcccacctcagtctcccatgtagagtagctgggactataggcatgcaccaccatgcccagctagttttttctttttttgtgtggagatgggggtctcactatgttgcccaggttggtctcaaattcctggtctcaagcaatcctcctgcctctgcctcccaaagtgctgggattgtaggcatgagccaccacacctggcctgattagtgatttctaaatcagcaaataccatgacacaaaccaaagcaagctaccaagtcctccagtctacaaatgctaactcttcacttccatagatgacaaagccactaagatgagcaggctaataagcagttttaatatttgaccttttcttagctcccagttggccccctaattattcttattcatcataatggtaagagagcaagttttattttggtaggcttaggaactgtggatttcagtgaagggctctttatattcataatgaaataggtctaatttcaagtataatttgtctgatagtttaagaaattatgtatgagcataaaagctttatttcctcatttgcaattatgagaggcaatgtgtggtgctattctgtcagatcagagacaattatggaagataaacatggccaaacttgaacacaaggatttgggttttaagtacaactttgtatgggtgcacttgtaagatgatgaagagcatattaaaagatatttcaaaggaggaagaagcactgctattctttccttaaaattatgcaaactgtattcaatcaggatgaatttagaaaactcagtgaaacttttaatactgttattaatatttgatatgacatactgtttaatactgttactaatatttgatatgaaattatatatgtactgttactaatatatgatgtgaagttatatatatactgcttaatactgttgctaatatttgatctgataagtgtatatgttgacatagataacagaatcctacctttgtatactaaattaaaaggcaacaaatttttaaactaatggccaaaaaaaaacaaactaagatcttagtaatcatctgttccaactcatagtttacaaatagtatctccagttgtttggaaaaagcagaaaattcagaccaaagccttttttcctttataaataagatggttttactggatttttttccttagattggtttcaaaattttaggaaattgagtagtagttatgattttctaatacaagtccttataatctattatcttgtaaaagtcttgttttcctttaggctttaccctaaaatcacattgttttaaataatttatttaatgaaattaatgtagaatacaatgtttctgtgtttctctttcttgaagtgtgaggaatacttgactgatcagttcagcgttgtgctgacacactgcagcattgtcagccttcacacatttcagaataaaaatgtaatgttaaaacatgactaaatgggagagcatattttcttatttgaaatatatctgtaggccgggcacggtggctcacgcctgtaatcccagcactttgggaggccgaggtgggtggctcacaaggtcaggagatccaggccatcctggataacacagtgaaaccccgtctctactaaaaatacaaattagccgggcatggtggcgggcacctgtagtcccagctaactcgggaggctgaggcaggagaatggcatgaacctgggaggcagagcttgcagtgagcggagatcgcgccactgcactccagcctgggtgacagagcgagactctgtctcaaaaaaaaaaaaaaaaaaaagaaatatatctctattcgcctttcctgtcacacatatgtgagcacgttttggtgtgcataaagaatctgacacaggtgctacgtgataagaatacgtatgtaagcatatgtcttgcctttctgaatggtggtgggagagactggcattgtccttcttgaagaaataatttttgtaactttctgtaggaagcacctgggacaagaccgccagtgggcacggaggtgagactagagggggagaggaagagaatgttcttgtctcaactgtctgctgctctaaagcatcgctgtttgagacatttacggtttcaaccgatgtaaaacacagagtagataatgggggaaagaattctacactgatagacaatgaatcaggtgacataacagcctttttcctttctctcatttctttgacaggtttgcttcctcaggaaaaaatctatggttgtttaattttcttttcctgctctattgtaaacactttgtagctatttctcttttttttctattcataaaataaccataattttgaaagaatgtccttttaaaagcaatcaattgcttcagcgtacagaaagaaaattattaaagatacaaacgatttctagaattactggaccgacagaactgttttgtcagttcgttttaaagttgcttattcggagtaatgtttacctatctactgctgtggcaactgttaaaataaacaaagctccttgaggcaataaagagcattaaaacacacttagtagaaatggagcttctaaacatttaaggcactgttgcctaggccattaagagtgagaccttgtttggccttgctaaagggataaaggaactgggagggcacatcttgccaaaaatttagctctgagagcacttacctttaatagcataatctaaaattactgccttgagctactatagaatggtaaattaaagtgtgcgtaaacctctctgtgatcatagtgcagtaacaggaaaattattctatatctattgcaacacaagtatttttacaaatgttatgtggccaccttaaccatttcatatttgcaagagattttccccctttctatattgacacattgtaaattgtcaaagtcaaatcgatcatttttcctacttcttgagttttttccaaattgcacaccatctttcatctttagaaaataaaactcatgaatgaggcaagtccaagtgtttacgattcacatggcagtattaatgtttataaagcacttcacttgataacttgttatctcagtttttgattgtgagttcttcaggcctggaaaggtcttttgtttggggaattactgtcagctgttgtataattttggatggttaaaaccaggtacaaatagtggaaactacaatgctaaagcaccttagctaaagcaaataatctttttcctttaaacacattgacctgcatttttgttgttctgtcaacggtaacattgttgctgccagaggatgaaggtacagctccctgagaatccaccaagaaaggtggggtatcaggggacattgtgcagcgagaatatggtcgctcgttatgaaaaggaatgaatgtgctttaaatgtctccagatcttgaacaaaggcagtatcacacttgataaagaagcagttattggctgggcaccgtggctcatgcctgtaatcctagcactttgggaggctgaggcgggcggatcttgaggtcagaagttcaagaccatcctggctaatacagtgaaaccccatctctactaaaaatacaaaaaattagccgggcatggtggcatgcgcctgttgtcccagctactcaggaggctgaggcaggagaatcacttgaacccaagaggtggaggttgcagcgagccgagattgcgccactgcactccagcctgggcgacagagccagactctgtctcaaaaaaaaaaaaaaaagcagttgttatttgtcttctaagtcgtttctagcttgaatgtgccatattgccaagttcaaaggcatatttttccctagatggagataactcacttaaataatagcatttaaagctctcgtagttttggataacttttgggtagcatcttcacatacatcaagtaaaattgtgactgccatctgtcaaatgggatgatttcaaatgaaaagtaagtgaagctggatttttggaggtggtttattttttatttattttatttagtttttagtttgtgcactagttatctattgctgcatccagggacactcgagtgagcatgttgtcagagcaggacctgcctccaagctgactcgggtggcttttgggtggaaatctcagtcctttgtcacacgggcctctctgaaggacacatgtagcacagcagctggcttcccgcagggtgagcaagggagaggggatgctcaagacaagccttaacccttttgtagcttagctgtggcagtggtgccccaatacttttactgtattctgttcattataagtgaggctctagctacagcccacactcaagaagaggtgattgcacaaatggatgtgaacacaaggagatggggaccactgggggtggttttagagcctgcccaccaccctgggccacccttgtcctctccatagcttgttggactttgctatgaataatggtaactagaaggttgtgatgtgggaaaccaagaccaggctctgttctcccgcctccgaagttaatcataggaaatcttccttaatatatgtattttgattgcaaataatataaagccttacatagcaaagttataaaaatttgaaacaacaacatacatacagagcatatgccatcatgttcacagagggccctgtgctaagtgcagagggtgcgtgaaggggtctgaggcaatatcacacttgataaagaagcagttgttgcctgggggaggtggcttatacctgtaatcctagcccggccttgaccttactgagcccttgacatttcactggtgagaaagacacacagaataaggatgtggtacggcggtgaggtcatgcacttcttgaagacagcacagactcaggatcccgactgcagtggtgcaaacctcagccaggctacatagctgtacccactgggcctgcttcttcacatgtaaaaagaaataaaagactttgtaaaatgatgataataactacaagagttaattgacgtgaaatgcatagatccgggcttgtcacacagtaagcacattagtatgagctattactaacataaatgaatagttacatgcactatgcatgctctttaagatggtacaatcatgtgagcgacttttattcttcttttgacccagaaattcacagaattaggtaattttatgtccaacatggattaacattaaaaaatctcacctaggctaaaaaaaagagaaatgttctatttattacatttttatttgggggccatgtcaattggggtgattttattgccaccagaaattctgcataccttgatacccttcggtttcttttagatcaagctgttttcattttgtttttattcattcattcattttgtaagcatggatcccctactctggagcagatacagtaatgggtatggagatgacagagataacaaagattctaccctactgaagggccccactgacgtagaagtacatgcaaggggtgctggatgagacataggcttgaggggtaccagggactaagaaatctctgttggaggagggtatggtcctggacagcttccaggaggggaagcatgtgagctgtgcaggaagatgcctgatgcagaaaggacagggcagatgcaggtgatgtagttttgcagtagcatggagcgcaggatgggcacgggtgggaaactggagctgctagcagagcaggagccaggcagccccaaacccaggggaagaatgatcacttccatggccactcagagggaaaaccaaagtccccggagcccttgcaaggcctggcatgatccggcctcctggaggcctctgcttgcacactgggctctttggggctgtcttctgtgagttggaagggtcaggcttgcttccactttgcctgagtgcttctcctatgggaattgacaggaatcgctcactcagctcatcacctccctcacctctgggcttcaacctcactttcccctgcaagcctcccttcccctaggctgcagccttcccttctctggctggacttcttgtggacatagcacttcctttccaacataccacatgctttgcctttgactatgcccattgttcactactgtctccccaccagaacgtcagctcccaaaggcagggtacaatctctcatttccgttttgctctctgatgtagcccaaacacctgggacaacgcccatcacacagtgtgtgctcactacatgtttgttggcagatgaatgaccaaatgtctctacaatgttctataaaagacttcaactctggatgagaaataagcaggagagaaaaagcagctggaaagagaatccgagcttgtgttcttgttcttgttcttgcagatcacctatatttgcctgtcactccaatctgtggtgtgaacatttctttctgctttgaacctttaagaaaggaggttgggatgtggggagtggtgtagaaagcaacaaatatgtgcatgactcctttgggataaaaagaacttcttttcgattcctgttctcttctcccatggattttgctttattgcatttttattgcaataaaattattgcattttgcttctttcctcgctgacttctagaatcagccatggaagcaggcaccacgggttctaatgcagacccttggctggagtgtgctatgctcctgttgtccgcattctgggattagtgcttcttgatctggtcttcctgtctgggtacccgccactcgcatcctgatgtgtcccctcagcctggactgcgccctagtccctgatgcccagcacttctgtgaccaggagcacttaggcccagtctgttccctggcgtcctctgctcagtctcccgggcctccccttcttgcttccagcttcctggttgtggcagcacgttcactgcacttccataggttgacttccttccttccttctgggctgaagcccttctgcgagggcctgcaaggacatccttaccggcagtcacgacagtctagtctcccttttgcagtggacttcttttgtgaaaacctttccctttgtgaagctaggctttcctggtttttctcatatccgtctcgaatttttctgctgcttttttctttcctacctgccagtttgcttgccccctctcatcccacatgtaggcagagctaagacaaacacctgcctccttcgtgcctctctttagtgttctttccttcagagagttcattttttcttattatttcaacaaacatctctgttcagggcttgatctccatgccccttgatagtcaccgagcaggaatgttgacagtctgtggggttggtcccctaagattatagtgccgtatttttactgtactttttctgtatttagatatgtttagatacataaatccttaccattgtattacagttgtctatagtattcagcacagtaacatatgctgcataggtttttggcctaggagcagtaggctacaccatatgtctaggtgtgcagtagggcataccatctttgtttatgtaagcacacagttcccacaaggacaaaactacctaacaatgcatttctcagagcatattgctgatgctaagaggtccatgactgtatttgtgtcttcttcaatttctattatcaatgttttatattcttccatttataggtctttcacctccttggttagatttatttctaagtattatttgtagctattgtgaatgggattttttaaatttctttttcagatagttcattgttagcatatagcaaataccactgattttcttgtgttgattttgtattttgaaactttactgaattaattagttctaacaattttttggttgaatctttagggttttcttaatataagatcatgtcatctgcaaacacaaatttgctttgcctcttcctttccaattttgatgtattgatttctttttcttgcctaattcctctgcctaggacttcccgtaccacattgaatggaagtgtcaagagtaggcatccttgtcttgattctggtcttaaaagaaaagctttaaattgtcattgttgagtgtgatattagctgtgtgtgtgttacatatggcctttattgtgttgaagtccatttcttctatatgtaatttgttgagaatttttaccatgaagggtgttgaattttgtcagatagtttttctgcatcttttgagaagatatatggcttttgttcttcattctgttaatgtggtgtatcacattgacagctataggtatgttgaaccattcttgcatccctgggataaagcccacttgatcatgatgaaggaggcttttaatgcattgccgagtggggtttgcttgcattttgttgagtacttgtgcatctgtgttcatcaaggacactggcctgtaattttctttccttgtattatccttgtctggttttggtatcagggtagtgatgaccacataggatgactttgcaagtattccctcttctttaattttcttggaagaatttgagaagaattgatattatttctccttaaatgtttggtagaattcatgaggtcctgggcttttatttatttattcatttatttttgaggggagactttttatcaccgattccaatctccttactttttactagtctgctcagattttttatttcttcatgattccatcatggtaggttgtatattgctaggaatttattcatttcctctaggttatccagtttattaatgtataattgctcatagaaatctcttataatcctttatactcatgtgaaatcagtggtaatgtctcctctttcatttctaatcttaattttttgcatcttctgtcttcttctgagtctgaggtttgtggattctatttcttttcaaaaaaccaactcatagttttgttggccttttctattggttttctattgtctgtttcatttgtttctggtctgatctttagtatttctttccttctaccaactttgggcttggttagcttttctttttcttgttccttgaggtgtaatgctaggttgtttgagatctttctttttttttatgtaagcatttattgctataagcttctctcttagaactgcttttgctggattccataagttttggtatcttgtgtgtccaattttgctaatcccaaggtattttctaatctcccttttactttcttactttcttctttgactcattgactgtttaggagcgtgttgtttaatttccgtgtatttgcaaattttctgaaattcctcctgtttttgatttctagttttgtaccattgtggttggaaaagacacttgatatgatttcagttttcttaaaattgttgagacttattttgtgacctaacttatgctctattctgagaatcctccatgtgtgcttaagaagaacgtgtattctgccgggtgcggtggctcacacctgtaatcccagcactttgggtggccaaggcaggcggatcatgagatcaggagattgagaccatcctggctaacacagtgaaaccccatctccactaaaaatatgaaaaattagctgggcgtgtggcggatgcctgcagtcccagttactcgggaggctgaggcaggaaaatggcgtgaacctgggaggcggagcttgcagtgagctgagatcgtgccactgcactgcagcctgggggacagagcaagactccgtctcaaaacaaacaaacaaacaaaaaaagaatgtgtattctgctgctgttggatagaatgttctgtatgtgtctgttagattcatttggtcaaaaatgtagtttaagtctgatgttttcttattaattttctgtctggataatctgtccatttgtaaaaatggatattgaggtccctgctattattacattatagtctatctcttcatttatatccgttgatatttgctttatatatgtagatgttccaatcttgggtgcatatatatttacaaccattacaattgttccctctacttctttgtctcattttacagttcttaacttaaagtctattttatctgatataagtctagctatccctgctgtcctttggttttgatttgcatagaatatctttttccatcctttcaccttcagtctctgtgtattcttaaatgtgaagtgagtttcttgcaggcagcatatacttgggtctttaaaagattctttcatccaagctatgtcttttgattggagaatttaatccatttacattcaagataattttttttttcttaaagaaagtatggttacatttgccttttattgctagatttctccattggcctaatagggcctaatggaggaaaaaaatgttattttttatttttatatatttagggtgtacaagtgcagttttattacatagatatattgcctagtagtgaagtctgggcttttagtgtaaccatcacctaatagtatacattgtattaaggtaatcattggtagctaaggacttactgctgtcattttgtttgttattttctgattgttttgtacttcagttttttcatttctttctgtcttgctgtcttcctttgtgatttggtgattttctctagtggtatgcttcgattttgtactttttgtctactttgtatctactataggtttttgctttgtggtgaccatgaggcttgcataaagcattttatagtatcacagagtattttaaactgatagcaacttaactttaatcatatataaaaagtctgcactaggccagatgcggtggctcacgcctgtaatcccatcactttgggaggctgaggtgggcagattacctgaggtcaagagttcaagaccagcctggccaacatggcgaaaccccgtctctactaaaaatataaaaattagccaggcgtggtggggtgcacctgtaatcccagctacttgggaggctgagacaggagaatcacttgaacccaggaggcagaggttgcagtgagccgagatcatgccattgcactccagcctaggcaacagggcaaaactcagtcacaaacaaaaaaacaaaaagtctgcacttttatagtccacccccaataacattttatgtgtttggtgtcacaatttacatctttttgtactatgtatcccttaaattattgtagctattattattttcaatagttttgtcttttaccttcagatttcttggttagattttaagaccagtgatgatgtattttaattatctgcttctcgtcatgctcaacacagtgatgaacatagaataaatacctaatttattactgtttaattgacatatctattcaggaagtgacactgtttgatccagtgacatctgagaccatcttttgttatgcacccctggttttgtcaacctgcctttgttaatgatcttctcactctcttctctcttcccacccacagcatgtgcattccgatacaatgggctctcctttgtctaccttatctacctcttgctcattcctctgttctcagaaccaacaaaaacgacgatgcaaggtaagagaattttgttatcgtataccacagagttatacagtctgaatgtattttgctgggctccttgggatggcctttatctaatggcagagatgttatctatgcagcagggctaatatggcatggagtgggtgtcaaacattttaagaactacactaagtagagctgtatagaagttgtttgtgatgcatgtttgtcacttacacagttaacaaattccctattagggcttcatagtaagcatggcagtatcactggaatgttttggctagttaacactactaactcaaagtattgtcaataaaataagacaaatggcatgacaacattggtacatacatttgttttttgggttgtggggagagtgtggtggcaactggaagaggccgagcagcatttgatatttatgagccatttacaggagaatggggtaggaagatttgtcccagccataacttcgtacattagttgaggtttcttaaatatgtctcaatagcataatgaaagagaataatttgatttgaagatgtagctcctcaagtgtgtttctgcaacacttcagctcccattctggttactctataagaacctgaaggcatggaatataaagtggtgactataatttctgaggctctaattaggaaacatgctctggtttgtgaatttttcaacttcaagttctgtcacaagtattaaaattaaaccacactgagttaatttagtaaattgtctttttttcaaaactctaccgttatgagaagtacggcctgtgccaaatgttgtaggtgagtgcaatggccgtatgtttacatgaaaggaaaaggaagttgtttgaccccatctatggagtggtgtgggaaaggtcattggtgatttccttgttagtgatcaactctttagaaaaagaagtaaagaccacggtgtacacagaacaacaaataatgactctgtctttcccattctccctcattctctgtaaacttcataaggcatgttatgatcattcatcatagtagttatgactgcagatggcatgttgattttcctgtctctaaataacagtaattctaagtcacctaaatccttaatacacaatgcatataaagggtagagaaatgtgagtttatgcaaatccttataaaactaaaaatatattgttaatgagaccccacccaccacagcctcattcctaaaggaattagcataaacagaatagtttccggcctgagaaacaagattatagcatacaggcaactactattctacggtgtggagctccttttccaaagaaagaaggttgtgcgtgcattcacaataaagtgctttaaaaatgactacctttatatatccaattaagttacctatcacttttatatcagtgtggccctttattgttttatttggaaatcaagtaactgggatttccccctacatacttctgtgacaacccctgactttttctttttcccaaactaaccagccctgaatatgcagcaatgtcagacgtgacaaacagttgatggtttatggacatcagttcatactcagatgtgccaaggactgacactatcagggacatcataggtgaaacataaaatcaaaaggaaaaaacttaatcctctctgcataaagaaatatcatgaactaacaaaatgttacaaggtcagtgcacaaacagagcacaaacaggtgcactggcttctgctggcactgctcgtggtaaaagaggagggaagaaggagttggaaaggaaaatccacacacatccttccagtgagcaactgaaagcagcattcagatgacttattttcctctttctccatttagcaccaagaaccatgactaatattcaacataacctcatttatgtgtttgtttatatagttgcagaggggctccaagcaaggatatcacatttttttctgaacatgtaggcagaacacatgcgtttctaaaatctgtgttttgaggcatcttgtgttagaccaagcttgtccaacctgggacccaggacagttttgagtgtggcccaacacaaatttccgaagtttcttaaaacaatatgagatttatgcgaggactttcttttttttttttgctcatcagatatcattagtgtcagtgttatgtgtggcccaagacaattcttcttcttccaatgtggccagggaagtcaaaagttagacaccccggttagacattacttgtggtgcaaggtcctgtgtggtgcatgatggatctggaagagtgaatgcagcatggctttctagggaaaactcaggttcaagcatactcagactttccagtgtgtgttaatacacattctgtgaattatatgaaagtacattggcaaactgaagggactgtcagcaagtcctgcactccctgctcccgggcagcctgcacctgaaacaataagtttgaatcagccttaggagcctgttaggccaccatgtattgctggcaggatgtgctaatgcagaccccacctgaactggaagtgggattcatacatgtaagcatggctccgtggccctctgcccaccatttggtctgatgaggtatttttcttgtgtgactatttttccaatgtgtatatccatagaggtaggtgcccaggatgtggagaatattagtctcataacttagaaggtggacctttgatgtcattcttggggcagtctttttttttattattatactttaagttttagggtacatgtgcacaacgtgcaggttagttacatatgtatacatgtgccatgttggtgtgctgcacccattaactcatcatttaacattaggtatatctcctaatgctatccctccccactccccccaccccacaacaggccccggtgtgtgatgttccccttcctatgtccatgtgttctcattgttcaattcccacctatgagtgaggacatgtggtgtttgttttttggtccttgtgatagtttgctgagaatgatggtttccagcttcatccatgtccctacaaaggacatgaactcatccttttttataatatgctgcatataatataatactgcatagtattccatggcatatatgtgccacattttcttaatccagtctatcattgttggacatttggtttggttccaagtctttgctattgtgaataatgccgcagtaaacatacatgtgcatgtgtctttatagcagcatgatttataatcctttgggtatatacccagtaatgcgattgctgtgtcaaatggtatttctagttctagatccctgaggaattgccacactgacttccacaatggttgaactagtttacagtcccaccaacagtgtaaaagtgttcctatttctccacatcctctccagcacctgttgtttcctgactttttaatgatggccattctaactggtgtaagatggtatctcattgtggttttgatttgcatttctctgatggccagtgatgatgagcattttttcgtgtgtcttttggctgcataaatgtcctcttttgagaagtgcctcttcatatccttcacccactttttgatggggttgtttgtttttttcttgtaaatttgtttgggttcattgtagattctggatattagccctttgtcagatgagtagattgcaaaaattttctcccattttgtaggttgcctgttcactctgatggtagtttcttttgctgtgcagaggctctttagttaaattagatcccatttgtcaattttggcttttgttgccattgcttttggtgttttagacatgaagtccttgcccatgcctatgtcctgaatggtattgcctaggttttcttctagagtttttatggttttaggtctaacatttaagtctttaatccatcttgaattaatttttgtataaggtgtaaggaagggatccagtttcagctttctacatatggctagccagttttcccagcaccatttattaaatagggaatcatttccccatttcttgtttttgtcaggtttgtcaaagatcagatagttgtaggtatgcggcattatttctgagggctctgttctgttccattggtctatatctctgttttggtaccagtaccatgctgttttggttactgtagccttgtagtatagttcgaagtcaggtagcatgatgcctccagctttgttcttttggctcaggattgacttagcaatgcgggctcttttttggttccatatgaactttaaagtagttttttccaattctgtgaagaaagtcattggtagcttgatggggatggcattgaatctataaattacctttggcagtatggccattttcacgatattgattcttcctacccatgagcatggaatgttcttccccatttgtttgtatcctcttttatttcattgagcagtggtttgtagttctccttgaagaggtccttcacgtcccttgtaagttggattcctaggtattttattctctttgaagcaattgtgaatgggagttcactcatgatttggctctctgtttgtctgtttttggtgtataagaatgcttgtgatttttgtacattgattttgtatcctgagactttgctgaagttgcctatcagcttaaggagattgtgggctgagacgattcggttttctagatatacaatcatgtcatctgcaaacaggaacaatttgacttcctcttttcctaattgaataccctttatttccttctcctgcctgattgccctggccagaacttccaacactatgttgaataggagtggtgagagagggcatccctgtcttgtgccagttttcaaagggaatgcttccagtttttgcccattcagtatgatattggctgtgggtttgtcatagatagctcttattattttgagatacgtcccatcaatacctaatttattgagagtttttagcatgaagggttgttgaattttgtcaaaggccttttctgcatctattgagataatcatacggtttttgtcattggttctgtttatatgctggattacgtttattgattttcgtatgttgaaccagccttgcatcccagggatgaagcccacttgatcatggtggataagctttttatgtgctgctggattcggtttgctagtattttattgaggacttttgcatcgatattcatcagggatattggtctaaaattctcttgttttgttgtgtctctgccaggctttagtatcaggatgatgctggcctcataaaatgagttagggaggattccctcttttctattgattggaatagtttcagaaggaatggtaccagctcctccttgtacctctggtagaattcggctgtgaatccatctggtcctggactttttctggttggtaagctattaattattgcctcaatttcagagcctgttattggtctattcagagattcagcttcttcctggtttagtcttgggagggtgtatgtgtcaaggaatttatccttttcttctagattttctagtttatttgcatagaggtgtttatagtattctctgatggtagtttgtatttccgtgggatcggtggtgatatcccctttgtcattttttattgcgtctatttgattcttctctcttttcttctttattagtcttgctagcagtctatcaattttgttgatcttttcaaaaaaccagctcctggattcattgattttttgaagggttttttggtctctatctccttcagttctgctctgatcttagttatttcttgccttctgctagcttttgaatgtgtttgctcttgcttctctagttcttttaattgtgatgttagggtgtcaattttagaactttcctgctttctcttgtgggcatttagtgctataaatttccctctacacactgctttggatgtgtcccagagattctggtacgttgtgtctttgttctcgttggtttcaaagaacatctttatttctgccctcatttcattatgtacccagtagtcattcaggagcaggttgttcagtttccaggtagttgagtggttttgaatgagtttcttaatcctgagttctagtttgattgcactgtggtctgagagacagtttcttataatttctgttcttttacatttgctgaggagtgctttacttccaactatgtggtcaattttggaataagtgcggtgtggtgctgagaagaatgtatattctgttgatttggggtggagacttctgtagatgtctatgaggtccacttggtgcagagctgagttcaattcctggatatccttgttaactttctgtctcattgatctgtctaatgttgacagtggggtgttaaagtctcccattattattgtgtgggagtctaagtctctttctaggtctctaaggacttgctttatgaatctgggtgctcctgtattgggtgcatatatatttagggtagttagcccttcttgttgaattgatccctttaccattatgtaatggccttctttgtctcttttgatctttgttggtttaaagtctgttttatcagagactaggattgcaacccctgcctttttttgttttccatttgcatgatagatcttcctccatccctttattttgagcctatgtgtgtctctgcacatgagatgggtttcctgaatacagcacactgatgggtcttgactctttatccaatttgccaatctgtgtcttttaattggagcatttagcccatttgcatttaaggttaatattgttatgtgtgaatttgatcctgtcattatgatgttagctggttattttgcctgttagttgatgcagtttctttctagcatcgatggcctttacaatttggcatgtttttgcagtggctggtactggttgttcctttccatgtttagtgcttccttcaggagctcttgtagggtaggcctggtggtgatgaaatctctcagcatttgcttgtctgtaaagtattttatttctccttcacttatgaagcttagtttggctggatatgaaattctgggttgaaaattcttttctttaagaatgttgaatattggcccccactctcttctggcttgtagagtttctgccgagaaatcagctgttagtctggtgggcttccctttgtgggtaacccaacctttctctctggctgccctttacattttttccttcatttcaactttggtgaatctgacaatgatgtgtcttggagttgctcttctcgagaagtatctttgtggcattctctgtatttcctgaatttgaatgttggcctgccttgctagattggggaagttcttctgtataatatcctgcagagtgttttccaacttggttccattctccctgtcactttcaggtacaccaatcagacatagtcccatatttcttggaggttttgttcgtttctttttattcttttttctctaagcttctctttttgcttcatttcattcatttcatcttccatcaccgataccctttcttccagttgatcaaattggctactgaagcttgtgcattcatcacatagttctcctgccttggttttcagctccatcaggtcctttaaggacctctctgcactggttattctagttagcctttcgtctaattttttttcaaggtttttaacttctttgccatgttttcgaacttcctcctttagctcagagtagtttgatcatctgaagtcttcttctctcaacttgtcaaaatcattctccgtccagctttgttccattgctggtgaggagctgcgttcctttggaggaggagaggtgctctgatttttagagttttcagatttccagctgttttttccccaactttgtggttggtctttgatgatggggttttggtgtggatgtcctttctgtttgttagttttccttctaacagtgaggaccctcagctgcaggtgtgttggagtttgctggaggtccactccagaccctgtttgcctgggtaacagcagcggaggctgcagaacagtggatactggtgagcagcaaatgttgctgtcttggggcagtcttaaacataaaattccagtctctctactgttctgtagaccggggcagtctttaacataaaattccagtctctccactgttctgtagaccagggctatccactgttttgctctcagtgccgtcaacaggacaaagaatatctgagtattattagatgctttcccatgcctatgtttaagctgatgatttgttgcaaagtgttacatactactgtgctatagaagaaagaagatgatcagcagttagatatatgacaaaatgtgaaagaattttgtttttaaaaatgcttgtaggctcagtacacttaactggtgggtattgtctgattagtgagggctgcaacttacagaatcatggatttttaaagttggaacagcttttaggagttatcaagtgtattgcagcaaccagtggtggaatattctacaatagccacgttgactggtcacttggtttcttcttagatattaatggtaccagggagctatctgcggccctgggaagtctatagtattatcagacggttctttcttgaatcaacctgaaatccacctccctgcaaatccaagctattgtttccaactttaagcagcaaagaaagagttaacagagaaccagaaaatcactttacaatactgttgtgaagggaattatcaaaagacagggatttgactaaatgacttcctgtttttagaaatctgggcttttagagttcttgatttgctgtttcagatcttgatgtgtgtaattacctcagtagataaggccccaactagcaatcaggaatcactctaagctttttaaaaagagaacattaaacagaaaggattggttactgaaggggatggaagatttaggaagccaaaaggaatgttgaagcaactggaacattgtcaaggcaggaaggctggggggagccaaaggggcagcatgaacagagctcaagaacgagagccatccaggagccgctagaccctcaggagaaggtccagaaatggcactctgtgcaaccagatcttgcctgggcctcttcactgtcagctgtgtccatcagctgtgaacatcccaagctagtcattagttaagtacccaccattgatccaatgtcctctcccttcagtcttcattcaatgcacagaatattcctagttactcacagatggaatttatggactgatagttgttcctgctgaaaccaactgaaaagggctctggacaatttcagaatcaaaaactaagaatttatgatctgttgcatgactggaggaagcatctatcctaggtttgtgggtaggagcaccatggacacctggaaaggctaatggacacagctgactgtgaagaggcccaggcgaggcctggttgtacatagagccatttctggaccttctcctgaaggtctagcagctcctggatggccctcgttcttgagctcttctcatgaccctgcctggctccctgcagccttcctgccttgttgatgttccagttgcttcaacattccttttggtccatccccttcagtaaccaatcctctctatttaatgttctcttttcaaaatgcttagagtgattcctgatttctggttggggcctcacctactgagataattacacacttgaagatctgaaatagcaaatcaagaattctaagagcctagatttctaaaaatttagttccatccacactgacttcctctcgaggctcttctctctgtgagaatttcttctgaagagctgtgtgcagtggatgctatggagtgatttgggactgagcctcccattcccagcagctgggaggtgtttccttgaccactctgagcaaaatccctccctgggaattgggggtggctgaagggagctgctttacacaaacttctcttccccggccaggggcagcctggacccaatgaccactcagcacagggtgccgaggcctcaaagctggaaagtctctgaagggctgtggcagctccagagcatcccagcagctgaggcccccactgcaagagcatgacaatctgatctgtctctctgtggggtctggatttcctcactccctgccaggtatccctgcaagggaattgccccataaccctcctgccccaggaatccatctcagcctccattgctggggaaccagatctcggaaggtctttgaagcagggacctttgtccctgatggagctcgagggcagaggagtcagcatagaggtggtgggaccttgacacagaagtggctatcacacccagcgaagggcgcacacaacggggaagggtgcacacactcggccagatgctgcagcccaggcccagcgcggctcagaggcccagcctgcaactgacttgacctgggcctgggtgtcacttgttttggtcaagatttcccccactgcaactggagacccaaatccctcagggttattaggctttgtggggatcaaataagcagacataatttaaaacaaaatataaaattactacacaaatagtcactgagtcactgttattagttgtagaattcaccctagtttgaattggcacctctgtgctgtcacagctccctttgcctggaattctcttccccagattttgaatgatggcctcctcccagaattcaggtttatcttagatgtccctccttaaaacctcttccctcacccccttaactaaagctgacatacccacatttatttttcatgttatgagcaggttttatttttcttggtatttatacctttccaaaattatttgtgcgacaaatccatagcaagagctggagttgcacaccctgccactcagctcttttattttcccccttgattctccctgcaaacctcctctgtggggcgaccctgcccctgccccttggtgaaattcttttttttttttttttttttttgagacagagtctcactctttcgcccaggctggagtgcagtggcacgatctcggctcactgcaagctctgcctcccgggttcacgccattctcctgcctcagcctcccgagtagctgggactacaggcgcctgccaccgcgcccagctaattttttgtgtttttagtagagacggggtttcaccgtgttagccaggatagtcttgatctcctgacctcgtgatctgccctcctcggcctcccaaagtgctgggattacaggcgtgagccaccgtgcctggctgcccctcggtgaaatgctaagcagtccccagtgcttctgccctccagtttctcaggcaggagtgcctcatcagtctagcaagtcccccacaccccaggatcatctcatccatgctcctctccctgggcttggcattctctcaaccgtatccaactctcagttttcccaacactgattctttcatatctccacagggtgggggctatgggttgaaaataaatattctttttcgcagtgttcactggagaatgagggagtgtttggcaggaagccttggttcctcagccttttaggagcatctcactgtaaaccaagtcagggttttatgttaatacatttatgtagaatgtctttcccttccagtatataaacatcaagatggcaaggatatgcttttttgcccgaaggttgcctgatgtatatagcaggcgttcgttcagtaaatatttgtagaatgaatgaattttatttccagtgtctaggattttagacgaacgtatgaaactaactctagtcctgtgcttatgtcaatcttcataatagcaaacatcagagaatagttattgcatgcagcagtcctctggagacagaagcttaggatatcataagccatgggatttggcttttagatttaattaggattgcaggatcatgagtaattaaagaaatcaagactcttaaaaatgttttatgctttcgcttacaaggatgggcattttatttaagtatgtaatactgtagggaaggagatgaacattttcttgctcttcacaaactgtgccttccattaggattgagattgtcctgcattaaatttattaactaatgtataattaacgtcaggtcaggtcgcccaagaattgcaaactaatgaggtattacggtttttgtttatttgtttattttgagatggggtttcactctgtcgcccaggctggagtgcagtgatgtgatctcggctcactgcagcctccacctcccaggtgcaagcgattctcccacctcagcctcccaagtagctgggattacagggatgcaccaccacccctggctaatttttacaattttttttttttagtagagacggggttttaccacgttgtccaggctggtctcgaactcctgaactgccttggcctcccaagtgctgggattacaggcatgagccactgcacccagcccgaggtattaagtcttttaacccgatatattacaggttccttataacttatgatatagtgagtgccacatactggtcaatatggtagaagagtgtattttatttggattgaaacagatgcaatatggaaaaaggccacaataagtgctcagtaaatattggctaacatgcccatcacagtggcacctgtctgtagccccagctgcttgggaggctaaggtgggaagatcccttgatcccaggaggccagtctaggcaatgttgcgaaaccctgtctctaataaatttttaagtgggctgttgttattattattttgaagcacagcattattaatttgaatgtcagagtgagctagacttagaaatcttattctcatttgtgtgactatagccagtctttactataggatcttactagtgctttctaaatattagtaaagaaatatgaaatttgcaaggtttttttggtgtactactccaagatacagctggtgtgtccaatttttagttacatagtacttagattaattgattggtcattaaagagctgatagccctctctactaagttcataaaattatttacatgaatttattaatttaattttcacaacacacgtttaagggagctgttactatgatcaataatcctcatgtcacagacaaagactgagtttcatgtgggttcatagcaagctgcaggacacccaggtgctgcatgggtgagccacactcagccactgtgttgttctgactcatgcccttgacgacagagctaacgctcctgcaaatttgcaaagaaagaaggaaacctagtcacttaataaatacttgttggctgatacatcaccaggctctgggaacaagggtctggagagataatgtgagtatgcttaagggagatattttaatatgcattggtgcagatagatcatcacatacctgtatgttacatagataatatatcatattaagtgtgaccaattatttctttcaccaaatattaattgaaggattgttcttcccaaaagactatatttggatttgtagaggataaaaaaggtggagaaaaacactgctcttaattaaagtcacctctcaaacatattagattttatatatcttattgagtggtaactctttcaatgtagcaatcttagaaagccacctccttactccagtgatgcttttatttctctaaactgattaaattagacttgtcaaatttaaaaaaagactagtataaaacaaagggttcaaaggtgactccttatcatgaatgtggaggcttgaggtttatttgaatgagaacagctgggcgaatacacgtggagtaactatgtagttttccatgatgaatgtatgtgatctcacatgttatgaaatgagatacccaggtgagaaggcagcatcctgaggaagtgttaactcactggattcatcctagaatcctgactgtaaaagtcaagcagtatccatttgggacagcccagagactcagagattaatctggagaggttctttatctgaagcactgaattttatgtcacatttctgtgtgccaggtactattctaagtaccctctatacactaactcattgtattagagaatagaaaaaccattgattgcaaaagcagaacctccattctgaaatgaaaaaaaaaaattatgaagctaactggaataaaaatcacttaaactaagaataccacataaggaggcactgaaattaaagctcttttctcctattgaaaaattgaaactgcctcagtgagacctggtacattttggtcagtctacttcctgcttttctttcgtggcttcacttcaccaagcctttccagttgtccacagaggtcctacccacaaagctggcatagatgcttcctccagtcatgcaccaggtcataaattcttagtttttgattctgaaattgtccaaagtccagagcccttttcagttggtttcaacaagaactacagaaacatccttccatttactcacaataattgatcgttctgatattatcagtaaagtggccgcagtctgagataggggacacgcatccagctacagtgtgacatttactctctgctggaaattgtttctgtttgcttatttagtcctgccaacaagctatctttgtgaatatgtgctcttgcaggctggagtagatggacaggtcatatctacttctttcttgggagaatcagttatttattgggggctagttgagaagaaatgtgctccaaatcacaagactacacttcctgggcaacactagccgttgtcctacagccagactattttagaagaatcatcatctaatcagttcgtatatgaaatgtttatgttacacccacacccacacccacacccacacacacacacacacacacacatcctaagtgatggttgctgtctaaggtgtgttaattatttctaagaacaaagttgtcgtcttatccaagaactcatcctcagtctgagagcctttgttctgaatgcagtctgagattggacaacattgtaatagatgaggacaaaaccccacagtggcagatgaaagggaaggacttctggtgcctgtgtgggtttctctgaagtctcttccattgggttgtgatggctagctctcctggagtaaccagaagacagataatgaccccagtgttttgctgaggcccataaaatggccacgggaataataacagaactgcacactgccaaccctttcaggccttgcccccaaaatattttttcaatatgtgcttttgtggagaagatttttctcctccttgttttgaaaggggtaggtttctgaaatatcatttgagtttttttttttttaaacctggtaaattttgctttgttatcttgagcaaagtagcaattccccagatatatttccttgcatttacactcaaaatttattattaattttatatatatatagttttttaggatcttttccaacatttggagaggcagaattagaaaggggtaggaagggaggggcttactgtgctttggtgacaattgtaaccaagtgaaatttttagcagatcaagttaacttttgtaacctgttgtcaaagtccttagaagatagaaaaacatattttattctactctgctctggacaagggttctactttaaaaggaagttgtgctaatcctgtaagtaatcgtgtgtgtgtgtgtgtgtgtgtgtgtgtgtgtgtaaaataaacaccaaaagcaccttatcctgaggctctgacccagcatacactttgccagatcactaatggcccctcagaaaagaaaaacgatgccccatttgaagaggcagtgcgatctgtaacttgtaaagacatgtttagacatcaaaaaggaaatagtagcagacatttaaagctgattgcatctggttttggttaaaaacagtgcttataccattaggcttattattattattatgttttattatgtcataataaagcaaaacacaggaaaatatttaattgggtgaattattaggtgttttattatcaatatcagctcaccaccaaaaggaatgctaaaaaaaattagacgcctgtttcttgaatttttaaataaattaatgcgggtcttttaggttattttagttgttcttttttgagatggtacagatgtcatattccattgttgccttatattgggcatacactactcagtcagacagagggagtttcaggcagcctataattctcagtttaggaaacactaggtcatattatacgactaaagaaagtatttcagaagccccaagctttttgctttatttggctacaataagtgttatctaaaatatggcttcaccttttgtattactccgttttcatgctgctgataaagacatagctgaaactgggtaatttataaagaaaaagaggtttaatggactcacagttccacgtggctggggaggcctcacaatcatggtgggaggcgaaaggcatgtcttacatggtggcaggcaagacagaaggagagccaagcaaaaggggaaatgtcttataaaatcatcagatctcttgagacttactaccgtgagaacagtatgggggaaaccatccccatgattcagttaccttccaccacgtccctcccacaacatgtgggaattatgacagctacaattcaagatttgatttgggtggggatgcagccaaaccatatcaccttttatttaaatgctgccctgttattacagttgagttagttcacttgagttggtgtcagtttgttgatcagctcttcaagttaccattctttcatttactcatttgacaaacgttacctggtgtctgctctaccaggccttgtactaggcagttaggcatacaaaggtaaagaagacagacccttggtcaccagaatattaatctggctctgccatctattcactgcataatctccagcaagttacttgaattctcagattcctgcttcctcgaatgttgagtgcttgttactgatcctggagagaacactgaggggctggcagtgctgttcacaagaactcatcaggcctgatacgtgctgaagagatggataaagccctcaagaggaggaaaccgtagctcctcctttgacttcttagggttattttccctttaaaggtgtttacctgtagctgatttgtttatgtattttttgagtcaatttatttcagtttttttgaagctgacttgcttcaaagcctggacgagactaatttctgatggaataatttattagagcatctgagctttacttcatctgtagctattttgcctaaacagacccatttgaatttgagttgattcacaggaaatagccttttgagatgaaaatttatatttaactttcaaaaagtgcagattattaattataagaagaataaacaggaaacacagtatagctatatgccaggcaactgtcccaagctttctacatagtaattcatttaatgcttccatacccatgagacaggtatagtattatttatgttttacagataaggaaattaagaaacacacagaggctactgaataattcctgaaactatcatttttaaaaattgattcagtgagtgaaagcttctaatataaataattcagttatctatataagcatttccctcattctgctgtatcttactataaaattaatagtgagggaagataaatgtagagattatgcatgttgggcacttgccttccaacatgtaagtagacaattactgtgctttaagctgccttttagtatttcctcagcattaagcagggaagtcaaataaacacactgagaatactggtacaaaatatgcattcatttcctttggtcacagaataagcattactgagtgtctgaaatgggccaggcagtccgcttggccccagagccatgagtaaccgtaagacaggtcttttcaatcttgtgggtcaccattttgtcctttcttctttccctcttccctttctccattttttaaaaagttaattttgcctagatttattttctgcatttttgcttgccagtattttgtgcccttaaggggtattggggaaagtcactaatagtctcctcgggcagtcaggagcaggggctttcaggcttgaagaggtgtcacatgctgttggtggcagtggctgccgctgtgctcttgactgtctacacccagcaggtgtcactgggtgggttggcctggaaccactttcagagctgcagaccatgcaggaggaaggcctggagtacctgagcatgcgtgtgtgcaggattgcatgtggatttcacgtcctcaagatgcctgtttttcctctttcctggcaacctggccagccattaactcttacaggtccctttgcacttaggtgcaaaggaatgtcaccctcaaacatcaatgtcatcatcattatattcgcattccctggggtctaatagcatctgcggaatgaaaactgctcttttaagatgcagggacacctgtcaaagccatactcttagttgttgtggagaaaggccctaactcccagtgtggtggctgctgtagtgctctccccagattccccccgtgccctcctccttaggaccaagacttcgattctccctattgcctggagtgttggtgtctgaaagctcatggctgtgtctgttctgggaactgttttctgctaaaaggatctgccttatccaagctttgcctcctctttgttgtggatgtggctctcatttccaagagtggaatttgggggatggggagggaggagaggagtccctgtccccttgccccttgccctgttcttggacaattcccccgggccgtcttgtgggataggcaggagcctttgctgcactgcgcggctccctcgctcctactccattccaaccttgctccccacccccatcccactgctattcctgaatgctcacccagtgaatcatccacttgccagtcaccaccactgtgtctgtatccacaaccttagctgaccatccaacagctcggacaagtttgcgtccattctctgagagcaagggcagcagtggtgggaggtaccatgcagtaaggaggaccccagggaggcacgtgcagaaaacggggctcctgagtgtacctggacaggccatgccctgcacatgcccccatggaaaggatgagtgaagacggaaatctggtccttgttttgctaccaaaacctaatactgtagttctgaattgcataaactagaatattaaggagtcccatgagtgggctagcagtggccttgcaggaaaaagtaagagagagcgtatcaaagacaagttttggagcaatacacaatttcctgaagatgagccctggctccccacagatgcccctgtacatttcctcttccaccttcctcagccctcttgtatggcttctctatagcctggctgccggagcactgcacagtagattgtatctgtcaagtcctggcctgccttggcctccttggcatgaccattccgtgcagaactaaatggtcgacataattcctaactgctttatcctgtattgagagttagaaagaggccaggccctcaggagaacaagagatggagggagcccagaaagtggctcatagagaggcaagacctgagcgagcacccagcggagccacggcgcaaaggagcacctgccaggtagctgtgtggacgcgtgcactctctcacttccacaattacttgttagctgactgtgtagtaggtgaggattgattacttatttatcaccagttagctgactgtgcagtaggtgaggattgattacttatttatcccccggctcattcaacagccaggttattagaaggccatgatcaaggatacaggctgtgctgaccacattttcataaaagtgagagttcagccaacacttgtcccataggagtgagctgagagcagtgagaaggtgctgattgggctgcatctgtctttgaatagcagtaactgattctatcattcaaccatatgttgctcatcaaatattcagcagctagagctttcacaaaggctttttgaaggcccacgcacatgcagcagggaataaggagacaagtttctgaaagctgggatgggctgggctttgtgtttggaaatgggggaccagccagttgattgggggaggaggttaggggacagttgcctggggaatttttaaatacttgtgatccagagttttgctgatttttgaccttctgtggaacaccctaacagaatctgaatgagcaagtcctgtacatttattcatgcgacaacctatcgcataaagatagcacaacagtgagtggtgggactagatagagtgtgggttgagtgattcatacaacggcaagcaaaaccagacgtagcccctctcagccagaaatggactgtctagttggtgatcctaaagggtaagttgaattgtatagaatacattctaaagcctaaatatagttaatcctcattatttacagattctgtatgtgtgaattcacattcctgctaaaatgtatctgtaatcccagatcaatactgaaaatgctttcagggtcattcttgggcatgcacagactgcaaaaaatttgagttccccaaagcccatgttcccagctgagctggcacaaagtgacactctgctctcttcctttacttctcataccataaacaagtgtccgttcatctatttgatgccacattttttatatttcgtgtgtgatttcacggtttaaaatggcacccatgcatggtgctgaagtgctgtctagggttcccaagcaccggaaggctgtgatgtgtctcacggagaaaatacatgtgttacattggctttgttcaggcttgaataattttgctgttggccataagttcaatgttaatgaaacaataatgtatatcaaataggttttctcttttttttttttttttttttttttttgagacggagtctcactctgtcgcccaggctggagtgcagtggcgcgatctcaaagcaagctctgcctcccgggttcacgccattctacttgctgcctcagcctcccaggtagctgagactacagtcgcctgccaccatgcccggctaatttgttttgcatttttagtagagacggggtttcactgtggtagccaggatggtctcaatctcctgacctcgtgatccgcccactttggcctcccaaagtgctgagattacaggcatgagccaccgtgcctggccccagtaagttttcttttaaaaaaaatttttagaaatgaggtcttagtgtgttgcctggtctggtgttgaactcctgggctcaagcagtcctcccaccttggcctcccaaagtgctgggattacaagcatgagccactgcacccagccaatacattttctttaaaacagaaacactcataacacaagattatgtattgatctgtggacaaaaatgtaaccagaggctcacaggaacctaaccttgtatttcccctaagaacaatggttcagtgttcgctaattctatcttcatagcaatgctatagacataacaaccatgaataacaagaatcaactgtatagatttcacagtagaatgtgagggttaggtttgtagtgacacagaggcttgaaaaaggaaagtacgaccatcatactttttgcaacacatttctttaaggtggttatgtattcctatctttgaaaatagtgtggcctaggaaagcctctataaaatggctacagcttcctctttagtgaagtattctctgtatttgattcacaattagtggtaacttttctgaaatgttttttagaaggcctggaactttaaacttaagactcagtctgcatctcaaagtgccgtactgtgttagttgagtgttatccttacaggtgcaaagaagcgggtgtgaaagaaacttgtacttgtgttttattttcaatgcttaagttattattaataatatttgtttccacattttgaaaagactttatttgttataatacaacaatttcctgaggtagtattatttaaatatatattttatgtataatatatattatattagtgtgtgtgtgtatatatatatatagtatattagtatacacaaacacaaagaaaattttcctcaaaatttttttatctcaattttggattctaaagtatcctactttattaaaatgcatgaaaggaataatagcataaatcttgggaaatgtcagtactaacatactgataagatcatttttacttacaatggtattctttttaaaaataccagccagacacggtggctcaacctgtaatccctgcacttttggaggccaaggcaggtggatcacctgaggtcaggagttcatgaccagccgggcaaacatgacgaaaccccctgtctctactaaaaatacaaaaaaatcagccaggcatgatggcacgtgcctatggtctcagctactcaggaggctgaggcagaagaattgcttgaacccgggaggcggaggttgcaatgagcctgggcaacagagcaagactcggtctcaagaaaaaaaaaaatcagtaagctctctgtgtattttgggaagtatatgtgtttagggataatatggatacttttttccagtagatttcatgattcttttcttactctcagttcttgttatactgatagatttgttgtctctctcttgctctctcaacctctctctctcctacagagaaaaaatctccaaaattaacataaaaattactacagtctacacacacctgttattacatgtgtttgtgttgtagttatgattgccagataaattgtttgaatttcagacatacaacaagtaatttttagcatactaatacgtgggacatttataccaaaatattgaattattcatttgtatttgaagttgaaatttaaatgtatgtgctgtattttattgtctaatctggtaaccctaataatcatacatatatgttctgtgagtgtgtgtgtgtgtgtgtgtgtgtgtgtgcgtttaaagggaggagatatttcctcttttttcaaatcaccatttgcttggctcagtttgggctccataagataagcatttgtagactccagtcttcaatttaatgcaaaagttgatctactctaccaagtgttcatttatacagacatcatacgttaacaacaaaacatactagaaatttgatcaggctgggattatggttagccaattagacttgtatctggagtacccctcctttctatggccaaacaatttttttggataatatatttttgtctttagaaccaaattactgataaaaccaataattatcctcagattcttctttgaagaagtattttctgtatctcatttaaccataaatttaattcaacttggaaggttgattagcatccctgaattattttattagcttgagttacatactgacattttacaatctacttaatgtgctatggattttatttctggcatttcttttcctgccccccaaaggtgtatgacatctgagcaaatctgagaccaagcatgcccatctggtgacaatgacgattgcctttctaatgggtagcctcctctcaggcactgagatgcagtagcatgtaggatggaaagagtccacatctgtggacaggtcaccctgttctctaacctcagctttccaccctgcctcccaccacagcgagtctagctcagacagcattatctcagggcatcattgttttgcagacaagaaaccgacactggtcactggtgatgtttattcattcactgttttgattgatgaagtagtcaaacttcctcttcccacactagctatctaaaatgtggccacacaagggtcagagaggactgtgtgtatgaagtgcacatggccatccccagcctgcaggcctgcgtgggtggggtgggatctgaccctgtgtgactgagctgtgacagctgctcctggctcctcatagcagccctcctcctgagactgtggggacgagggctagatctcagatccagggtctgtcctctgagaagtcatctttacaggcggatttcttagtgtttttcattggcagaggcaggcttttccttgtgtgacctcaatgaaagtatatttgatcatccttagaggagatgactagaaggtactccatattgtctctccccagaacactgctgagaggcagcatttttaccagagagatgatttggccttcagcaagtaatctgaaatagaaatgatggatagaagacgctagccaaccaggagctcagagaagatggtcatctagacagagatacctggggcatggcagtcatggagaagagtcactgtcactctttctgctcagtcctagagatagttttcaatgccactgcattttgccctaagtggtaatatagatactgaatgaatggatgttactctgctggagatttcaataaagaggtagtaagtaggttccttgttgggttttactcaattttccaaatttgtatagcatttacattcatttacatttttataagttgtcgttaagcagcaatagtttgtattttttttacattaagaagaaccatacaaattgacatcgtagaaaaatgatgaaaaaatgtagtgtaaacacaaaagaccacagatgtggagagataatatggtaaaataaacaatgagtaacatcatgatgtccttcagttccagctatttagtataaaaacccactgacctttacaaacaatgaaagtgactgtgtggagtacaggatggattctatagggctgtttttgctttgaaatcatgcctttgtctattcatgaactcgaggctgaacttccaaggccactctttcctccaatctgcacagactttcacagcttctgagctcggtgtttaatttctctttctctttatccttagggctcttgattaaatttgggaacttgtgaattatgtagtcccatctacttagcagctggagggcagcttctctgaactttgaattttgcatattttgcagatattaatacatgactgtttagggttccctggcagattattccaaaaacttttgggcagtgatgagaacagtttaatttgaagacaaaccatttcatagttcgggttttagaattcgtcttttctcccacctgccttggactgtccgttttcagaggatgccctaactttccaggttgtgtgcctggtctcacccagagaaagggttctgcttccaccagagggagctgttttgtagaaaacagttcaatgtggcatttcaaggactttcggaccattcccactcaccccatttaattggcctcattcctaatttttctagaaaaattaaaataattttaactgatcttttattttaagtgttatttgaggtttgaattgtgaaaaagtaagaatgtttttcagaaaggagactaatggaatccaacttcatgaaaatcaaatttattgggaagaaaagtggcactaagaactgacttaatgtgaaaccaaaatacacttttttcgcccacattgaggataattatggggacgaggaccaaaagataggaggaatgatttcagaaagagacgtctctactctgggtacaaatgcacctaatatgcaggtacatagatcatattagaatatgtattttctatatgaatgatacaatcctgaaaattacgtaacattcacattcccagccaagtacttctgtgctattgttcaaaaacagcaacaaaacatccccttatgtagctaatttaattataccacagaattgctttacttatcaatagtgaagatgacagttaaaaccctgattatgttctgatcaatttagtcattacctcctcaacctttattggatattttcttagttaggacttaagatataaagaaaaataaataaaataatgtctctaaactcaaggagttcaaaatttaattctgaggttatatttagaaacagtgctaaaggagtaagcgtaaggtgtcaataataataatagaagaaatagctaaaatgtattgttctaaaagggaagagaatggacttcttctggacttgttgaagagcaactactgaaaattctgattttggtttgacatagctgatatgaagccttttttttttttcagatggtatttagccaacaagaactctatgatttttgaggcttttcctgaaaagttaaagcaggttcatgtcatctgtagaggtgtatatttgactttctggactacagtttatccaaggctgttccaacttgtatagctctcatttaaaaagcagagtctgtgtgtctatacggggtggggagggttggagaggttaatgcagttgtatttccttttcgtaagaatgcatcaggaagctaaatccttgaagggatcttaaaatatcaagtattttagcttattttgctagtttttaattctgagagtggtgatgaaaaggggaagaaattttgtgtgtgtgtgtgtgtgtgtgtgtgtgcctatttaaaatagattcaacttaagaagtgaagttatataggttaataggatgacatatataatcatccaatcaaccaataaagatataggataatatatgtcatcccattgacctatataacctcacttcttaagttggatctattacatgtggatcatatatatatgttagttatatgacacatatagttatatatatgtcagttagaggagagtgagaaaggagtattcaggatatttgcttgaatgtttgacaggagagcaccactgttctgtgacgtaaaaccagaaaatggagcataataaaaacattcgccaaagcaggctagtttaagaagaaatctgttcaaacgatgtctctaatatcttggagcctgcaatagcttttttccgccctttctgcctatagaatgttccatttgtctgtttttcccctttctgcctacagaatgttccatttgtctgcaaaattaaagtcaatgcatgtgtgttatcttctgcaaagagtgtgctgctgtcacccaatcgcttgttgagcccagcattgcgggagggattttatgcatgcagaccatgctaatgaatttctatgtattactttaagctatagaggttgtattcgttctgttctttcctttcccttcctttctgttcccttttgttttattttcagcctgggatcttacagactgcctgagcttggttgttaagactaattttgtgaattagacacatatcctaaacaatatcttttgcccagttattttgcgtaaggatatatcaaacacctatccacctatgtctagtcaaagctacagtggtttcaaaatcatgattcttactgtcttcttttttatcttaaagaggttggaaacattggaaaattcaagcatagccctttatagattttttaagtttcatatgttatctaatttgtgtctcaccgttatacctataggttgtatagagctaattttatttgtatgtatgcatgtattatacatttaatcaatgcagaaattgaaatgttgagaagatacataatttacccaagaacacttattaagcaagtggtagggccagtagaggaagccacgtttctgggctctgatggaatgctctttcctgactacatgctgctcctcagctgcactgtggggtgttcacaggtcatagatacattcagtcttcatccaggggtttgcaggaggagtactgcctcccatatctcaatgggtgttggaaaatgatgaatgagcacaagaaactgcattgtacctaaaacttttggaatgggtggagattcttaaataagggcctccggcttacacttggcatgggaatggttaccttttaatttcctgtcattgagtaagtttgagttaaaaattaaggaaggaaaatacaacttagaaataatattgctcagctaagcagtttaaagatttgtggctttttcttgcaagcaatttacattatccaagcagaatatgatgaattatatgtgaacgggtggtatgatttttatggctgtgttactgtatagtggttctggtgactaggacctagagaaaatgagaaaggttataaagactgtaattttactagagttctcttaaagtgtgcagagtatcttttacaatgttttgagccaatgaaaaacaagtgtgacttcctccttcttatcttacatctcacctactgttgtttaactcagaagtccaggtggacataaatgcatacaagtgtgtggcaatggggtattcaggttcttactcagagtcttatttggtccagaagtgtttttgatatggagacaaacttggaaaggaaaattcgtttgcagaaattatttaagtgcctaacaaacctatatggatggaaacattaagaaaactttgcatattatagcccctgttactttgacatagaatcataattctggaagaaatccacaaaggtcagcaggcttttctttgtttttcttcagttaggcaccaagtcaaacagactgccggagtcacaggcctgtcatttcatatgtgtttaacagcaaagtggtcttctggaaagagggctggaaacagggagagtgctttcagaaatggcagagtaggttagcttcttttatgaagttccctctcattccaatccataataatctctctcttctgaacccctataggacataaagtccatatttcacaatttaggacttacaatctactctaattgctcagaattttaaaaaataagtgtgaattgtgttgaactgaattgtatttttcttccaatttatttcatagaacatagaattggagctcaataattattttttagtttagcttgtttgcaaactgaccaatacattaacaataaacgttttcatttctgtttcttctctcctcttacgtggcatacaatttctaggatacatcttttaagttgggataatacactgttggggtaaacatataactttctctgtaataagtgttgcaaaacgaattccatactgtacttttctgttttataagctagaggcgaaggatgctttaaaaagttctgactggccgacatggtgaaaccccgtctctactacaaaaatacaaaaattagccaggtgcagtggtgggtgtctgtaatcccagctactcaggaggctgagccaggagactcacttgaacccagaggtggaggttgcagtgagccgagatcgtgccattgcactccaacctgggcgacagagtctcgctctgtcacacacacacatgcaaacacacgcacacaaataagaaaaaaaaattctgactgcaagtatgaagtgcctgggtccacgtggagtttatatctattgcaatataattacgggattttaacacatcactctcaatcacaggacataacaactgtcagtgtgtgacctggtttggcatgcagatacttacccatgaggagaataattcagtatcaaggagatatcaaagtaattcaattttattatgattttaatgatactttctccaaatttatcgcataacacaaactcagtagagccatatcggttacattggtgaaaccagttttaattattcagtgcctgcaaaagtctgtcagagtttatataaaataaaatatgtatatattttatattaaatataaatatttgatttctttatttatatcttattttattccacagaatgtaaggttgcttacaaaaatatatgcagcataacacagagcacagcatacgaataaagatatatccagggataaaattaatacccaaagtcttgcagctttaccgggggaggtggggttgccagaaattccaagtgttttagcagccaagtcaaagagggaaatagttatgtacagaattcagagtccctaagatgaaaaacattaggtttttcagcagtgtagcaattcttaacgttatggcttggaatcaattctgcttattcattcccaggaagaggacacagtgagatgctgtgaaaccacattcttataacctcttcagcaagtaaaataaccaaagctattttcctgcttaccttaggcataagatacaatttaggaactccaagggaacaaagggcttcatttgctttaggccaaggggttctcagtactgcaggcacattagaatctcctatgaactgtgacctgggcctctaattaggtcagattctctggatgagggacagaggccttgcttgtattgacagatcccaggtgactccaaggtgtgccccaactgagcacctgtgcttcaagcatgttccaggtgtggacttcttgctaacaagcaaacataggaagtggcagagatttggagttcattcctctgacaagtatttggagtacagatattatttgctgttcattaggggagacacccatgggctttaagagtcagagtttcatattattttaggagttggcttatttacaaatatgtgctgcacctgtttagctcatcttcccagaggtagttttgtggaataataatttcatcatcataatcacactttccaaccctctgtgtccattcttcagggataagagtgacttcctatgcatattagaggtctctgctgttttttctatttcctgataattagcctgcagatcctctttgtgtggtagctgccaagtaaattgcatgtgtcccctgctggcaagaggagttgtgttagcccattttgcattgctctaaaggaatatctgaggctgggagatatgtaaaggaaacaggtttatttaactcatggtcctgcaggctgtgcaagcacggcactggcgttcttctggtcaagacctcaggaagcttttactcattgtggaaggcaaggagggggcaagcctgttgcatggtgagagagggaatgagagagagagaaagagagagagagagagagagggagagagagagaaggtgccaggctttttaaacaaccagctctccgtgaactaacagagcaagaactctctcattactgctgggaccaaacacctcccaccaggccccatgtccaatattggggatcacatttcaacaagaaattggagagaggacagtatccaaaccatctcaggagtcagaagcagccctcagctccatccccttctacacactctgtaataaattgatttcgaaagtgaatgagcttgccatgcatttgggaactggggttgcttctgctttgctctgcaggctgagaagaccttgagttaccttctgactcattcctaacgttggtggaaaaggaacctgtctggcagtcaggaagttgggatctggtgaacacatgatacacaattttaaaacgattatgagtgctggatacttgattctgggagaggtttttgtttgtttgtttgtttttgtttgagacggagtctcgctctgttgcccaggctggagtgcaatggcgcggtcttggctcactgcaacctccacctcccaggttgaagcgattctcctgcctcagtctcccgagtagctgggactacagccacagcacccagcctctgggagagttttttacgcacacaaaaccctacgtgtttgttttagttccactaataggtagtggtaggaggataagactaagtgaagacaagactaagaaatgttacatttagccaggcgcgtggctcacgcctgtaatcccagcactttgggaggccgaggcgggcagatcacgaggtcaggagatcgagaccatcctggctaacacggcgaaaccccatctctactaaaaatacaaaaaaattagcctggcgtggtggcgggcgcctgtagtcccagctactcaggaggctaaggcagaatggcgtgaacctgggaggcggagcttgcagtgagccgagatcgcaccattgcactccagcctgggcgacagagctagacgccgccaaaaagaaaaaaaaaagaaaagaaaagaaatgatacatttaatcagtaaatagacttccctccttctcacccattttttaatagagaaaataacgttgcttctgtttcagtcagaatggagtaaattaaaacttctgactgaactattttggagagaggagcagcacaataagaatttattgaagaagtgtacaaagacaggtacgacgagcactagcgtcccttgggaattcgcacacacagcattgggtgagaagaggccactaacgaagtccagccagagcttttggacttttaaagactgtcgaatttttttttaaatctgagggtttttttccccttcagtttcaaatcagcacaacattagctcgtataagtttttcaggtattaaagttataaaccaacccggtaaagtctgaagataatatttttggtggaaagttaggaaaaaacgtgactgtcagctttgcacattcttagcagtccgtgattatgcactccattatgttgagcatcccaagcttgttcggtcggataccaattttaaatcaaattttgacttcctccgagagcgactgttttgagagcaatatttatactcttggtatgactggttcacatgacagaaagtgcttcatttctggcatgtgctatatatgtctgactcgttatatggtttatgttttcagactagcttttttcagtgaaatgcagtattttgacattcagcatcagagaagttttccaggagtcaaacatgtgtcatggaatgcgttccttaagtgtgtcttggaggcaattctgtaaaaaacatggcaaaatgtcactttctctaaatcaacattatgctaactttgacattaatcacagtctaaatacaaatccatgacagatagaatgttcacacaaatccaggggcgtgtctgccttaggtgggcaggagaaacctgcaccagtgagatcttgcactctggctggagtcctgccctaagtcctggtggtctagtgtctacagccaggaatgatgttagagtcagatcctgccttctccataggccagccttagggctttaggtaagtcactttgcctctcagtcttagtcccctcatgtgtgaaatgaaggagagaacagtgcccacatgtgtgttgtagagaggactcaatgacgtaatgtgttgggctcacggtaaatgctcaaaaggtgctgtctattattgtttctctcctcttgtccgtatatgaccagtcagaaaaggattatctgggtgccaccagaccctggaactctgtctctgtacgcttgccctggaagagagggaggcagaagccaacctcactcatttctcatctaccttgactgtgagtccagtgctatccatggctagaagggcctcagcaatgttctcctctctgtcttctgagctactcagatactccattcattaggcctgttacatgcttagggtgggctacttaaacaggcgaggtccaaaagagttcttatcgatctgacttcaaaagcttttaagggcagttgttgggaaacatgtcctttgtctagaaaactctacatctgtatgtgtgcacatattcacacacacacatgcatagagagatttctgctactgtgaacagtaacattttaaaactgaaatgcatttgccttattgctcagaacatactgcctttttgaaaggcacaaacctatcctttgtatttcaaaatctccagaggtatttgttgtgtttgcccctgtgctcttatgaccagggtagtcagaattcccacccgtcatccatagccagccagactggctaacacatttacacttactcgagagcatgccaagaatagctccgtattctaatagagcaagagctgaaattcagtaaatcgttattcccaggtgaagtaaggatataatggagagatgccattaccttctgtctgcagacacggaaatgaatgtccaggagtggtgtaaatgtcacttactcctttgcagaaatctctgacccagttaagataccactaagttgcatttgttccaaatgttgtcctctgtcctgtggaccacactggagacccgagaatcaatgttgagacataaggctctctgctgctgtgttcatttgggttttgcatttttgccattcagcagaatttcacttcatagtttgttactcaattcaaatagcatgattggggccatgtagcacacgctttggtacatggcaggtcctgaaaaatggtagctcttgtcatcattactttattgccatcgtcattggaatcagcagtaaatatctgtgtgtatgcgtatgtgtgtgagagagagacagagagaaacagagaaagacagagagagaacgagttttgtctcgtatcttggaaatgtgatggtgagaataaagggttgggctaatattcagcagccaaatggattataaaatattaaaatacacccaatagattaataaatagccattgccctgagcttgccaacacctcatgccccataccttaatgtcccagttctcaacttttgccccagggaccatggaatcaacttacaaccaagggtaagtcgtaccaagagcaaccaagggttatatctggctcctctggaagcctccggaatgctgccctggaatgctagcattagttatgagtagctggtgtctatgttagactcgtggttaaatatattgaatattacccctgggtaattataaaaatgttttaaaagcataatttgaatatcatctctgtgaagaatattaaaatatcaaatagtataagttccagtgttataaaattcagctattttgaagaaataactaaaccaaaatgaaaacactctagtagtgttcactaatttttttttctggtataaaatgtaagaattaagagtggagtatactttcaaaagtaatgacgtaggaaatgtgttttctggggagacaactgtaaggttatgaaaggtcctgatgggcttattaaaaaaaaattccaggccaggcgcagtggctcacgcctgtaatcccagcactttgggaggctgaggtgggtggatcacgaggtcaggagattgagaccatcctggctaacacggtgaaatcccatctccactaaaaaaaaaaaaaatacaaaaaaattagccaggcatggtggcaggcgcctgtagtcccagaaactcgagaggctgaggcaggagaatggtgtgaacccgggaggcggcgtttgcaatgagccaagatcacgccactgcactccagcctgggcaacagagcaagactccgtctcaacaacaacaacaacaaaattccagaagcaacttcattgcattgaagtggactactcgagattgctttgcaaatcttgctaatctaatcatataaatacattttgcagagactagtgctaaacctgagtcaataaaaataggattattaagtgaaatgctttttgtctagatgcttgtttttatagataaactttgctttttgtctaggtgcttgtttttatagatgcactttgccgtctcaatgagtgagttcttttggatgctcctggccctggactacgtcttgccaggaatcttaagagtgggcagcaccgtcccctatggaggcctggggtccttgtcatatatctcgagggaccagcgtttctaactcttcgctggagcacgagccaagctgacattgttttggctttcagaaatgaggacagagtaaaacttgacagcaacatcatggtgaataaatgccagagctttctaatcactccttcccgtaaccactacaaggttgtctgaccttgggcaagtcactcctttgggcctcagttttctcatcactaagtgatgggggtgggcttagggagtactagggacccttacagataactaatgaaacatggtctccaaactttggttttatagagaataataaaaagcaatactctcttttcttgattatcagatattccacaccttcactttggcattttttaaattacaaaacatcttataattgaggaataaatttcactatagttgtcattttcatcacacctgtgaatgtgaccataagtagcgagtgtttattcaaacacttgacaccttagttgtgtttattaccattagtagcactataaggggttggctttgtggctggaatgaggatggtagcttgtcttttaaaattctttagaaagatcatagtatgagaagcattaaaattaaaagatgtatatgcagagtactgccttcttatattacttaaagggagtaaaagttacctaatttttcagaagagataaaaaatatttccaacctgatgaaggttgttcagatcaaatcatagagcttgcagttcagtggggaacgcagaagataaaaaaggaacatggccatggtggaattactggttgggttagctgctgtgaagacaattaagggggctgtatagggaacaagtggtggaagggtccaccttctagggggtcaacaagacctgtctgaaaagggaagagcagccacatgaagaagtcagaggcagggagggagaggggtcctcaaggcagagaggatggtaagtgcaaaggccctgagacacaaaaaacgttggcctggggaggaatgaaggaagaaagaactaccccagcagacagaggctgagaagcactgaagttgtaaatagtgaaagggtttagcctttactctaagtagagtggagaaccattaagagactttaagtaggagaatagaatggcctaatttgcttgtttgaaagatccatctgagcctgagtagcaggagggagccgcctaaggggtctgcagaagtgggttggagctagtatcagcatagagatacagagatagagaaaagggcacacttcaaacatctaatttggtgaaaaacccaacaaaacttacggatgaatttgatatggaatgtggtagggaggcactgggagaaattaaggaaaagtcttttatttcaagttttagcagcaggacagtggtggtgacatttgttgaaatggggagccgggtctggagcaagggtgacggaggaaaaatcagagctgctttttggacaggttgtgtttgcgttggcagggaacctggcaagtgggaatgtcatgtgagtacaattcagatacattcttaaattgaatatggagaaggcctacactaaattttaactgtgattgtgaaaagttaatgtaattcccaattaattttttgctattacgagttaacaaaatgtttacagcgaacatgatgttcccctcaatttctatttaaataactgacggtgcagcttaaaactggtgttgtttagatgcaaggtaaaatgttccatgccatcttatctaaattttttttcaactctgtttcctatgacaccaaatgtattctttggcacagggcaattgatgaatatttgctgaagaagtgagtcaataggtattatatagagtaccaagcacaagaaagactaatcctgatgagctgcacagcaccatggccaacgctggctggccatgtattattcagacctgatcagattctcactttcttctccttccagaatatgtgaggatctatctaaggaaacatatatccctaatactgcacagttttactgtcctcaactccacttagtcacacattgttatgggggtgttcagataaagctgaaggacagtgtcaatgaccatataagatggccacgtatagactgggtgcggtagctcacacctgtaatcccagcactttgggagtccaaggctggcggatcatctgaggtcaggagttcgggaccagcctggccagcatggtgaaaccctgtctctactaaaaatacaaaaattacccaggtgtggatgtgcgtgcctgtacttccagctactcaggaggctgaggcaagataattgcttgaacctgggaggcagaggttgcaatgagccgagatcacgccattgcactccagcatgggcaacaaagtgactctgtctcaaaaaataaaaaaaaataataaaaaataaagaagaagaagaagaaaagaaaagaaaagaaagaaggcgatgtacagaaaagcctagcttccttacttgcatttggtactggaagaagaatccaagttacagtttgtagaacttgcagctcgtggtgccacaccatgtaaatcagaaagtgagaactgagatctagcaacagaagcagctactgcttgtccctctgtgacggtgcttggactagccacagggacacttggcaggttaccctgcactaatcataatagcaggtcttcctgttctgtgagatcattctcagaaacagtgtttgaagaatttatcaaagagtactctacgaaggctcttctagtatatttaacaattgtttctttaagcttactttgctgttaaaagcaaaacaacatgaaactctcaaatggaaaaaccacttaccaagtcataagctgaaatttcagtattgaactgaaacgctaaatgatagatcaagatcactatgaatcctggagttagagtgaatggctattttcagttaatgctaatgatttttacatttatttgtacaacataattgtgaaagacaaccccaaatggaacttaaaccccaccgaactcccatttgttcatcaacccagttacctaagacagttatttaaattaaattttctacagttaaaaccaaacagaagcatacagatgaattgtgaagttaaagattattccagatgacttttaggtataactctcatgcaaaacctatatcatcttgaaaattaaattttaaatgattatatctcctgcttcattgtcaatttgattgctttctttttaacctcttgtaccttattcctagcgcacctcagcgtgccccctttgctctgaccaggcaattcctgccttgcctcactggtgaattgacagtcgcagtccttcctttattcacacacaggtccagcagagcccggttataccttgactggagctcagaactcaggggtcacggctcatgctgttccttttccacaaatgctgtttgctttcctctctccaggttctacccatattctggggtctcttcaaattccatccccaagccccttgaattctggctcctactttagtttgtccaaatcgctgtttgtcatataagtgtagctatgcacacactcattcttacacagtttagaattgactgctctgtgacatttcatatgaattggcttataaaatacttttgggcagagtcttgtctcatacacataagtgctgtgcagagcttggagacgagcgctcccattagttcaagtgatgtgatagattgctaatttgtttctttttctctttttcctgtgtggttcagtcccacactcttgcctcttttttccctcttcctgtctaggagctaaatacacaaaaatgaatgtgatctggtccatgttctaatccacttatgggttaattgggtgacagatctgttaaccgataatgcatgataaaagtgatacagttttgaagagggtgctgagggaatcaagttgagcatttggtcccttgggaattcagggtaaggctgaataagcctcacagagggcagtggagggagcattcaggctgagggagcagcccagcaaggctgtgcaatgctttagtatatgtatctctttccatacggagcataggccaataacagcaagagcacagtgcatcggcatcagcacctggtgcttcgttttcttttattgcttcctagaaagtgtaagacaaggagttacaggtggtggagacgtggatgagaagagggtgtaggtggtgctgaggagccactccgggaacggggaagtcacagaagggaccagtcagggtgcagacggctaactttgtgtctgtggatgagattgaggcagggtgggggcgaggcagagaggccagcagagtttctaccctggctcactttgtacttgttcggttatggagctgactctatgcgactacaatttcaatatattaataaaaatagaaataatgtgtgaaacatgtgaagacaagcacccagaaccactccaaactacctacctcttcttttctttgctgaccatgactattgacagcggtctctggtgcaactcaattgcatgtttgtaaaggcgccgttcagcctgccctggcaaaccggcaaagcaatgcgtgctcctgatctgaactaccagttcagggatgatcttcgcttcctacttgtgatggtgctgagcagctctgaaaaggggacttcagaagggactcctgaggatcaggaggctgagtctgaggattaggtgattcctggggcttgctgctgctgcccccagcggaacccagatcttatagtctggagttaagctgaactccctcttccacacctactgactcagcaagagttgtgcagtacccacctcagggcaagcaagttcttccccagccactcaaccaggagagaaaatgatgaggggtgctctcattttctgaacaattgtcaccatgggctctgagtaacttcgaggatggggcctcttcccctatctgtgtcctgagggcgttactcattgtactgaacattcaggaaatgtctgtgtcaaaaacagagagaatcttttcattccagaaaggcacaaagcacatccgtcctgagacacagaggagctgggtttcctgagttctcttgccaggagaagatcgccaggataatggaatgggatcgctagtgcaccgggccctttgaagcccagggcgccattcaaagtatgctctgcactaactgggaagaccatttggagtcaggaagctggaattctggcccagtccccaccaggaacttgctttgcatccctaggcaattcacggaaacactaagcatttcccatcaaacaaaaaatatggttatctgccccgtttacctatcaccagatttgtgaggatcaaaaataacaagaaacatatatgaatgactcactttgtaaaagacactgtttccagagggttatatattttaattgtaaccccaaatgaagtggctattgttattttcatctccatttcccggatgaggaagcagggcagagtgtgttgaggctcatcactctgaagtaaaggggctcagagatgaatgtaagcagtttggcttgagagcctacattcctaatcagtgcactccacccctcaagagagaggacgcttatagaaatgcttccgtgtaaaatgcgcttccatctcatgcaggctatgtactacattcaacttgggaggccaaaatcacatgttataaatattatttaaaaaaaaaaaaaaccttcgctgggcacggtggctcatgcctgtatttccagcactttgggaggccacggggggcagatcacctaagatcaggagttcgagacccccctggtcaacatggtgaaaccccatctctactaaaaatataaaaattagccaggtatggtggcgggtgcctataatcccagctactcaggaggctgagacgagaatcacttgaatccaggagacgaaggttgcagtgagctgagattgcaccattgcactccagcctgggtgacaagagtgaaactccgtctcaaaaaaacgaaacaaaacaaaaccttaaatagaccttatatctttttatcttcccttcccctctccctttctttcctttttactttcttttttcttttttttttttttttctgagacagagtctcgctctgtcgcccaggctggagtgcagtggcgcgatctcggctcactgcaagctccgcctcccgggttcacaccattctcctgcctcagcctcctgagtagctgggactacaggcgcccgccactacgcccggctaattttttgtattttttagtagaggtggggtttcactatcttacccaggatggtctcgatctcctgaccttgtgatctgctcgcctcggcctcccagagtgctgggattacaggcgtgaaccaccgcgcccggcctacttgatttttttttcagccaagtacagatatttctgtaatcaaacagtactttgcactatcgtagtgagaggtgacagtgtgcaccctcgctcgctttcggtgcctctgcggccttggcgcccactcaggccgcgcttgaggagcccttcagctcaccgctgcactgtgggagcccctttctgggctggccaaggccggagccagctccctcagcttgcggggaggtgtggagggagaggcgcaggcgggaactggggctgcgcgtggggcttgcgggccagctggagttacgggtgggcgtgggctcggcggccccgcactcagaacggccggccagtcctgccggccccgggcaatgaggggcttagcacccgggccagcggctgcggaggctgtactgggtcccccagcagtgccggcccaccggcgctgcgctcgaattctcgccgggccttagctgcctcccagcggggcagggttcgggacctgcagcccaccatgcctgagcctcccccaactccgtgggctcctgtgcggccctagcctcccggacgagcgccgccccctgctccacagtgcccgaacagggaccacccaagggctgaggagtgtgggcacacggcacgggactggcaggcagctccacctgccgccccggtgcgggatccactgggtgaagccagctgggctcctgactctggtggggacttggagaacctttatgtctagctaagggattgtaaatacaccaatcggcactccatatctagctcaaggtttgtaaacacaccaatcagcacgctgtgtctagctcagggtttgtgaatgcaccaatccacactctgtatctagctactctggtggggacttggagaacctttgtgtggaccctctgtatctagctaatctagtgggtaggtggagaacctttgtgtctagctcagggattgtaaatgcaccaatcagcaccctgtcaaaacagaccactcggctctctgtaaaatggagcaatcagcaggttgtgggtggggccagataagagaataaaagcaggctgcccgagccagcagtggcaactgggtcgggtccccttccacagtgtggaagctttgttctttcactctttgcagtaaatcttgctgctgctcagtctttgggtccacactgactttatgagctgtaacactcacggcgaagggtctgcagcttcactcctgaagccaacgagaccacgaacccactgggaggaatgaacaactccagactccccgccttaagaactgtaacactcgctgcgaaggtgcgcagcttcactcctgagccagcgagaccacgaacccaccagaaggaagaaactctgaacacatccgaacatcagaaggaacaaactccggacacaccgcctttaagaactgtaacactcacctcgagggtccgcgacttcattctcgaagtcagtgagaccaagaacccaccaattctggacaaaatagcctagagttctatgcacatgtaaggtcatagtattttatagtttttacgaactgaattctgtcccccttaaattcatatgttgacatcccacaatgtgactgtatttggagacagggcctttaaagaggtgattaaggttacctgaagccataagcatagagccctaatccagtagcactggggtcctgtaagaggaggaagacaccaaggatgtgtgcacccagaggagagcccatctgccagccaaggagagaggccccaggagaaaccaatcctgccagcaccttgatcgtgggcttctagcctttacaactgagacaatcagtgtctgtttctgaagcctcccagtctgcagtgctttgctaccatgcccccagcaggctgataactgggtgcatgcttcctgcactgccttgatcttatattgattttgctccaagtgtaaattattttgagttcactttttttttctcagaacaagaactaagcaatttccttacaggctctgctactgtcatacccactccaaaggtcaggcctgcacagttaggggggctgtgacactgcacctggatgtgcatgagaaggtgcagcctctagggaccatggcatgccggctgaggcattggcagcatctatccactatacccctacctctcgtagtccttattttaggcagcgcccgtttgtttgagtgagagtaggcagagatcgattacaaagtgtttcaggtctggcagctgtaggagattacagacacagatgtatgcctggggtttgttcttgagagacccccctgcaaatccccttcacacgtggtgactctgcaaggggcacagggatttaggaacaactaggaaagggaagtccaagggatgccattgagaaaaggcagcatctggactctgccatcaagatggagaagaatggaactgcagcagagctgggcattttcctggtttgcatctgcagtcccccagcgtctagatgatgcctcacacacactgcaggtgctcagactcatacattgaatagaatgaacttgtgaaggcatgggtgggagggacgtggttttctcattcattccatcagtgcagttacagcacgagctgtgtgctggatcaccagatccgtgagactcaaagtcccccaggaaccccacttggtggttttcattcacgatggtgactgtgttcctcctcacgaattcacaaggagactaaacgccattggcggctgaagcaggagagtctgctcagaaactcaactcaaatttgcatccttaccaccaagaaagcattcatggagcccttgcagtggggaggaggagagaaggaaacattgtttcagacacacgcaggttgcatggaatacaagagtgggatgcttttgtagaaggaaaaagaaaatgttttcttcagaatagaggagactagaaaacaggaagtaagaacaccacactgactttgggtccatggaaaaccggtttgggagttctttccagggagattagctgtctccttgacacctgtgactagcactgttgagttaggttgtaactttgagctggttgagatggtgtggtttggagaaccggtggagatgactagagtttctttcatgatgtaacggaagagaatcatagtccaggcctgtgaggcccctggagtttgcatccgtcttcctagctccagacaagtcacttcctacagtgactccatgagggttagtgcttttctgctgagcaggaatgtcgacttaaggcagtggaacagtttttaagctgcatctgctttttgtacctttcactttctatatttctttgatttatgggggagaggggttgtttacttcttgagtttttcagtttggaagataattaagaaataactttaagtgaaagatgaaagagcacagtagcagaacagtaactttcttataaaacaacgaatgtcaagtattccgaaagctctctgccaggcttcaggtttcagcaaaggattagcttagtgagaccagctaattgtttaaaaataaagagctcactttgtgaaatagaaggtgtcattttgcctgtcccttccacttaacttctatttagtggttggcaaaaggctagtggcatgtaattttcatattttcagaacactactctgcaattactggggagtttagacagtagttggctgctatgatcttgtccacagccccaagagctgtgagtgtttatttttctagaaaaatacatcagtaaaagtccatcagtgccaggtattgacaggaaaacaactagtctgcaaatgtgcaaatcagaagtacctaattttgcattttgccttgaactaatgacaggaagtaattgtaccccaggtgccaattcagtataagcaagcagaaaagttattgcaggaagtcattttgtgaagactgtggaatcagcaagagcatcagaggctttgagctaggatagtgattctgagatgttaatggaccccatcagacagacaagggctgaggtcaagtattacaaactatggaattgcataaaacataattaaaagtcacaatctcatcttttaaaagtggtctcttctgtgttgccttttcttgctgaggaaagaattgtgtgactatttttttaaaaatcgctccccagatcccaaacttttaaaattagaaaattgaagcttaagtttctaatttaattcatatacaatttttttaaagagaagatttattgggtcagaagaatagataaaatcatccccaagagagttcatgcactcattacacaaacacttattgtacatgtgctcggcacagcctccagtactggagacagacaaggtgctgatatgcctcttgtctccatggagttattctgtagtgagagctaataaacaatcaattcaataatttcattacagattgtcattagtactattaagaaaacaaacaagatgatgagatagagtatatcagttgccttctgctttgtaacactcaatcacagtatctcagtggcatacaaaaatcagcctttattgctcccttgtgtgttggggtaggggggtaagtgcactctgtccagcctgaggatgacaagagcatcaatataaaacactgcaacaagggggcccagagtggggccattcaataggtcacaagagaaactagaaaactgtcttccgtgcaggagtcctggaaggcctttctaagtaggagacacttcagtgcaaacataaagggggaaaaacagccagtcatgctgagaattggagatgagtttaccacaccagaaagtacaaaagctcccagatgagaggaaagagttacctgttccagtgatccaaaaggatgccagtgtgaatggtaggggatgaactgatatccaggttggaaaggtaggcagcctgggccttggcagacaccataaaggattttattttccagtctaggagaagccctaaagcattttaagtagcggattaggtgacaagacatatgtctttaaaagatctctctggttcccatatgaaaagttcatgatcaggaaggaaaagtaacagggaggacccttagaaggctgctgccttctgtggtgcaaggtagaattggggtagccttggacctacgtcaatggagacatcagtggaaagtggagaagggctggattggatgtaagttacatcgtggaggtaagaaccagcagggtttgctggtggcttggatgtggactatgaagggcacaaaaaatcaaggctccgtcctgaattttggggttgatctcacacacacactcacgaaacacctgtgatggattgtggtgacatttactaaagtggagaaaaataggtgaagaagtgttttgggatagaattaagagattcattttagacatgttgtggttgagatatctgttatgggtagaattgtatacctcaaaaagatatgtgggtatgagtggactcacatatccactcatccttaaaataaaatgagatctcttcatggggttccaaaaggaaggagacatcatttctgttccttgtctcaataatgcatcttctgcctaatcatagatgtcagattaaatggacaagacaaaatagaaatatctttattaggagcaagctgtcccaccaggcatacatgtgtgttcacagtagtgtcacccaccgttcagtggctgctggcgattcttcagcgggattcacaatttggccataaatgagacaccacaattacgtcaaactctgattaatcttcctgccaacagatcaggaatcatatgttaagtctgatccaagctcatgttcttcctttatttcaacacacacacacacacacacacacacacacacacacacacacacacacacacgacatgttgggagtcctaacccccaggatctcagaatgtgaccttatttggaaatatggtctttgcaggtgcaatcaagttaagaaaaggagtagtgtgggccattaattcaatatgcctgtgtcttaagaagagagaacacacacacacacacacacacaccaccaccaccaccaccaccaccaccaccatgcgatgactgaggcaggaaccggagtaatgcagctgcaagcaaggaccactgtggatgaccggccactacccaaagctggaaggggcagggaacaattctacactaaagccttctcggggagcagggccctgctgacaccttaattgcagacttttagccaccagaacagtgaggcaatacatttctgttttttatttgtttggttattattattattattacttaatagagacagggtctcactgtgttgctcaggctggcctggaacttctgagctcaagctgtcctcccaccttaacctcccaatgcactgggattagaagtcatttctgttgttttaagccactcagtttgtagtacattgttagagcagccgtaagaaactaatacaatgcctaagcacttagatcaagatatgaatctgagctcaaaagaagaggtctccatctgaggattaaaatagtctatcaatgcggagaccctgaggaagaatgttccaggcagagggaagagcatgcctgtttttggcatacgatttcttttatacagaagaaccattctgcagtacaacacccataaactctgagaaaataaatgggtatgaaattttatagcttgatttccatccctggaatgattgaaatagatattacctgcacatattatgttagaaattatattatacatacccagtaaaaaaaaaaaaagcaaaactgcatctcaaaaaaaaaaggcattcatgctttcataaagattgtgtttattgtaatgaaatgttttatggtgcaagtcatttgtggttatttagagtattaaaaaacccatggattttcagaattgtaagggacattagaggttacgtcttgaagaactctcttcttaatgcttaagttttctacattaccattaataagatatcacttaatttctgctaaaacacttccagtaatgtaagaagcagttggacttccagggcaacccatccatttgacaattagacatttttgaccgtagaggtcaaaaacacatctttgtgacttcattaacgtgtccaagttatgttctttgaaaaatctcaaagttaagtctcatccctcgtccctagaaattcttttagatgtttgaatgcatgaaccacgttcttatgagggttttctccaggctggtgtacctggttcttccacctgagactgtttctaaccctgacccttcaatcctgtgctctcctctgaacttccctcagcttgtcagtgtctctcccaactccatgtttaaacatcagcaggaccaagtaaataatgaaataaacaattgcagaaagcaattattaggggagaaggaaataacaaaaggatggagtttttccaacaagagcattaagaagaaaaatctaaataaatatatcaaatccacatgtatggggatgaaaactgggaaggaatttgcctccagtgaaaaaacattacattatttgatggagtttttcatcatgaaacatgatttcttcaacaccatgtacctgttttgtgcatttttggttttgccttttctaggattgtattcagaatcccagcatttgttttctttttaccttgagttatcacttgtttaaatgagtaactcgttacttacttttgatgaactaattgcatttctcgggcacacctctttgttaagccgcttaacccgacccccctcatacccaccctttgcagggggttcctaggggttcactttctctctggggcccctgaagggaattgtctgggttttggttcctctgtgttgtcagtgccctccagcctcctttctgcctctggatgttgccttgtgtccttgctctgtgcctgttttttcgctctgaccgtctctaccgccacattctgtgtctctcctgtgattctgcccacagtcatcccattctcttacatactctggccactcttggcctgtttctttccctgtgggatgacagtttcaaagagagtgaatgtcaaagggctcatttccttccctcttacccacagtactcattacatttgctaaattgaggtattaacagaggttaataagaggtcctgctgttgttggtttgggtctacaggagcaatggagaaggaggaagaatgaggctgaaggaggccagggtgaaaagggagaacaaggaaaaggggagaatgtcaccaggattgcccaagctatttctcactaacgtgcagttgatttgcaaattgtgattgaaacaaagaagccttacaaaaacgtttagaaagttttcattttcaaaataatatttaaaacatgaagttgaacatgtgtgcatgtgaacagttttgatttaaagtgtcagccttaaagggttttttgtgtgtgttcgtgtttattgttttccataagaaattcgagtctaccatagagcactatgcaaataaacagatcttaagtataaataccagggctgcaagagtcgttcctgttctgcagcttagggtacatagaaatgtgtcccttccctcacagtcaaccagcccagcaaatgcagcaggaaaggggcccacccctttagatttgaccttaccttggcactgattatcaaggcgttctcttaaaacatgatattattgatatattctaaaattttcaggttaaatattttatttaatctccataatttgtgaacatattattttatagggcaaaaaggactttgcagatgtgagtaagttaattaccattaacttccatctttattgccagagaatattctcttttgagctctccatgaaatcagggaggtttggtgaagcacacagagaaggaagacagaaggaagagccagccagggtggcatgccccatactgaggagtgagggggccccggatctgggtgaagtgccccacattgaggaatgagggggccctggattgctgtcccacccagggtgacatcttccccacactgaggaatgaggggggccccggattgctgtcctgcccagggtgacatcttccccacactgaggaatgagggggtcatggatcgctgtctcacccagggtgacatgttccccgctgaggaatgaggggggccccggatcgctgtcccgcccagggtgacatcttccccacactgaggaatgagggggtcatggatcgctgtcccgcccagggtgacatcttccccacactgaggaatgagggggccctggattgctgtcccacccagggtgacatgttccccgctgaggaatgaggggggccccggatcgctgtcccacccagggtgacatcttccccacactgaggaatgagggggccttggatcgctgtcttacccagggtgacatgttctccactgaggaatgagggggccccggatcgctgtcccacccagggtgacatgttccccactgaggaatgagggggccccggattgctgtcccacacagggtgaagtgcccaccagtgaggaatgaggggggccctggatcgctgtcccgcccagggtgacatgttccccactgaggaatgagggggtcatggatcgctgtcccacccagagtgacgtgttccccactgaggaatgaggggccctggatcgctctcccacccagggtgacatgttccccactgaggaatgaggggctctggatcgctgtcccacacagggtgaaatgcccaccactgaggaatgaggggggccctggatcgctgtcccacccagggtgacatgttccccactgaggaatgaggggctccggatcgctgtcccacgcagagtgacgtgctccacactgaggaatgaggggccctggattgctgtcctgtccagggtgacgtgcccaccactgaggaatgagggagccccggatcgctgtcccacccagggtgacgtgcctaccactgaggaatgagagggccttggatcgctgtcccaccagggtgacatgttccccactgaggaatgaggggggccctagatcgctgtcccacccagggtgacgtgcccgccactaaggaatgagggggccctggattgctgtcatttgaacttccctagctcctacagcaagtggaggtgcctcagagctgtaacgctcagcagatgctgcaggtttcccagaggacggggtggacagtgtctacattcatgacccagcaaaccatccctttaccttttcattcttctcggtttcttcagccccattgcaaggtctctaacgtctcattagctgtcttgtatccctcggtaatgtcttgactgaggattttggaactatgtatttgaacgacctctactttaggagaaatgacacgtttaagaattagaacagcacaatcttcgggcaccactccagctcattaaaagcctctgtaatgggcatctcctggtgtttgagtttcccatctcaccacatcaaaggaccatttagtttcttattaggtctcacatgagaccatccaggtggactctaaatgttcctaatgaattagaatgttgcatctcatttttcaccaccagggagtgagcacaggaatgctggtaggagcagcggctggtccatctgctctaccacaacctcccaaattgtttaaaaatttatgtgtttctggtatgtggatgaccttgaattagttatttgagttgatagaacggtgaaattaagatcaagtgttgataaatctttattgtattactttcctattgctggtgtaataaattactgcaaacttggcggcttaagacaatacaaatgtattatcttacagttctatgggtcaggagtctgaaatgagctaaagtcaagggctggacttctttctgcaggctgccccttccagctgccagctgtcctccttggttcctggccccttctgtcttcaaagccagcaatgactggtctagtcttctccacaaggccacctctctcctgcctccttctttctcatgtaaatacccttgagatttcattgggcctgcttcggtagtccacaatcatctctcaatctcaacataatgaacttaatcacatctgccaagtcctttttgcattgtaaagtaacatattcacaggttctgggaattacataaatgaagacataaaatatttgatgtgaaaattttagaataaataactttttttttgagacagggtctcactctgttgcccagggtggagtgtggtagtgcagtcacagctcactccagccttaactgccctggctcaagcaatcctcccacctcagcctccaaagtacctgagaccacaggtgtgcaccatcatgcctggctaatttttaaattttttgtacagactggtctcactgtgatgtccaggctggcctcgaactcctgggctcaagtgatctttccaccttggctctcccaaagtattggaattacaggcatgagcccctgtgctaggcctaaatgaataacttaatatattaaaagaatgccctgaaaatcagtgccaatgtaaagtcaaatcaactgttacattggtttacagactagtagatagagaaggatggctgcctagtttctggtttaaagatgcttttatttgcatattctcataatgagggtttaaaaaaaaatcaatcgaaatcagcacctgagctggtgcccaagagcgtacagtgaaaaccagacatttacatttaaattgtccaaagaggtgtttacatctatgtaattgttaaattgaaattaaatttgattaaaagttattagaatccagaaaactataatgggcttcttacattgtctttgtggagattagatacttgatcaacattaaactgctctaagtgtcctatatgcttggaacttagattatcagtttcttattttaaatgtattcctttagtttatggaaatattgtacatgagaaaaaaatgctgctcatcagacattttgggtaaatactttagctgatatttagatgtcataatggagcacttatggaacttaaagaggatgctaaaatgatttttgaaagctataagtaacaatcatgcagtcttatatacccttgaaaatattttgctttcaaattttgctttcaaagatagggcacaagttgctaaattctcccctaaaactttttttttcgcttttgcaaagggataagacaataaacaccattggtgacctacctttcttcggttttacagatgtttatatttttaaaaattctttttagaattaggatcttgctctcttgccgaggcagaagtgcagttatgtgatcatagctcgctgcagccttaaactcctgggctcaagtgatcctcccaccttggcctcccaaagtactggaatttgaggcgtgagccactgcacctggtcatgtggttctggtggaacatagctatatcaagagttatggaaaatactaattttccttgggaactgaacatcaaggggcagctctgcctttttggtggagacttcctctaaggcaatggaatgggttctccaggttgtgggtcttttttagaaagttagagcagttaagagatagaaaaatgaatatgatagaaaaatagatataaaagagcattgtaaagcattatattctatttaaaataggattctactcaattctatttaagaatattaaagcaatattatccagcattttaaaatatgaacactgcatgaggtaataaggacattattagctatgttagccatgggagggaagacactaaatatttttaagcataaatatacaccaaaggagaaggattaacatgcattttggcttcaatttacataagagataaaagtcaaacacggcatagtagattttaattacaaagagagactagtttgatattgatatttgcaaactttatgccatcacattttttaattattggcaatataatttaattaagactattttaaaaaatacaattgtaggacacagattaaatgtaaataagttctgttgaatagatgactgaataaggaaagaaaagattttatctgaaaactaaaatatcaaagaaagacaaaatattcaaaaagtttccaggtcccattgcagtctttaggaggctatttgtgtgttatgactgaaggattggattgtaacaaattatagagtggttaagggccaaccatgccttctttgtgttttcacaccacgtagcatggggacttgtgctttgaaaatgtacaatgaactgatgtcgcatgaacacatcaatttagcacattgaaaaactaatctaacatttagcaaggaagctgaaaggcagtagattcattagaaagttaagcatacactaatataattattcttttaacaaatattgactgggcttcctctctgagccatgtaattctctgggctaaatatgtaaatatgtgcaaataaacatgggcctcgtcctcatggaagttgccatgaagggcaaagtaatggcttgatatactcggattcttttattatttaatgacccctggatgttcctgaatatctttgcctatcccattttctcagagccccccatttcaagttggtgagtttttcacaaagcaaacaaacaaacaaacaaacaaaaaacaggactagagaataaataaggagcttaaccagtacccacccttccaatgagtgactcagtcaggtgcacttccagtgcagacgtggtttgttgtttcatttctgttcctagtggtgttgtggacccgtgtggagtttgcagagtcagacttggctcttagaggattgtgtgattaggtgtctgtcattcccaggttttgtacagtgcgttacacttctcaaaacatgttgagtgcattaaatcagcatctgctcacagggaccctgtggagcatacaggcagcattttggatggtgctattttacaactttggaacccaaagcatggagtgattatgctttaagggctttaatttccctctggtttatgtgttactcaaagacaggtgctatccatagcatctagcacaataccagtacctagtaggtgtttggtacatggttattgaactaaagatacacagaattttgaaatctgtctttgattaggaatctattggttaagaaaatcttgaggtttcaggagctccttcacagttctgcttttcttttcatgcaattgcctgtacgtattcatttactcttgctgttataacaaaatgccatcaactgagtggcttcaacagcagacgtttattatctcaccattctggaggctggatatttgagatcaaggtgtcttgaggcttggtttctcctgaggcctctctctttggctcgcagatggctgtcttctctttgtgtctccatgcggtctcccttctgtgcctgtccgcgtcctactctcctcttcttacaaggacaccgggcatactggattaggcccacctctatgacctcgtgctacctgaattacctctttaaaggccctatctcaaaagacagtcacattcagaggtactgggtgttaggactttgacatatgaacttagcatatgaaggggacacgatttaacccataacaagacatttatctttatagtgcccacatatattattacttcgtatgataccaaagaagtgtaatgatcttggaaaagtgagacttacttaaatgtttaataagaagaaaggtgctgctactctcatacgctgctctcacacgcgcctcaaccagtccatgagctgagctgggctcaacctcccttcagctgaatctccagcacagtggttctcagccctggctcactgtggaattaccgagggagcttttacagtgtacccatgatctcgcccccaccccagaaaaatgaggtcagaacttccaggggtggagtctggacatccatcctattcttaaagattcccaaggggcttcaatgcacatcagggcttgtgaagcccagcactcttcagagactcagcaattcattgaaaattatttaataagagtccttgggatacactgcccaggcaaataacagtgacgtggcaagagcaacctaccaggattcctaccctgagacaatcaccaattgtatgaagcaagagggtaggtcacagagattctgaaggatttgaacacaatcacgtacgtagttaagtaacagaattcaatcttcaagacagtacaaaggataatatgagaagtcagtaaaaatgccatttttattgtataaaaagattcctacgtctgtttcccctattgaattaatcagctgaaagatttattattatagatgtcaggaggactccaaaatatttataatctttaattgctgctatagcacaacacacacttcttggaaacttaagcctttagaacacccgcttacccttaaatcacctagctggcctgtcaccccctctgaaacttgagggctcccaatgcagggactgggtgttgtttacgtctgtcaccatagcacctgacataattctggcatatagcatgcagtcagcaaatgttaaaatggatgaggaaatgataaatagatatgcagaagatggaactttggaccacaaaagcaatttgaaatctagacagtcaggtctagaagtccagagacatcagttacccagggtcagaagccgagtcatgttttggaagccagtgaactaaacaagagtgggcctagtggatagccaaagacaggctcacacaggcaagcaatctgggaactgggaaagtcgttggtggtccacgacatgtgcagttggccaggaagttaggtcgtcctgagggttaactagcagctgacagtgtgaactaattaagacaagggcatatgtttgggatttgctttgatatatcttgattggacagtaactggtgctacggtgtcatgggcctattttcaatgcagagacaagcatcttgcatgattagcacagaggctgctgctgtggctggaacatgaattgtggctcagaggcaaaggtagtttggtcagtatctagacaatttagcaaaaagattcctttctaagatgacatttccaaattcaatgaatttgctgcccaccaagtgattgatgggaaaaaaattggtaaaaggattcccaggcttatgttttcctcatatatacatatattgcacttttgtcaaatacagaagtgcttgtcaagtgaggagaaagatgtgccctttgaaggaggttggaagccagtaggactctgcctgacttcagctggtggggcgcatgttttatatttattcacatatttgtcatttctgtgctcttcttttcttcctgtagatcagggttactatttagtgtggttttccttcctgaagaacttttagcattccttttggctgtaaatccttctggattttgtttgtctgaaagtatatttacatttgccttcattttcaaaggatagttttgctagatacagaagttttggttgaaattttttgccacccccctcagttcagcattcttacctgtcgttccaacatcttctggtttccattgttttcgatgattttagtcatcaattcttttcattgtcctcccttacttaatgtattctttttctctggcttctttaaaaattttctctccatcttaagactttcagtaatttgactatactgcatctacgagtgatttttttctttgtgcttatgatacttagggcttattgacatccttaaatctctggaagagctgaggactgagtgaaaggcatatgaggaactttctgggtaatgtaaatgttccagatcctgattctcgtggtggaaccctatatgcatacatttgctaaaactcattgaattgtacactgaagatctatgcattttgatttctttaacctatattttatgctagaaaagagacttaaagcatttacgttaacaaatgttactttatgaaagctatatttattaactttccttaagtgagtctgttatgactaaatctgggaattcaattcatcattgtttttgagaatactttttaaatctcagcacacattttcatcttctaaatgatagaagccctggtacaaaaatacagttagatagaaggaataaaatctagtgtttgatagcaaaataaggagactatagttaacaataatttattgtatacctcaaaataaatagaggagtagttttgaaatgttcccaattcaaagaattaataaatgtttgatgtgatagatatcccagttaccctgatttgatcattacacattgtatgctggcttcaaaatatcacgtgcttgataaaaatgtcaaactattatgtacccatgataattaaaaataaaaaatatataggtaatataatgaaaaggatactttaagatcattttttagactactagggaataatttttttactaagaacatacttcatagtcaaataatagataagacagaaagggatgcacctgaagattcatataccaaagaaggaaggaagaggaagagcatgagggagggaggcaggggaggaggaaagaaaggaaagaatggactgaatagacttgaagatgatgggaaggagggatttgtagccttgggctggctgctgtgtttcatagcagatgcgggagggtaaatggaaagctaatagaccaatacgaggtaaagtttggatctccataaatttaactctgaggaggcaaagagtgcttgttcccttctttgccatatactaatgttctgcttccttcagccttttgcccccatgaaagctaaagattttacattgtgttccctaagatcttaagccacaaggctgtgctgattaacatatgacttatgagcttcacctgatatatttcattcattcgttcagttattcaatcaatatttattgtatgctgcctgccaagcccttttctttgcattgggaattcagtggtaacaaagcaagacaaacagaatccttgcacctgtgaaacttacatttgagaaagtaagcaattaaaaaaagataattacaagtagtgaagtggtgaagtgtacaaaacagggtactgtgataaaaagcagttggggagatggttcgcattttagcttggatgaccgggggtcttcctgagaggtccaaatctgttccaagacctgagccaagggaaagagacaggcatgtaagatccaacgagagaaatggaattgtcttcttgccagtttatagataaatgaaaaaatatcattatagcaatgaagacaaattcataagaaggtttgtttcctaaaatgtgatggaacgagaagtggaggataatctcagccttttactggagactccctttgtagatgagtcactgctctttgcgtgtacatacaaacaacacacagaaggccatgcaggctgacagctgcctggcctggcttccagggcatgaaagcacagttcagggttaaggagaataaacacagcaggtcacaaggcagttagtcatagtaacctggtgtgtgttctttgtgggaaaaacaagaagataacagcacaaaaagtccctcctcccggccagctaagctgggcctctcacgccactgggaatgcatgagtgaaggagcttgaggaagatgggaagcaggctgaagcacattagcagtcgctaatctacacctgtctgttatgagcaccctctcaggtgtgtaatgacgcccccagcatccctgataccgctccttgatcaaggctctgaacctcaatctgcgtgaactagaggcagtaagtcctttctgtaactgttcatgcctgatactcaatacatgttaagctaaactacatttcttccaaagatatgtgaaaggaaaaaaataaaagacaaacgcaaagttatattgggcacaagagaatgaagtgtagcatggtgggaactttgtatcagggtcaaatttattattttcctaaaggaattgcaggataactctgtacaggagacatctctaggtaattgctggaagaatgctccacagggaagaagcctgatgtgaaggggaatggactcaatagcctaattgtttttcccccattcattaccatttgtaggtcccttgggacagaatttggcacactggctgaataaaataacaagaagtctgaggacttcttgttggcttgaagtggaatgttcttgccaacatatattgaaatcatcacatagggatcaccttttttcattattgtgatttgcatttattatgatagcctctcagtcaatatttaatggcacatcttatgtgcaaagccccatgctagacactcaggagtgtccagaggggcatggcacttgtctcctgctctcaagaagcttacagtctggtcacagtaggaaacgcacaaatcaattatctgaaacatatggaaatgacttctctgacaaaactgcattttgttgaatgtcatgacaattcactttaggaaattacacatttttgtaggatgcttttttcctcctttgaacaatagattatcaagagcactgaagttctcagcaaggagatccattggcctcaacatttcttcacaaaagaatctcccttctgattttgacagcttcatcaacaaagcagccatttcttgtatattattggtttattttgcgttttctcccttccttatccgttctaaactaactccctaaggcaactgggtggagagcaactgtgtgaacattaaaccatacttttcatgttctgaatcatcaaacaaattactcataccttttcttcccacatggctactccctgagatagatgggttgatatgtagtcctttgaaagaaatatggggcgggggctgtgggggcagcaattcagtctgagaaacgtgtgaaatcccagaatcagagatggagtagggccaagcccccaatctggaaatttggaagttgtgtctggtaaatatctacattaattcctctctcttctgttcctctctgaagtctgcagtatttccatccagggggactcaggaatggtacacctggaccccctcacagtcctcaggggtgtcactactcacacctctaacccatgtgcttctcatagatccctgggaacgaacagggcatgggacaggaaattcctgcagaaagaaaatgtctgcagtcagggagtttctgcaggcaggcccacacttactccctaccccttctcaggcctttgcagaaaaacatggaaaccatcatttgtttagggtcagagttgtggaaggcataacatgggttagaaaacaaagtaaaagcaacaaaaatagtgactattaactctcttccattagtcctatttagcaggtccctgaaaaatgtagttgaatattgttttgttccaatgtcaatgaggggaaaaaatcactttgtttccaggtccacccccatgtggagtttgcttgttctccccaggtctgtgtgggatttttctaggtactctggtttcctcccacgtcccagagctggacatgttaggtaaattggtgtgtccacatggtcccagtctgtgtgctagtatgtgagtgtgcccaagatgggacggtgtactggctagggctggtgcccgcctgatgcccgcctggtgccctgaacttccaggttaagctccagccccctgcaaccctgaactagaataagtgggtaaattattatctgacttgcttttattaatctttcttaaatgtatgtgtagttcacatttatttcaggtgtttaatatagaagtgttttgtccttatttagaagtttggtgatgtttttgtgaccagaaatatgccttaggaatttaactcttctttagatcaactcgactatggtttaattgtttttgctatacatcgttttgcttaaagccgcagtttccaggagcctactgatgataagtgaggatttactgtggtttgttaagtgaattggcaaaacaaaacaaaacaaaacaaacaaacaacaaaagaaaacacatcctagaccagaggtttctgttttacatggaaacttatcttagtgctacagttaataccacacacgtcctggaacctcactgcatcacccagactccaagtgccatcctgcctgctggaggaagacctgggagggcacggcaaagacatgtcactggacatctcccaggttagaatctccttgtgcttaaggctgtccttgacctcatgcaacggatgttggtcattcaaggaggaagcctctggtagcaggagcgcctcttgcctcacttcctctgtttgagtggcactggttaatcaactgattctactaaagaaaattctttacatccccattggatgtttctattggtctgttctctgctgaacctgcccatggaggaccatgaaaatgtgtgagaaaagccattttattggggtgcttgaaattggattatccaatgtggcctgctttccatagttcagcttttcagactttagcagggaattgtgtgcttacacagggttctgtgtgaactaacacatctctgcctgaatgtgttccccgccgccgccagtaaaacattgcaacaaagcaactgtctcataatattaagaatattaggcatatctttacaaattgagctctgatattttttccaatttccttctggaaatggtgaaattagagaaagtgaaagtgtgtgtggggtcttctccagggagctgagccctgtgaatgcacacagtgagtgctggtgtttacgatgtgttgcaaatgggtcaacactgtgctttgtttgttccccataagtgaggactgactctcagatatcatcaatggaatgcctcctagggaatttcttgaatatcaaaacacagtccttttggtttctttttactgatgaaaattttactctgaagtatgctttctccagctagagcagggatcagcaaactacagcctatagactgaaccagcctctactcactgctgtattttgtatgacctaggagcgaatgtaaatggttgaaaaaatcaagagaaaaatattaattatttgtggcgcatgaaagttatctgaaattcaaatgttagtgtccataactaaagttttattggactataatcattattaattcgtccatgtattttctatggctatttgctacagtagcagaattgagtcattgtaacagagactatgtgtctcacaaagcctaaaatatctactctctggcccttacaggtagaagatctagaatttccaactttgctgcaagttttggctccttccaagtctttttttcttccttccttccttccttccttccttccttccttccttccttcttccttccttccctttttctcctttttcttttttgaatctcgctctatcacccaggctggagtacagtggtgcaatctgagctcactgcaacctctgcctcctgggttcaagctattctcatgcctcagcctcccgagtggctggggttacaggtgtgagccactgtgcatggcccatttttgtatttttagcagagacagggttttaccatgttagccaggttggtctcgaactcccgacctcagatgatccgcccacctcagcctcccaaagtgctgagattacaggcacgagccaccacaccctgcttgacaaaagattttagaagagcaaatccttacttctgatttctggaaaatgtgcacacacaacacataacaaaatacagctacataggggactggaggataatcacagtcgtgattttcactgtctgacagtgaagtcatctctagcagggtcaaagaagagcgacagcagaaagaacttgcactctcactgtgcctcagggtgactggtttgcttcgaagttccctagaggaataactttttcggtggtgcatgcctagcaagatgtgctgacttttggccttctctactagctgctgaggaaatcgtggccagatgacccatgcataaaaatccaccataagccataaagtaccttctgagctggagaccatatgctagcggcagccctgccttcaggaggcttacatctgcttgaggacaatcaatatccagatcaagatgaccaaaatggctctgtggcatgacacacaatcccctccatgaccaagacacatattcttccaggttccaggggtggttgactcatgactcctaacagctgagttcctttccaataattgcctttaactgtaggaagctgtcttgcccaggtaacactcatgtctggggacagcccatgtttaatttctggtcagtgctgggggtgggcttgggtacagaggctcagcacctttccctcaattctagacagttctggagggctccagagctccctatagaactggctgagggctctgctgccactgcctcatgttcagcttctcttttgcctcagtctgctcccagaactctccataggtgtccctgccgggagccaccccaaaaacatcctgcactcagtctccatctcagaatctcatttcctggtaagccagcctaggacagacactgatattacaaggtacacatacccaaatgtcagatacagcatgcggtgtaggagtcagaaagagatccctttggttcaggggtgcaggggactgtgctgtagaagcaatgagccctgctcatgaagatgcatttagaaggaggaaaggagtggcgactggtgatgctggcaggtccctgtcctcttcccttgtccctgaactatccttcccctatactctgcagcactgtcttcctctctgattatatcagtttcattgtgaggtacattttcagattttacagccctttaaaagttattaaataataggatataaagccagggtaataaacgatagttccaaatgggagggaaaaggaaaaaacctactttcttttggctccgtaatatgccaatacaaaattggaaatagaaaattgagcttttgcaaggaaggatttagaggtggggcacagtggggaattccatatcccacttgaaggcatgcagtggaaactttcagtccagtatatgaaggtggaaggaactcgaggggaaatgatgctatcattcattcttccatttgcttttgtgatgttcccagagtgcttccctgtgattcactccttttagcaaaattgggttttgaagagtgcttgaatgagatttccaatggaatagaaagtagacatgtgttccttctcttcatttgtattagtttgataccagtgaaatggccatttttataagtcaacatggttaggtattagcaacttcatgtacttaacctacaaggttgacttctgagtttatttcgaagtcccagcacattcttcccagctcataggtgtttgtatttaatctcatttagaatttagaagaaaattcccagttttatgtatcaatttgctttttatttgttccacctggagcataaaattgtgggaaattctttaaatataaatacttgctttctaagacaatttttctaaattttttctaatgtagtccaagtgcatgaactgcagagtacagttgtctcttagtattcatgggtgattgcttccagtatcccccaagatgctgaaatccttgggtgctcaagtgtcttatataaaatggcataatatttgcttataacccatgctcgttctcccatatgttttaaataatctctagattatttatattacaaaaaactatataaatacaatgcaaatggttgtcatactatctcttttagagaataaggacaagaaaagaaaaggtctgtgaatgttcagcacagactaaaacatctttctaaaaaatatatttttcatccatggttggttgaatctactggatatggagtccacagatatggaggaccaactgtgcttttactaggtttttctaattgagctgtaaataaaagatcaaaatatcaacttggaggtgagctgaagaagactttgaaatacagaactcttcaaactctacgcagatttggtatccaatacattaacttatctataaactgatttttttttttttttttgctgttgcctttccactgaggaggctcagagttctcctttaaaaatttctgacattttttggcgtggattgtttcttaagtggaaaatttcaaacttagtttacaaaaattggcacactccaaagaaccatggatcctccacatttgcatgccacatttaaatcattgaaagctacagaatgggaaatgttggctaaggaaatagcctctgaattactttcagaagtagagtaaatgaggcattagatttaaatgtttgtttaaatcccagttcctgactggaatctacgcagtgacaatctttcttttttttttttttttttgctgtatttgagaaaatatatcagaaataaataaaatgtatgaataaaacatgctaaaatttgtttaaaaactctacttcctttccttattgttaattttctcagttaatattaacatcaaatttattctgttggcattctaataatcacagaaaaaatagtatataagtgtatagtttggtattatgccattatagccatagattacttattttgcaaatctattgtctgggttacttttggaaataattttggagttagcatgagttatgagtggatatttattaggtgacacatctttgaattattcagatttaaatatactcatatttcttatataaatgaaggtgcctagttaaaacacgtgggcaacataataccctcaattatttctgtacacaccaagtatttccaaatccaaaaaagagagatttttttctagaaattccatgaattaactggagcaagactgtaattaaggagtgtgtgtgtgtgtgtgtgtgtatgtgtatgtgtgtgtgtgtaaacaaatatctttttaatccatttctgttgctcttcttcatttcatgaattccacgtgtttttttggtaccatttcccttcaggctgaagaacttacattagcattgctttgatagcaggttaattttccttcctctgaggatattttctttttgcctcattcctgaaggacagtttcacagggtataaaattctaagtttataattcttttcttttgcagatttaaagatattgttccactgtatgctagtcttcatagtttgtgatgaaaaatatgtggtctttaaattgttttctccctacacataatgtgacatttttctctgttttcattctttagttatattagtttttcaacaggttagttatgtatctgggagtggtttctttgagctcatcctacttaggatttgctgagcttattgaatgtgtacattatgtcttcaccaaatttctggaatgttaaaatactgtattatccaaatttttttctgaaccaatctttctgctctcctttgataactctaatgatgcaaatgatagacctttttattttgtcccttaagtctctgaggttttattaacttttttcaatcttttgctctctgttcttcagatggggtaatttctattaatttcttcatcattactaactcattttttgtcattaccactctgctcttgagaccattaggtgaatgtttaatttcagatacagtgttgtattttttctgttgttaatatttttatttgattaatttttgtagtttgtatttctctgctgataatgtttatctttatatttatttcaacatggtttacttttacatcatggagcctggttataatggttggtttaaaatcattttctaataacttcaacagttgtgtaattacagggttggcatctgttgattgtcttttctattgataattgatcagattttcctggttctttgtttatcaaataatttgggattatatccttgacattttgaatattacgttatgtgactctgggtcatattaaaatcttctgcagaatgtttaagttttcattgtctctttctttctttcttttttttttttttgcaggcagtcaatctggttggtctcaggctgaaagctttgtctcactctctgagtagtggttccaatgtcagttcagttctcaaaacctttgccataacatttgggtctctcttgaacatgcaccgttcaattatcagtttgggagttggacagttctttatgtcacagttcaggtctcaaagctttttgagggctgttccatgagtgcatgatttggggcaacactgggactcttattgatttataacaaattagatgataatttttcttgctctcttctcataaggatttttcctttaatctttagttcttgggacccctccccacagctcctttggtcagagatataaatttgggatgggagagttagaggccttcaaagcagcagaagcagttcacttttgcaactggatatataaagtatgtacataaaataattgcaatcaggtactcaaacaaatacatgtatgtgcatgatcacagcagcagtagctaaactgtataaacaacccaaataggtgaatggatgaaaaaaattccctgcatacaatggaataatatttagccataaaaagaatgaagtactgatacatgctacaaggtgaatgagccttgaaaacattataccaagtgaaaaaagtgagacacaaaaggccacatactgtatgattacatttatgtgaaaaatccatagggacagaaagctgacttacagttgccaggggttgggatgggggaatggagagcagctgcttaatggctgcttttggagtgacgacaatgttttggaagttatttacttccaaataattgcacaacatggtgaatggactaaatgccattgaattattcaacttgaaatgatctattttttattatgtgaatttcaccttaattaatacatatttgcactcaagaaatctgactataagggaatacttgacaaataaaacctacttgtttatagcacatacataaacattatttaactgatcttaagaaaatgtctctgagggtcttgttctcttcagtgaaagcaacaaacactacggtggaattgagaacaaatcaaaagatatttctccttttcttatgcttccatttattttaaacttttgcttgttttaaaggctaataaaattcaattttattaagctgagttttagtttaagtaactgattacttgcccaaactctattgtttcaaaatgtagaaaaatatgaatacaatgcattttaaaatgaaatacacaagatattttagttatttgttttcttttatgacattttagatctttaagcttcatttttttatagcaatcacatgtttttcctgagggcattttatgggcttctcagccctagattcatgtgagcagtatgccctgaggctttcaagtcaacaaaaataactgtcctgagtccagggcaagcagagaatcagcatagtggccccatggcagcaactccacagccctggagggcaggggtgaacacagtcactggaaagaggcctatgtgagatgtgtggtttttcgtggtacagctttgactgacagttaacagttgcacaggttttaatggaaacttctcttgggctactgggaaataactttctccagaatgggtttgtgtaatgtggacccagagatattgaacttctggtatctcaatattttaagtgaacttctcagaatttcctctcctcactctacaatgtaatcaactcatttagcttgatttcttaccaccaaagtagagttttatgtggaaactaaagaacttttgtacaccaaaagcaacagtcagcagagtgaacagacaacccccagagtaggagaaaatcttcacaatctacacatccgacaaaggaactcattcagaatctacaacaaactcaaagaaattagcaagaaaaaacaaacaatcccatccaaaagtgggttaaagtcatgaatagatagttctcagaagatatacagatggccaacaaacatatgaaaaaatgctcaacatcactaacgatcagggaaatgcaaatcaaaatcacaatttgataccaccttactcctgaaagaatggccatagtcaaaaaatttaaaaaaaaatagatgttggcatggatatgatgagcagggaacgcttttctttttttttttttttttttgagacggagtctcactctgttgcccaggctggagtgcagtggcacgatctcggcttttgagatctgcaacctccgcctcccgggttcaagcaattctcctgcctcagcctcccaagtagctgagactaaggcacctgccatcacacctggctaatttttgtagagacagggtttcaccttgttggccaggctggtcttgaacttctgacctcaggtgatccgcccgctttggcctcccaaagtgctgggattacaggcgtgagctactgtgcctggcaaacagggaacaattctacactgctggtggaaatgtaaactagtacaaccactgtggaaaacaatacagaggttccttaaagaatgaaaagtaggctgggtgtgctggctcacacctgtaatcccagcactttgggaggctgaggcgggtagatcacgaggtcaggagtttgagaccagcctgaccaacatggtgaaaccccgtctctactaaaaatacaaaaaaaaattaggcatggtggcatgcacctgtaagcccagctacttgggagggtgaggcaggaaaattgcttgaaccctggaggcggaggttgcagtgagccgagatcacaccactgcactccagcctgagcaatagagagcaacagagcaagactcagtatcaaaaaaaaaaaaaaaaagaaagaacaaaaagtagaactaccatttgatccaataatcccactactggatatctactaagaggaaaagaagtcattgtacgagaaagatacttgcatatgcatgtttatagcagcacaatttgcaattgcaaaaatgggaattgtccatcaattaacaagtggataaagaaacatatatgtgatggactactacccagccataaaagggaatgaattgatggcattcactgcaactgggatgggattggagactactattgtaaatgaagtaatttaggaatggaaaaccaaatatcgcatgctctcactcataagtggaagctaaactgtaagatgcaaaggcaaaagaatgatacaatagactttgtggacgcagggggaaagtgtgggaaggggcgagggataaaagcatacaaattggcttcagtgtatacttcttgggtgatgggtacaccaaaatctcacaaataactaccaaagaacttacttgtgtaaccaaatatcacctgttccccaaaacctatggaaatgaaaaattttaaaattaataataaaaaaaaagcagagacatggccaggagcggtggctcacgcctgtaatcccagcactttgggaggccgaagcgggcagatcacgaagtcaggagatcgagaccatcctggctaacatggtgaaacaccgtctctactaaaaatacagaaaaattagccgggcattgtgagaggcgcctgtagtctcagctactcaggaggctgaggcaggagaatggcgttaacccgggaggcggaggttgcagtgaggcgagatcgtgccactgtactccagcctgggccacagagcgagactccgcctcaaaacaacaacaacaacaacaacaacaacaaaaacgtaatctatcacataaacagaaccaatgacaaaaacgacatgattatctcaatagatgcagaaaaggctttcaacaaaattcaacaccccttcatgctaaaaactctcaataaactaggtatcaatagaacgcatctcaaaataataagagctgtttatgataggcccacaggcaatatcatactgaatgggcaaaaactggaagcattccctttgaaaaccggcactctctcaccactcctattcaacatagtattggaagttctggccagggcaatcaggcaagagaaggaaataaagcgtattcaaataggaaaagaggaagtcaaagtgtctctgtttgcagatgacatggtcgtatatttagaaaaccccatcgtctcagccccaaatctccttaagctgataagcagcttcagcaaagtctcaggatacaaaatcaatgtgcaaaaatcacaagcattcctatacaccaataacagacaaacagccaaatcatgaatgaattcacattcacaactgctacaaagagaataaaatacctaggaatacaacttacaagggatgtgaagacctcttcaaggagaactataaaccactgctcaaggaaataagagaggacacaaacaaatggaaaaacattccatgctcatggataggaagaatcaatatcatgaaaatgtccatactgcccaaagtaatttatagattcaatgctatccccatcaagctcccactgactttcttcacagaattggaaaaaaactactttaaacttcatatggaaccaaaatagagcctgcatagccaaggcaatcctaagcaaaaagaacaaagctggaggcatcacggtacctgacttcaaactatactacaaggctacaacaaccaaaacagcatggcagtggtaccaaaacagagatatagaccaatagaacaggacagaggcctcagaaatcacacacatctacaaccatctgatctttgacaaacctcacataaacaagcaatggggaagggattctgtctttaataagtggtgttgggaaaactggctagccataggcagaaaactgaaactggaccccttccttacaccttgtacaaaaattaactcaagatggattaagcacttaaacataagacctaaaaccataaaaatcctagaagaaaacctaggcagtgccattcaggacctaggcatgggcaaagattttatgcctaaaacaccaaaagcattggcaacaaaagccaaaattgacaaatgggatctaagtaaactgaagagctcctgcacagcacaagaaactatcatcagagtgaacaggcaacctacagaatgggagaaaatttttgcaatctatccatctgacaaatggctaatatccagaatctacaaagagcttaaacaaatttacaagaaaaaaacaaacaacaccatcaaaaagtgggcaaaggatatgaacagacacgtctagaaagaagacatttatgcatctaatgaacatatgaaaaaaagctcatcatcactggacattagagaaatgcaaatcaaaaccacaatgagataccatctcacaccggttagaatggctatcattaaaaagtcaggaagcaacagatgctagagaggatgtggagaaataggaacacttttacactgttggtgggagtgtaaattagttcaaccattgtggaagacagtgtggcaattcctcaaggatctagaactagaaataccatttgacccagcaatcccattactaggtatataccccaaggattataaatcattctagtatacagatacaggcacatgtaagattattgcagcactattcacgataacaaagacttggaaccaacccaaacgtccatcaatgataggctggataaagaaaatgtggacatatgcaccatggaatactatgcagccatagaaaaggatgagttcatgtcctttgcagggacatggatgaagctggaaaccatcattctcagcaaaccaacgcaggaacagaaaaccaagcactgcatcttctcacttgtaagtaggagttgaacaatgagaacacatggacacagggaggggaacatcacacatcagggcctgtcggggggtggggggcaaggggagggatagcattaggagaaatacctaatgtaggtgacaggttgatggatgcagcaaaccaccatggcacatgtatacctatgtaacaaaactgcacattctgtacatgtaccccagaacttaaagtataagaaaaaaaaatgtgtgtgtgtgtgtgtgtatatatatatgtatatatgtatgtatgtgtgtgtgtgtgtgtgtgtgtgtgtgtgtgtgtataaaaccttccaaaaacaaaaagaatgtaccaagcatagttgattttactggtgcattctataaaacaattaataaataaacaatatcaattctttacaatctcctcggaaaataagagcagaggaaacacttcttaactaagattaccttaataccaaaccagataaatatactacaaaaaataaaatctacacattctacagattaatattttcatgaacaggcttgcaaatatttttcacaaaatattgtcaactttatctaaaaaagcataaaaagaattattcaccaagaccaggtgtaatttatttcaggtatgcaaggcagtttcaacatttgaaattcaatatatattatttactacattaatagtctaaagaagaaaaatcattattagaaaaaaaaataatgtaacttctatataggggtgtgtgtgtgtgtacacgtatatatttaaatataaaattatataatatacatatattgagcacatatctttggcattatgtaaatatgtaacatttataaacatataaatctacagatgtataataaaattatcatgtatatatttgtcttataagtaaactttcatatgaaaattttagtttcaagggcttggggcttgtctgattaataccccaaagctgcatggacgggggcagaccaaggcccagaatgttcagtatgtatctactcctctccagctttgagtggagagagttgaagcaatttactgttctattcacagaataactttattagaggattaaccaaagagcttgtcttattttatttagttactcttatttgttcacacccaattctcactcctatttcccatctcctcatatgaaattaatcaaatgtgtctcacacacatttaaaatatacataaacatatttgtaagatacatgttattatatccttaatttacctaaatgattttgtgttatgtctccttttgtttcttaccattttaacataatattttttcaagcaccagctatgttgtttgatgttctgccttaatgcatctaattgttaaaaatatttcaagatacatgttcaccacatttttacatattcatctcttcagaagtggaaaattagtatatctccaattccctgctcctacacacaataatgtggtaaatgtcattattcgtctccatgtagtcctgctgtaaaaatttatctggagtttataattaggaatgtgatgactgggtcggagaattaggcatacttaagtaatggcttccagaaaggctgtatcaatttcactctactaccagtatgttgtttctctttacaaaaactccctattatgatttttttctaatctgtggggtgtaaaatgtcattcatttgtgatttagttataatttatctacaatagctttagcttccctgtataaacatatttccccctcagattttcccttgtaagctgctgacttagatgttttacacgtatttctgtgggttgacctttcttcctcttgttgacacacagaagttccttatctattctaaatattaatttcatatacattttagatgccctaattattcatctgtctgtaaatattatttatgttggcatttgttgaatctccagtttccgtgcagtcaaatccatctctccttttttttttgtcttagagcttatgtttttgcgtattgctttagaacacactcgtcactccaaagtcacagttattatttcatattttcatctgttaactctagaatttaatctttcagacttaggtctttattgatctggagaccacttttgtggcagggatccagtattatttttttctatatgtattgatctagtttgtcttctagatagcctattgttttctttttaaaactgatttattgaggtatgattctcatagaaaaatctgtacaattaatgtatacatttcaatgagttttgatgatagacacccatgaaatcattgccgccatcaaagccataaacatatctgccaccctccaaagtctcctctctcttcctttattattattagtgtttttgttgtttgtaagatctcttaagatcttcccttgtagcaattttaagtgtacaatacagtattgttatctataatcactatgctgtatagtagatcttcagaacttctttatcttgcataactgaaactttgtaccttttgacaattgcctcccatttccctgctctccacccccagccccttataaccaccattctactctctgcttctacaagttaggctattttagattccacatatacatgagatcatgtagtatttgtttgtgtctagcttatttcacttaacgtaatgccctccctccatgtctagtcatattgttgcaaatggcatgatttccttctttgttaaggatgaataatattctatgtatgtatatgccacaatttccttatccaatattccttcagtggacatttaggatgtttccatatcttggttgttttgcataatgctgtagtaaacatgggtgtgcagataggtttttgacatcctgatttcagttattttgaatgtatacccagaagtgggattatttagcagttctatttttaatttttaagaatctccatactatttttcataatggagctaccaagttacattttcaccaacagtatataagagttctcttttctccatgtttccctctccaacacttgttatcttttgtttttcaaaaatagtcatcttaacaggtgtgaggctttcttaatacatttgtgctgctaaacgaaatgtcacagactggataatttataaagaatagaaatttattactcatagttccagagggtgggaagtccaaaatcagcatgccttcagctttggtgtctggtgagaccctggtctttctgcttccaaaatggcactgtgttgcttcatcctccagaggggatggacactgtgtcctcacatggcaaaatggctgaacgggaatgaatacattttctcaacacttatagagaccctaatcttatacctgagagctcaaccctcatgtcttgatcacatcctaaaggttccacctcttaatactatcacttgggtaattaagtttcaacatatgaattttgggggtcacattcagaccacagcagaggtggtatctcaacttgtggttttgttttgcatttccttcataattagtgatgtcgaccagttctttgtatatctgctagttctttgtatgtattctttggagaaatatctattcaggtcctttgcctttttgttaatgtggttatttgttttttcattattcagttgttctttatatattttgtatattaacctcttatcagatatatggtttacaagtattgtctccaattccctatattactttttcattttagggattgtttcttttgctgtgcagaagtcgttaaatttcatgtaattacacttatttttgcttctgttgcctgtgcttttggtgttataaccaaaaagtcattgccaaaaccaatgtcaaggaatcttttccctatgttttctcctgggtgttttgtaatttcatatttttaatacattttgagttgatttttgtatatggtgtaagataagggaccaattttattattttgtacatggtaatccaattttcccaatactgtttattgaagagactatccattccccactgagtattcttaagagcccttgtcaaaaatgagatggctatacatttgtgggttaacttctcaggtctctcctctgttccatttttctgtgtgtctgtttttatgtaagtatcatactgttttaattactatagctttgtagtataatttgaaatcagaaagtgtgatgcttccagctatgttcttatcctcaagattgctttagctatttgggggtcttttgtggttccatacatatgttaagataattttttctatttctgtgaaaaatgtcattggaattttgatagatattgcattgaatctgtagattccttttggcagtatgggcatcttaaatacattaattattccagtccatgaacatgggatatatttttcatttatttgtatttgttttaatttctttcaacaatgttttatactagtcaatgtacagatctttcacctccttggcaaatttacacctaagtatttgttctttttgatgctattgtaagtcgttttgtttatttttttctgaaaaacttattgtcagtgtatagaaacacagttgatttttatacattgatttcgttaattgctgttttactgagtttattagttctaatagtttttttggtagatttttaggtttttcaaaacataatattatattatctaaaaacaggaacaatttaatatcttccttttcaacttagatgtcttttatttctttctctaccataactgttccggttagtacttcccatactatgtcaaatagaagcagcaagagtgtgctactgttcctgatgttagaggaaaaattttcaacttttcacctttgagtatgatgttaactgtggtattataatatatggttttcgttgtgttaaggtacattccttctatatctaatatgttgaaagttttcattatgaaaagatgttgaattttgctaaatgcttttctttgcatctattgagatttttatcactcgttctgttaatgtggtgtataacatttatagatttgtgtatgttgaatcatccttacaatccagagataaattccacttgattatggtatataatccttttaatgtgtcattgaattcagtttgctagtatattgttgaggactgttacctctatgttcatcagggatattggcctgtaattttcttttctagtagaattcttttctgtcattgatatcaaggcaatgctggactcatagaatgagtttggaagtgtttcctcccctttaactttttggaggagtttgaaaaggattgctgttagtccgtctttaaatatttggtagagttcaacagtgaagctatgtattcctaagttttcttttgtgtgagtttttgacttaaagtgtattttgtctgatacaagaatacccaatcctgttgtcttttcattgcagaaatatctttttccatcccattttcagcctatgtgtgtccataaagtgtgttccttgtaggcagtgtatagctggatttttttttatccattcggctaccctatatattttaatgggagcagttaacccatttacatttaaagtaaatattgacaggtaaggacctattattgacattttgttaattatttactgactgttctgtaatttctttcctcccttctttctctcttcctgtcttattttgtgatttgatgatttttgtagtggtatgctttgattcctttatatcttttgtgtatcgactacaggtttgtcttttgtaattatcatgagtcttatgtaaaacaaaccatgaaagaccccaaaatagctaaaacaatctttttcaggaagaacaaagctggaagcatcacacttcctgatttcaaattgtattacgaagctatagtaattaaaacaccatgctactggcataaaaaacagacaaatagaacaatggaatagaatacagacatgagaaattaacccatacatgtatggtcagctaatttttgacaagggctccaagaatacacaatggggaaagggaagtctcttcaataaatggtattgggaatattggatcacacaaaacaatctgttttaagttaataacaacttgatttcaatcacatacaaaaattacctgttcactcccatgtgctttttcttattagagtcacaatttacatcttttctatttatatctattagcaaattattttaactatagttatttttaatacttttgtattttaacttttatattagagttcaatatgatttacatatcaccattacggtattctgattttgaaaatgaacttatctctaccagtgagttttataccttcatatattttcacgttgctgattagtgtctttcaatttcattttgaagaaatcccttttgcgtttcttatagggcagttctagtggttataaatttcccagcttttacctttctgggaaagtctttgttcttcatttctggagaacagctttgacaggtatagtattcttggttagcacatttttttctttggcactttgaatatattatcccactctctcctggtctgtaagagttctgatgagaaatctactgatagccttttgaaggtaaccttgtatgtaacaagttgcttttctcttgctgctttcaaaattctttgttttagaatttgacaatttgatcataatgcttttctatgaagacctctttttactcaacctctttagaatcctttgggcttcctggatctgtatgtttgtttcactctacagggttggaaagttttctgtcattatatcattaagaaagctttcttcccctttatttttctctactacttcttaaacaccagtgtttatatgggttcacttgatagtgtcctgtaagtcccataggattttaaaaaccgttttttattatttttttgtgtgcttgttcctctactggataatttcaaataatctgtctttgagttctttgatgttattctgcttgatcaagtttgctgttgaaactctccattaaatttttcagttaagtcattgtattctttagctccataatttttgtttggttctttcttttggtttcttatggttgaatgtctcattttattaatatatttttaaaaatttaatttagtagtttatctatactcccttgtagctcactgagctttaagatggctattttgaattctttgtcagctaatttgtaagtcttaatttctttggggtcagccactagagctgtattttgttcctttggtgatgtcatattttcttgaatcttcatgttcttgaatttttgaattttttttttgattattcattctcttgaatttttaaaaagatgtcttaaaatttgaagaagtagtcaccttctccagtatttactgactggctttgggccagaaggatcttcaccagtgaaccgggttagagattctgggagtctctcagaacttttctatggatgcacctgctccattcttcttattccttattaagaaagaaatcttaggattgtgtgccttctctctatccaacaaaaccaggcctggtactgatagcattcaatttatattccctaaggcaatgccctgaagtactgaacgttgtataccttctccctcaccagtagtgtcaagccagatgctaatatttgtacatgttgagatctgtgtgctatctgaaggagcttgtgcaggccatgcacagggatgtacaaggtgctttccataggaaagggtggcacagggtgctggggaagttcatcagttggttgtgggggtcctcaggcaagtcatcctgtggggttcagtggtgggtctcttggtggagtctatgagctgattagtagagactgtgactggctgtagagaattggacaccagttgttgtgcactctcttctccctgctcctaggcttattccttcagtgctctgggtgaagtgagacagaaaggacctcccagctagctaacatttcacaagaccgcaaaaattaggcacacacatcactcactttccctagtagtagaaattgcaggccaatcaggcctctgttgataccaagttgtgccaccttgagggaggggtgacattggtaaagtgaaactacttatcctctttaatatttttactcttgggttttttgttccacagtagggctggaaactcagccagattctggggctcccacaaaaatattcatgtccatgggtgcttgccaatattggtgtttctgtggaaatgagagccaaaacctcctattctgccatcttgctgataccatttctgccctttttcctctcaatttgtagagttggctttgacatttatcaagttaatataaataaactggtatgtttctgagcaatatatggtattccaattgacttcttttcctctccctaaggaatataagtttctgtttgtttaaacttatggttttggccaggcacggtggctcattcctgtaatcccagcactttgggaggctggggcaggcggatctcttgaggtcaggagtttgagaccaaactggccaacatggcaaaaccccatctctaccaaaaatacaaaaattagtcaggtttggtagtgcacgcctgtaatgccagctactcagaaggctgaggcacaagaatcgcttgaacctgggaggtggaagttgcagtaagccgacatcatgccacttcactccagcctgggtgacagagtgagaccctgtctcaaaaaaaaaataaataaacatatggttttataacatattttaatatctgctatgatacaccaacctcacccactttcgatcgtattcttcaaaatttcaaaatttacatggcaattcagtcttatttttccaaatgtatttttaaaatgtttgttgaaattcttcaaagcattcttttcttacatattttgaaatatacttgtcaaaggtgtaaaagtttctactggcattttattttaaactgtactgaatttttagactaaattttggggaaattgacatttttatcatattgagtcacctcattcatgcatgtaacagatctcttcacttatttatacctattatttgtttttctattttttttttacaattttgtcaagaacggtcttaagcattcttttttaggttaattcttaaatacttttatcaccttgtgactgtgtgagtcaatactccttaataaactccctttgatatatgcatctatcttattagtcctgtccctctagagaacccgaatacacctagtaatggatatttacaaacaaataagcaaaaagctgctgcaaaattttgcataatagaactcttgaaagctttctctttgaaatcaagaaaagacaaatatgcctactgatgcagtttggatgtttgacatctcaacaggtctcatgttgaaatttgacccccaatgctaaaggtggggcctgatgggaggtatttggattgtgggcttggaggaaggaagtcccagtctcaaaccctcaaaagtagggaagctgacagtgcagccttcagtctgtggctgaaggcccaagtgcccctggcaaaccactggtgtgggtccaggagtccaaaagctgcagaacttggagactaatgttcaagggcaggaagcatccagcacaggagaaagatggaggccagaagacttagccagtctagtccttccacattcctctgcctgcttttatcctagccacattggcagctgattaaatggtgcccacccagattgatggttggtctgcctctcccagtcactgactcaaatgttaatctctcgtttggcaacattctcacagacacgctcaggaacaatattttgaatccttcaatccaatcaagttgacactcagtattaaccatcacactaggttaaagagattctcttctattcttagtcagccatgagtattatcatgcctggatggtgaattttcttcagagcctttttcttcacttaggtagaagatcaaatgctatttctcttttaatctgctaatacggtgaattacattaattgatttcttaagtgaaaacaatcttgcatttttgggattaaacccaacttagatacaatatattatctttttcatatattaatggatctattttgctaatattttatggatttcatatctattatgtgttacataagatgccattattttatatgtcactatgaaagaacaaaaaactgtcaatgaaactatgacataacactttaaaaaaaattatcagtcaaggtccaacaagtgtagcagtatccacaggtgttttattaatatataatatatacacatatatatatacgattaatgtttctctatgatttattacaaggaattggcttacacaattgatatataagctggctaaggaagttcacagtcagtagtgcaggctgtcaggaagagaacatcatgggcacagggtaaagttactctccacaagtgacagtttcttctctctcacttacacacacacctccgactagttttctggccttctagtggattgaatcatgccttcccaggttatggaggatagtctcccttagttaaccactttgattatggactttcatgacatctgtaaactcacagcagtgcctagatttgtatttgattaaataactgtgatttacagcctagccaaattgacacattgacaaaaccttttcaatttttttgctaataaaattgcatcttatttctttttgattattgttaatgaagaggtatgttcatttttgtaagatgattttgtatctgaatcattttctaaattcttatattctgatagttggtcatggagttagtttggcgttctctgttgatgatgatatataatctgaaaataattccatttgatcatattatctgcaaataagtctagttaacaatcttcattgtatctcttatcttatggcattgaccagtacatccagtgatatgttaattagtggcattcatatcaagtggccttgatcattctctgatactggtgggactaagtctaaaattccactataaacaggatgtttgctttattataaatcctttaaggatgtttccttccattcctttttttttatgtttttaaaaattataactaggttttgaactttatgaaacatttctttggtgccaattgagaaaaccatgatagcaacccactagtgtgtgaattatacttattgatttgttaatgttaactatacttttagggtttttctataataaaccttaacctatgtattatattttttctatgctatttcagttggttaacacatttaaaaaaaataattcatatctatgttatgagtaacatggggttataattttcttttctagccttatttgattttgaaattaaagttattgtgacttcataaaatgttttagataacttttcttccttttgtacttcctagaattatttttctaagacaggagttatctgtcccttcaaagttggcagcacttccttgtaaaatgttttggtccaggacctttttgtagttccactgtaatgtgtcatatgataaataggaaattatccttcttttacagtgaatttttaataaatataaacccaaatatttgatgttacaaagggaataagataccatttagctatagactaataattaagatgataattattacattccatatacttttgagtcggtctatctaataggttatacagaaatatgtacaagagacagcaccagtgtgtttcatcttaagctctctcacaatctctgcactttttatcccttaggacatacgggacggttattaaagtctctgtgcttcatcagtctttccttcctgttgctgcacatcattttccacatcacgttggtgagccttgaagctcaacatcgtattgcacctggctacaactgtgagtattatggtgttttcttttattgttttcttttatttcttttatatacgtgcataataaagctgtgtgtcatcgcacacatagaaatctatgcaataattaaattataaaattcatggaaatttttggtctttggcaatgcagtgtaaatatatataaagaagctttgccatggaagattggatcatgagattaagtttatgaatgactcttcagcatgtattggagatcacctcctatctgcatgtaagacattttcattgagcttaacctaaaattcaagagttacagacagcccttggagctttcattacagcgagtaaaaaaaaaaaaaggtacaatttctaacatgatgaatagaatataaaagttgaataatattatatgaaattacatgactatgacattaatcctattacaaagaacaatgttaaaatttctcatgtttttatgggaaaaatgtaatgacacatgtagtttcttttctgaattggaaggttttttttattagtatttatagggaaacagtatctcttaagccccttatattttgaagttatgatctgaaagagtcagtatacatgttttatctagatagtattatcatttgaaaatttacctgtcattgaataaatcatacttcagtttttgtaggatgtgtgattgttacttgaaaaaacagaagcagtcaagtaggtgaaagcaattcatatgttttcagttaaactaaagaaaccctgagatatttgaaatagactgtaataacagttttaacttgtcagtttttctttgaggaacccatttgtgggtttgaaatttcctggcctttcagaagcacaagtacaagcaaacttgcttttccctgtaaagtaaaaaggaaatcaaaattcttcgtggatcaaacagtattaatttaaatacagtgaggaatcctttagtaaaatttatatacataaactattatccctcactgcataactgttagatagagagctaaagttagtgttcaatccagccattttattgatttcagagttcctttgataacaatgcctatcaagacgattttttaagatctatttttaaggtatgttgttttctaaaaattgaaatataattcacacaccataaaattcacccatttaaaatatacagttcagcagtttttttgttgtttttgtttttgttttttttttgagatggagtctcactctgtcacccaggctggagtgcagtggcacaatctcagctcactgcaagctctgcctcccgggttcacaccattctcctgcctcagcctcctgagtagctgggactacaggtgcctgccaccatgcccagctatttattttattttattttttgtgttttttagtagagacactgtttcaccgtgttagccagtatggtctcgatctcctgacctcgtgatccgcctgcctcggcctcccaaagtgctgggattacaggcgtgagccaccacacctggccacagttcagcagtttttagtatattcaaaggttgtgcagctatcaccactgtctaattccaaagcactatcatcacccccaaaggaaactccatgcccatgaataattatttctcattcccttcccagccatctctaggcaaccactaacctactttctgtctgtattagatttgtctattcaggacattttgtctatatgcaattatacagtctatgacttttgtatatgacttccttaatttagcataaagttttcaagatttgtcaatgttgtagcatgtatcaatactttaacccttttcttggctgtataatattcaattgttaaaatgcgattttaatgtttgattaaaaaccacatgttatcccattattaaaatcttgatgaaacacagtgtttaaataagggtactttggttatgttatcttgataaagagcatttattatatttcaccaggttcacatcttttgggacttaatagaaatgttagcaacaataatgttagtagtagtattatcttatatgatacagtgcttattaaccaaaaatcatttggatatttcttaataaggtactctcaggaccataaggaagaatcttataactaaaggtgttatccagataaaaggctttttcaaaaatgatgagttcttcatcattagaaatatttcattataggatgcatcacaacttatcagatttttaaattttgagtttatatatatatatatatatgtaacttattcatgtctgcaaaaaaatttaggttgctgagtaatataggaaggtggctggagggtggaagtgaaatttatgatctcttctgactcacaagagtctaagtgtttctagttcaaattgatgattttccataattctacaaatgtcaaaataaaaatatgatatgaaatcctaaagcaacattcttttctctgcatttataactgtagttactctgtgttctcctccacagagtatagacagacaggcaagcttacatacacacacacacacacacacacacacacacacacatatttgttcttgctttggctccttcttcccaggcaaaaagtcacaatacctggacacttcaggtgggacctctactagtaccatgaagaagggagtggtgaagggaggtgatggtgaagggaggtagtcatctcaagtgtagtcacagctggcctcttgacctgcctctttccaggccttccttgcccaaccagtattaaggagctaggtctgcctctcctaacctcgctcctaaatatatgggctttgatatttccaagtctctgtcaaagacagtttttattcatacacaaatgccctctgcagtcatcctatactgcaatacagtttgaacatgtcagcatctaacataacatcttccctttccttttttttgctatccccagatgaaagctctactctgttatgagtcaatttaatagaagtcataacagtaaactttatttccataaagttaaattccaatttgaagtttatttctgcaaaaggttatagttccaatttcaagttccagtatttttgatgaagtaaccaatagagaagggatatgtgaaagattgagtgaaaaaagaaaaacttgagtgttttacttccagccataggaaacttgaaggtgggtttatagaaatcataaatttcttctgaaaaactagtgatgcctgtaatcgcattggctcatcaggtgttgtagatttttttggtttagttttatgtgtagcatttaaaattaatacattcttgaaaaaggataaaagagaagaacaaacaaacttcagagctttgcaaactaatttagtccaagattgacacagaccaggttttcagcccagagcactttttaatgatcaagttatataaactgaaaatactgttagtgtgggtaatggaaacactgacttttaatttagagttgacttcacttcactaatgttattgtttctcaagcatttagagttatgattataccatcagagatgtaaacacaactcagtcatttcgatatcccaaatttgaagtttatccttttttggcatctgcatagataacatagcaaaagttcaaataaaaagacaaaacctgtcttggtcatcagtgttgtacattttgaatgttttttgtatgttcaagacattggtaaattaaaattaaaacccagacaagtcgatcatattcaagtagtattcaaattcaagaccaccaagcgctcatttataggtgttaaattttgttttcctaacaacttctttcccccatttaaaatgcataccctcaccctcattatcgcaaaaggtcccggcatctcttaggaatctgacataagttttggtgggacaacagtagcatttataaatattgagtcattgaaagttctcgttcctccagagtcctgtgaatattaactggcagtaataaagattttttcaaaccaccctatttagattttgactagttggcaggtctgttaaaggtgccgttgtgcagagctgaaacttaacaacactcccttctgccttttttttttcccctcatttccagaacagtgttcttataggtaagtgaggagtccatgggggcaggggacacctatgtaaattttgctcaaacatatgttgtgccgcttactaaaatattttcattccaccaaaactatgctacttaaataaatgtaaacccggtttcaattatgtcattacagattacatagacgtagtttgtttgactccgtgttagatgtgtggcgatgttagtgaaatttgaaggccagtctggattcttgtgctgtgcttaaagcatgctattcattgaaagaaacttttgagttagaaactatatagggaaaatttgtgatgataatatctcctgtttatagagcatctatgaaccatgagaccctagggattattctattcctttttcaattaatgactccttcctttcttgttccaggtgagctttgctgttctttaagttaggcactctctgtatccaagcattgtcctattcattctctaaacaagtcctcagggtggacagggctgtgcagctggacccctgtgctctgtgtgcaggccccagcctgaggaggagctgagcaggagattccttcgtcaggctccatccagcgggaagcagcgaaatcctctgatttacatcaagaggctggtctcctggccaaaccttgccacggagggctatgcctttgtgtagtctcttttctccaagagggtgccctttttctgtataaacgcagtgcccaacctgcagatagtgctgaggtagggattgcaatgaagaaacgggctctagagggcaaatgagttgcatgaaaccattgcatgtctcagctggagtctgagcacggatctgtctggctttccattcttcccccatctttacggagctctttattcatcgtgtgtgtaagattgtttcctccactgtggctcctaggactttggataagtctattttcaaagggctaaaattagcgtttctgatacttagtccatgactttcccttgcttggatatttgtccttataattaactgaatattttctttgcttccttcaatggcagcattcctggttggattcagcttcccccaaaggttagccccctcagatgcattgctctttccccctgtgggaggaggggcatctagagtttcatcttttctctttttacaagcacatgaaacttggtccagaagcccaccaaccaagaaattaggatgggcctcagtaatgttttttcctgacatgcttctatccttgaaacacacaaggctcccagtgccaagaatcaaggtatcaagcgtcggcctacgacaagaagactgagggacagacccagcctggcagtttatcctcccatcccgacgactgtggggaggactacagagtgagccactgctgtgtatactctgcttgccagtacaagtgctgactcatcccttggcacacaaagctgtaaacttcaccccatgcttcgttagttgtgctaattggagatggaccctagatctgcagaatcacctggtggatccatcctcatacaaataattccattctcacacaaatgaaattcttgatgttaatttttcatatttgagacagtaccctggagaaaagagctaataagtacgaaatgggagacaaaatatataaaagcaaactcacaccctgcatgttctgagtcattttttgaaaccactcttggctgcctgctttcttctgatagctgatcagtgaggaggcttgggttcctcaccttgccccgtccccttctctttccattccctaactcattcaggcacaacacacagccttcttctctcctcgggccagcttcctgaaagcagatgttgccgctcaatacaacaatttaaaaaactggtccaagctatatctttacttctggccacctgtgcatcaaaagattaggaatccattgtctaatttatctgaaaagtatgtggatcatatatataccttctgatcatgtataggagaactttgccttaagtgctgttttcttccacccctggtgattgaggcactgcctcacggagacatatgccgacctagatggagactgctgctctccatagtgagcaaagacacatttatgatcagtagattctggatggaagcattgctgaaagagaacttttgtagcccaatatctgatggagtcaacgctcttggagtaatgaatacacattgtttttactgccaaaagctagacacaggcacgaaggcgagctgagtggtagcactgcatgacacccacccgtatgaacaacccttaggccaatgccgtgttgatattttgattcacctttagtaatagatatggatgctcactttatgcagcagttttcaaatagaatatctcattttatcctgacaaatatttttcatgacaatttttatgctatttaatatatgagaaaatttaggatcttgggtgactgtgagctagttgcatatcgtattactggtggggaaagtgagtcccagtgtgcctcagtttcctcaactgtcaaaggaagataacagctatcatctcataggtttttgtgaggttcgagttaatataggccatgcccttgggactgtgcttgacccattgtaagtggtcaaatagtacaagctgttgttcatgttgttgctgttattagagaagtcctaattcttgcccaaggtcatacactgctacaaggtaatagaggcaactccaaaccaaatcctgtctccaaattacgcacagtcacatggatgaaatttggaaattacagaacttgcatggtaccaaatcattctctatgatagtctttttcagtttcttgccaatgctgttatattggggtttgtacctactctactccatgtggttagaatcccaaataaatgggctaaatggcactggatggaaggcagcatcagtgatgtgtgtctttagtgaccctgagtttttcttccagaatttttcaccttcttagcaacctctccaccgcagtctctcactccacctgccccacagctgcagccttgggcctggcctggccttccgaatattttatggccctcttctcattccggcacctacctgaaagcttgtcatctgctcccatgacctgcagctcagaggaatagataataaatatattattcactatttattacctttcctacattgtagaactttagaagaaagaggaacatgatggaagagttaggaggaaaatgaactaacattttcatgtaaactaaactaacactctgctgctattatctctctctctctttttttttttttttttttgaggcggagtctcgctctgtcacccaggctgggtgtatttttagtagagatagggtttcaccatgttggccaggctgatctcaaactcttgacctcaagtgatctacccacctcggcctcccaaagtgctgggatcacaggtgtgagccaccgcacccagctgccattgttatctaattcttaccatatctcttaaaagtgttggctttcactatcgtattactggtagggaaagtgagtcccagaggcaaaaagtgcctcgccttaggctgctcattagtgagtaacagagccagaattaaatttaggtctcctggactacacagtctgtactctttccagtacaccctgcaccttcatacatgtgctggggaaaattttatgcagaattggactttggttaattagattttgaggaatagatatgattaggatacataaattttggaggctgtgctgggtgagaggatagttaatctaatatactaactctggttaaagtatgaatggccggaagtgactgtatatgcttgacttggtaaatgatattggcctttaggaatatcttcacccctacgagtgcatcatggggacagtcgggactgcatggctgaggagctgggtgtgcattcatcattggggatatgttttcccagcctccttgaacccaccgtccctaccacctcctccaagtgggtcctgtcacagccttgtgtcaacttgttaataaccaaggtctccttgtctaagatggtttttatctgtatttttaaagcctgaggaaattggagatgtttttcctaaagatagaaataaaacagtaaataacaagaatgtactggatgactcttggtgttcagaaatttacttccctgaagtgtgtgtcgccctgagattctagatcctgaggctgtcgccagaattacacataggtagtctaatccattctctacacagcagtctttcaaaattttgaagatggctttgatgccacatcagtattttcccagatgcctcttgagtcccttatcctctgctgtttgccaagcttgttggtcaatgttccatggctgagtggtgagatagcatcagtgtctggtcatggggagtctccagggcctgattaatgccaagcatcaaggggcagtgactttccttgttctggtaactgtccttcccatcggtggaaattgccgtattgtggattaatgtagagcttttctgacctgaaacatagatctgtttcttgtgaaaccctatttatgtttctctaaaagcagatatgctcccatctttgatttgggattttgattctgcccatacacagagcttccttccctaccttatatcacctttatctcatcccgtaatagggcaaaatttctagagttcctggcatggatcaagtactctaacaagccttcctttccttcctctttctcctgactcaccatatctcacacccagctgtgtgtgtgtgtgtgtgtgtgtgtgtgtgtgtgtgtgtgtgtgaaacatcttttttgttctaagttttgctctaaatcagtagataacatcttccatgtataatttcccactatgttccaggcatatttataatgtcttgattctgcattatagtcctgctagtccttgatattttactcatttgcagataaagagacttagcaaaaacagaagagttaagttgtgaaaaaaaggaagaaatgtagtgatagcatccagggtcacccatggagggtgccggggccctgggcacccgtgtgcatgcagggcaatgggctcatctagacgggcgaagagctgcaggaaagctgtatttctgtacttctccctaccccatggttctcatctcctccttcccgttgccaattccaataagctttctattgcctggccatgcctttgcccatgttatttccctggaagaatgtccttacgtactctgccagtcctctgccaggtccattcttcaatactggccacttcctccagataacccgagttaatacccccaggtagagggggtcagatgtctttgggctcccaaatacccagagtatcagtcattaaacttttaatgttgagtgataatcactgattttatatgttctcccattagaatatgatcaaattaagggtagaacctctcatgtttcatttttttttgtaacctgagcactgaccacagtggctgatgtatagcatactgcccaacaattgaagaatgaataaatgaattaatagcagccaaaaaaaggagaaataaaggtatggcaaagacaaaatttgatgactctcttgctttgttttgtgaccgattctcggtggtgtcctcacctgctggacctgcaagtaaacaattgaggagagcggctaagtgcacccatgccctctcttggccaggagctctgtcccctcactcctctcctacaggtgcataccccaaatcctgctcagatagttgttcccatttctcatctttttaattcatgaagaaatattagaatgacgtgttttatttctctttagaaactatttatcaattaagttacttggtatttatttccttcgcaaaaaaaaatttggatttccatttggatttgggaaaattaagacagaaaaccataaatgagaaagctagagttagaagtggcaaggaaggaaagagaagaaaaggaggtgtgggactgtgctttaacaaggaggtctcaataagaagtgagggcagaagagcccctagatgagtaacagggagtcatgatcctcacgcccgtctgctccccaccatgccgaccagtccttgctgtaagacaaatcacagagcaggaagtttaaaatgatttgggattgatttggtttgcttaaataacaaattctctaacctcagcttcatgatgcagcatttctagtgtaaattatttacaataaaagcactaacgcaagtccgtgtggtatggaagtaaactcaacctcaaaattatagacgaacaatgtaaagctataactgtatgtttccaaatttatggaatatggaaggacatttcaaaggcatttgaaagcagcagaattgggctaagcatagtaatgacattctagaaaatattatttgtatgacataagcttagttatttttcagacttacaaaattgatgtatattttagggcttaggtaggtggatttataaataaaaaccattttttcctagaatcaggagtttggatttggacaattcttcttgattttgaatattgagaatataatttaggcatctagaagcttggcaaagcagttgctaatataatttatgccttacatttacttgagagatatttaaacatttcatggtgattcatgttgcagaatatgagcataaaaaacattaatattatatcaaacgttaatgtaaaagtattataatgcattataaacaactgttttgcatattgatttaccatttattttttgaaaaaagtattttctttgcaaatgtgtatcacattattgataattattgttttaaatattttttctttaccttgcacttttatttagtatataatctcttattttataaatggacataactcttgaagaaccccaaactattgttaagaagtaacactggagagtaagatttgattgctgaagtctagcacttcccatcaacataccaccatcattcttcacacagctagaaaatattcctaaaattcatatggaaccaaaaaagtgtccacatagcgaaagcaagactaaccaaaaagaacaaatctggaggcatcacattacctgacttcaaactatactataagaccatagtcatcaaaacagcatggtactggtattaaaataggcacatagactaatggaatagactagagaacccagaaataaagccaaacgcttaacagctaactgatctttgataaagcaaacaagaacataaagtgaggaaaggacaccctgtttgacaaatggtgctgggataattggcaaaccacaggtagaagaatgaaactggattctcatctcttaccttatacaaaaatcaactcaaaatggatcaaagacttaaatctaagacctgaagccataaaaattctagaagacaacattggaaaaacccttctagccattggcaaagacttcatgaccaagaacccaaaagcaaatgcaacaaaaacgaagataaatagatgggacttaattaaactaaaaagcttctgtacagcaaagtaataataataataataataatcagcagagtaaacagacaacccacagagtgggagaaaatctccacaatctacacatctgacaaaagactaataaccagaatctataaggaactcagacaaatcagtaaggaagcaaagaatctcatttaaaaagtgggctaaggacatgaatagacaattctcaaaagaagatatacaaatggccaacaaacatatgaaaaaacgctcaacatggctaattatcagtgaaatgcaaatcaaaaccacagtgtgataccacttcagtcctacaacaatggccataataaaaaaaaatagatgttggcatggatgtgctaaaaaggaaacaattttacactgttgatgggaatgtagactagtacaaccactgtggaaaacaatgtggagattccttaaagagctaaaagtaggactaccattggatccagcaatcccaccccttggtgcctacctagaggaaaagaagtcattatatgaaaaaaatgcttgcacacacatgtttataggagcacaatttgtaactgcaaaaaatatggaaccagcccaaatgcccatcagtcaatgagtggataaagaaaatgtgatatataggccgggcatggtggctcacacctgtaatcccagcactttgggaggccgaggcaggtggatcatgaggtcaggagattgagaccaacctggctaacacggtgaaatcttgtctctactgaaaatacaaaaaattagctgggcatcctggcatgcgcctgtaatcccagctactcaggaggctgaggcaggtgaattgtttgaacctgggaggcagaagttgcagtgagccgagatctcaccactgcacttgagcctgggtgacacagtgaaactccatctcaaaaaaaaaaaaaaaaacaaaaaacagagaaaatgtggtatatatacacatatcatggaatactactcagccataaaaaagaacaaaataatggcatttgcatcaacctagatagaattggagatcattcttctaaatgaagtatctcaggaatgggaaaccaaacattgtatgttctcactcataagtgggagctaagctatgagaaaacaaaggtataagaatgatacaatggactttggggactcgggggaaagggcaggaggtgggtgagggataaaagacaacacattgggtacagtgtacactgctcaggtgatgggtgaaccaaagtctcaaaagtcaccactaaagaacttattcatgtaaccaaacaacatctgtttcccaaaaacctataaaaataaaaaataattaaaattaaattaaaaaaataacagctactccagtgattcaatctgcactcaatattgagggctcctaatggaaactataacaagaaatgtggatttctcttatgggcaatagaaataatttaacaacttttataaaggagagataaatgtaaagatttgtgttatgaaacaatgcactctggccatctgtgtggaagagggattgacagtggagaagactggcagcaggaaactgttgtgcaggctgtggcactaatccatccagaaggaatgacagctttagctagggtggcgatgatgtagcagagaactgaagatggtggggagatattaaggaagagtcaagagtttggagaatgaatggcttaggagtgggctactgggaagaaggaaagacctaagatgatgcccagatttctggcttgaggagctggtgaaggactataccttcctgaaacaggagctgatgaattccagcgtgatggaggagggtttggattgaactccaggtgtcaatgagggacctggttggacactttcatttttgcatatatattttcacattttatgtacattatgattggcattctgtatttgttattgcatccatttctttatccgttcagagcaaacatttacgggaatctgtaccagacattattttagctttaaaattctttggtaaaaaaagtcaagtatccttcccctcatggaccttatatttccctacatctgtgttcctatgattgtcatcaaacctgggtgaaaagtagaacacttaactgctccatgtcatgtttctacatttctacatagtctttataaatacttcatttctgccatagtctttcctcatgttgatagataaaaatgtttcaaatctttccctgggtggttttgatttttgtcattcaatattatgagcattttcacatataaatctgttgtttatttccttaggataaatttataacagtggatttataaggtcaaagaatttggacgttattttcacactttctagactgtaccatattgttcatcaacatgcttgtacttctcagaataccactagccaagatagatagatagacagatgttttttaaaagagcaccataatatttcaagcctctgaacgctttgagcctgagaaatccttactgacagcctcactccagtgtacaaatgagcaagaaacacattaaaaatgccctacatcattagtcattatggatgtacaaatccaaactgcaatgagataaagtgttacactcaataagatggctataataagaaacaaatgacaaaaaaataaagcgtggcaataacatgtgttgacaagaatgtggagaaactggagctctctgctggtgggaatgaaaatcatacacccagtgtggaaagcagtttggtggttcttcaaaaaattaaacatagaactgccacatgatctaacaatttcactcagccataaaagaattgaaaacacacacaaaagaattggaaacaggtattcacacagatacctgttcacaaatgttcagagcagcactattcatgttatccatgaataagtagataaatagaaaaaatagattagaaataatctaaatatccattaaaggatgaatgaagttatatatgtatacataaaaaatatatgaatattattcagccataaaactaaagtattggcaaatgctataacatagaggaaccttgaaaacattatgctaagtgaaggagccagacaccaagttcacatactgtatgactccatttagatgaagtatccagaataggcaagtccataaggacagaaagcagattggtgttgccaagggctctgggtagggtagaatggggcatgattacttaatgggtaggagtgtttctctggattgatgatggtgttctggaactagtagggtggtagttgcatggcctggtgaacaagtactgccatcagtttgagtaatagccctgaattgcttactttcaaatggttaattgtttgatatgtgaatttcaccttaacaaaggagaaaaaaagtataccgtattcactaaagtctcattagcatttcagtaaagcttttgctaatttagtagattttaaataaccgaatgcttttttaaaaatagtgaagataaatatttttcaatgtgtttactatttgtgtttatttctgtagaatatttgctattattctctgcaaatatattttacaaggttgatttttaagaacagatttttgttaattgttactacattgagtttttaaaaatattataatccattgtccctattttttcttattgcttcagtgctatacactcagaattgatatgtattgtactctattttttgctcatgtttataatttaaaatgtttaatcactttaattaatgtggaggttaattaatcactttaattaattaatcactttaattaatgtggaaattatttggtatagagactttgaaaagtggatttttttccccaaatggctgtttttccatcatcattgattgaataattcttcctttgatacccatagatgagcttcactcattcacaaggcagccttctttgaggtctggcaggaaggtggtttcttgggaaccttgtagagcctgtctctctaatacatctttttcttctccttctctttctccactttctactcccccctcccacattcctttttattgtgaaacttgaggttctatttggaaaagattctgaataagtctgaaaagacaaaattcaagtggaaaatacaggtcttggaggacttcaaaatgcagataacagcctaaattagcatctacggaaatactcagtcgtcttcatttcagagtaaggcataaactatgtgtatgtcttaataccaaaccataacactgacaaatagcttttgttacggtagtattattccatgtgttttaagactcagtttaaccttaatttataggtgctctttgtctctcactctaccatgaattaagtcagtaggaaaagtactgccatctatttgggagaaacagaagataaatgcagaaagtgaattaagtttttttcttattgtaatctaatgtaaccggttaatgtggaaaaccattttttaaactttttccggatgttatgcatctattcaatgtcttgaccttaaatgtgatatgtatttggtgagacctttctattgtacctaggcagagatacagaaacattgcttttagtccagagagtaaatgccactgtcttaatagctatctaatatctcacagcaaactgattctttctaagaatatttctttcttttttttttttgagacaacatctcaccatgtcctctggctggagtgcagtggcgcagtctcagctcactgcaacctccacctcccaggtccaagagattctcctgcctcagcctcccaagtagctggaactacagaagcatgccaccgtgcccagctaatttttgtatttttagtagagacaaggtttcatcatgctggctaggctggtcttgaactcctgacctcgtgatccacccacctcaggctcccaaagtgctgggattacaggcatgaaccaccataccaggccagatatttctatttaattttgacaggaggaatgattctgggtatatgtatagccccagaccaattttagtcttttaaagtttatgagatgatagaggtgtatgcatttcacgacagaatatagctttcagggctgttagaactaatagctcagtgggaaaagtcatccctcacattgctagcatgggctcatagtatgtgatcactggaaagggccttagcagccatgacccttccatttaaagaggctaaatgatggatttatcttggggatgaaattacaaattaaaaaactgagatgatactacgtctcaggatgcctactgaaagtttgcttatggagaaagtaatttgtacttggtaagaggaaaagtcaaagaaagaggggcaatgtagcacagctgaatgaggcaaaaatgcctggtctagagcaacatgaaataaagtcacctgaagtgatgggactgttgatggggaaacatcacacctacagagactggaggaagcttggccatgaactctacaccaaggagcaaggagcgagccctgcgtgcagctcctgggatcccaggctttagggttgtcccctcacaggagtgttaagggacaattgagaaagtgtggaaggaaaatgccagttgtgagtatgaggctgtggggagccgagggagggccgtgagtgaccaggaaaagctgcaggcaagcggaggggagatgcagaatggatgggagaagggctacgattgcgtatttaacctgttgccagtgtagcctgggatcaccatcgttttgcattatttttaagactctttcattgaacagagcatctggaaataattctaattcagtggcagttttgaggatcagtagaatctcacaacataaagaatttgttgtcatgctaatatagttgattacagtctgcttggaaaaaaaaactgaacgttgcgagaatcagtggtgcatttctggatggctttacacagagcccacagagtgcagcagttcacctgaatttatacacaccctccagggaaagccaacactcttccatgctgatgcgtatgcttgtgagatgttttcattaatggatctctagggaaagtccttgtgtctatttctttgttatttgtttaaatttgtttcctcttagatataagagctatctagctataatgactttaacacttaaggttggataagtgtggacttgtatcacttttgaaaaaaaaaatccttttttactcaactcaaattctctttgtggagttggatttccagcactgtaaatagagtgcaaaactgcctttatttactgctgacttaaaagcatacctggctgtggcattacaaatgagaatctcctgagcactatattctatacaagctgactctttttgaaatttttttctttttttaaaatttttatgtttttaattttatttttccataagttactggggtacatgtggtatttggctacatgagtaagttatttagtggtgatttgtgagattttggttcacccatcacccaagcagtatacactgcaccatatttgtagtcttttgtcccttgcctcctcccacacttccccacaagtcccaaagtccattgtatcattcttatgcctttgcgtcctcacagcttaactcccacatatcagtaagaacatacgatgtttggttttccattctttacttcacttagaataagtctccaatctcattcatgcaggtcactgcaattgctgttaattcattactttttatggctgagtagtattccattgtatgtatataccacagtttctttttttttttttgagatggagtcttgctctgttgcccaggctggagtgcaatggcacgatcttggctcactgcaagctctgcctcccgggttcacaccattctcctgcctcagcctcccgagtagctgggactacgggtgcccgccaccacacccagctaattttttcttgtatttttggtagagacgaggcttcaccatgttagccaggatggtctcgatctcctgacctcatgatccgcccgcctcagcctcccaaagtgctgggattacaggcatgagccaccaccccgggccataccacagtttcttaatgaactcttctaccaaatggaacatttcagatgacacagtccagtctcttcatttagaaataaggaaacagagacacagtagttatgtgatttttcccaaggtccctaagagaggtgattacaaagattgcagcaggaggtttagccaacgctcgttttaaaagatttttgagaaaatctagaatgtaacttttaaattaaggttgggggactttttttagtctgagtaatcagctcaggaaaaaacctcaaacacacagttaatttatacaaaccaatcaagtaaaaataggtgcccacccattcaggaaaaaaaaaaaaaagtctttgtggctacagtagtgtagttgctgcaactctatttgttcttaatgttgcctaaggtgttatgataccctgtgtctataaatgacttttgaggggattgggtatctcactcttcatgtttttaatacttttagggtttaaatgaaaataattgagtattaaaacaatatcttttagactagagaatttctacttctgtggtagagtttggctgtaagtgcttcttgaaaaagataaacattgaatgtataagaatttttgcttcctgctatactaaagctagcccctttaagctacatttaaaatatttaaaactagttctagaatatttggttgaataaaaccaatattaataattatagtacatactatgttggtttggcatttttaggattttataacttcaataaaaagatataaagcattcccatttctgtcagatcaagctcacagccttatgatgtcaatatcccaaagctgataaaagcacgatttacttcaatttgataatttgtggacttgtacaaatataaaaagatgaacgtctatatataaaataaatttaaggttccctgacagtaggaatatagctgttttaacagttactcaaaaaagagtcagtgtttaggaaataagagctgtctctatttctttcttacagatattctaagtttctagggtgcaataaagatttactaacataaaaatgcttcgtgatgagattgaagtttacgtaatttatttaactttattataggcgtgttaaataaatgttttacttaaaagaaatgtagatgtttgttatattagagccataaattttgtctaggtctgaaaatcttctctttacccttggacaactcactgttcctcaatgggactttgtaatttcatgaaataaagggtaggtaatggagcatatgaatcagatggatgtttcataccaggtgttggcatacatacgcaatactgagaaactgacaaagtgagatgcagagtctacacaatcaattttaaaaattgattctttatgtcttgctgaatgtgttataagacatctcatgtcaacctttacagtggattgtctacatgtgattttttgatgtattattaatgaacttggatatgtgacatttctctccattcaaataattaaataatccaaacttaaattattatttaacagcctgcctttagataattgttaagtgtaaaataaagaaagaatgtgaagtttttgatgaaatctctataaaatcacttgcccttttccatgaactcagctgcagggaagtataccttttactgtgaagactttgagaacaaaacaagacaaatacaaagacaaatggaaaaccatttaaaacagctcttttagttactagtgtaaaaatttgaatcaatatgctagtggcatgcattttactaataagcatacatttcagttgtaagactgaatcattaatacatatttttgctgatgacatatatttaatgtcttccctctacactacagttataggtagacattgtaacagtcacaggcatttattttactcttggaattatttattattagctttgagtcatggtagtaaacattctcaataatgatgtaatttttaaatttattatgcttttataactgtgccagtaaactttatactcaataatatacaattctcatagacttggtatttcaatttatatcaaagtggccaaatttataccttagactgtgtctgtatttttatagttttaacagttactttaaatgatgggttgcccgaagtacatgaatgcatttctgggaaaagtagctttttgtttctattaaggcaaaactgacaggcattattgttgtttaaatttatttttaattgagaaataagtattgtgtatatttatggggtatgaggcgatgttttgatctatgtataccttgtagaaagacttaatcaagctaattaatatatccattactttgtgaacttatttttgtggtaaaaatgttaataatctattcttttaaccaatctgaaatatataatacattattattacttatggtcaccatgcagtgcaatagattgcaaacacttagtcttcagtctaactgaaactttctaccctttgaacagcatgttttgaagtccctctcctcaacttcccctccctttaccctctcctcaacttccccctttaccccagcccctgatggcaacctttctagtttctgtttctatgagatggacttttttagatgccacataaagcgagcttattcagtagttgtctttctgtgcctggcttattttacctagtctcaaatggcaaaattattctctttttaaagactgtatagtattccattgtgtatatacttttataacacattttatttatttattcatctgttgatgaacacttttcaggttttgaggagccactacactgctttgcataatggctgtactaatttacattcccacacacagagtgtaagtgttccctttcctccacattctttccaacatttgttatcttttatctttttgataacagtcattctaacaggcatgaagtggtgtctcactgtggttttaatttgcatttccctgatgactgaagatgtagggcagtttttcatgtatctgttggccattcacatctcttctgagaaatgtttgttcagattcttcgcccgtttttaatcaggttatttgtatattgctactgagttgcttgaattccgtatgtattttggatattagctccttttcagatgtatgatttgcaaatattttctttcaatgcatgggttgtcttttctctctgttagttgtttcctttgctgtgcagaagctttttggtttgatgcaatctcatttgtctattttttgcttttgttgcctgtgcttttggagttgtatccaagaaatcactacacagactaatgtggagctttttccttattttttcttctagtagctttacaatttcagattttacatttatgtcttgtgctcatttcagcgatttttgtatatagtataagaagagggtataatttcattcttctgcaagtggaaatccagctttcccatcatgtttttttgttgttgttgttgctttgttttttttttgttggtttgttttgagacaagagtctctgtcacccaggctggagtgcagtggcacaatcttggctcactgaaacctctgtctcccagggtcaagcgactctcttacctcagccccccaagtagctgggattacaggctcacgccaccatgcctggctaatttttgtatttttagtagagatggagttttaccatgctcgccaggctggtcttgaactcctgacctcatgatccacccacctcagcctcccaaagtgttgggattacaggcgtgagccactgcacctggcctcccaaaatcttttattgaggagactgtcctttccccatttgtgttcttgacacctttgttgaaaatcaattgaccacatatacttaggtttatttctggactgtatatcctgttccactggatgatttctttttttttttttttttgagatggagttttgctcttgttgcctaggctggggcacaaaggtgtgatctcggctcactgcagcctccgcctcctgggttcaagtgattctcctgcctaagcctcccgagtagctgggattacaggcacgcaccaccacgcctggctaattttttgtatttttagtagagacagggtttcaccatggccaggctggtcttgaacttctgacctcaggtgatccactcgcctcggcctcccagagtgctgggattataggcgtgagccactgcgcctggcctggatgttgtttttatgccaatacgatactgttttgattacaatcactttataatatattttgaaatcaaggaatgtgatgcctccaggcttgttttgccttgtccaagattgttttagctgtttggggtcttttgttgctccatacaaattttaagataattttttttcaatttctatgaagaatgacattggaattttgagagggattgcattgaatctgtggatggctttgagtagtagggagattttaacaatattagttttgccaatccatgaacattggatatttttccatttatttgtgtcttcaatttctttaattgatgttttatagttttcagtgtacagctctttcctctcctggttaaatttattcctaagtattttttgatactattataaatagaattgttttgttaatttatttttggacagttttttgttaatacatagaaactacttatttttgtatgttgattttgtaatcagcaactgaagggtattattattaggctattgacattttttgaaaatcatggattaaactggatcaagacaaggctaatcaggtgaaaactcatttccagatagccacatcagtcaaagccttatatatgaattccataaaatactaataataatggaaattggacttaagcagagagaggactgctccctccccaaagaaaggatgtcaaagatttaggaaaagcacagctcaggtttattcattcatcatctaacaaatatttattgatcacccactatggttatagctactgttctaatgctggggatatggtagcttaaaaacaaacaaacaaaaaatttaaatccttgctctcaaggagtgttctataatgtggaaaacatataaaaacaagcatgataatattctaatggtaatacttacttactaagaaaacatcaatccaaaatataaaaatgaaatattggagttctctgtacttaaaattttatataagttatgataaaatggaagtggaaatgtgaaaaatatagtagagatcttcttacatggtacccctgtgttagcagatgttcttctcatacacagggctcctgtttcagcagatatcttcctcataacatggagcttttgttttggggtcagtttacttccaaagcgtgcactctctaaagttgtttacacagaactgaaatgttataataagcagattgaagcaaaacactaaaatacaagcactttattctagtggctgcatgatgacacctctcacctcagaatcttcagataacaggtaaccaagaaagaaaacatctagaccagattcaaggactacaggcctcccagacaggccatgccaatagctgtctccttgctctcttgctcttctgttttcgttttcctacctgagcccaacctcgattgctcttcctaaagtcctttttgtcaatggagattaaggctgatcttgatatgaatgtaatttggcttgagttttagaaactctttctgtttaaacccacaatttcaattccagcacaaaatacaattaaaggaaacttttgttctcctggagctgttcaagtaaagcgacccccacatctctctcggctttcctttgcctcctctttcttccttttgtgcccctctttcttctcctactctcatctcttctttctttctacttcctcctccttttccctattccctttgtttccttctatgtattgactggcagcaatttttgatgtattatctaaagtgcaagaataattttaatgaacccagaaaatatattcaatctcctgaagtttatacttttctggggagatcaaggaaaacattactaacatcagagagaaatgagagaagaaggccttgcattctgagttctctgttctctttagcgtcagatgcttctcatgcgttgcttcaggtcctcctggtctcccctgtctctgggacctgtggccacttgcttctgccacagccatcaccatggcaaccagtcccaaaagtggactgcagtggacttcgagtgccgccatcactctagctcagccctttttcttctcccttcccctcctccctcttcttctcatcattattgtccatctatgaaggattcccttacccacataaatatgcagagacaccatcaatgtagaatatttcaaaaagtcaacatcacaggatgcaagatcaacataccaaaataaattgtatttctacatattggcaatcaacaattggaaatagcttttttaacaaaatgttatgtacaataatacaaaaaatactttgatataaatctaaaaacaatgcaagacccatatgctgcagaaataaatgaaacaaaccctaaataaatgcagagatacattgtgttcatggattggaagactcactgttgttaaaatgtcctttctctctaaactgatctataggttcaacacaattctagtcagaatcccagcaggatatttttgtagaaatcaacaagctgactctaaaatatatatggaaaaaaaactacaatagccaaagtaattttgaaaatgaaaaataaaaatttgaagatttacactatctgatttcaagactgagttatatagtgtaaggcctaaaatttcacaggctgtcttatatttttaagcctcaagggaccctaaaggccatattgtgagttccctgctttcagcagatgtgaccctgtgctgaaccagctgcacaccacctggtcctcaatctgacagacttcagttccctgccagccgcaaatcattaaaacaaggcagtatcgtcctcacatagtaaccaggggcaccctgtgctgttgatattcaaagcctgcctctctcttgctgcccctgcttgttcatctgttcccaagtgcaccccggtgtggccctgtgtggtgtgcagtgtcctcccgcaggaccatgagtagatgtgggtaataaaatgctgcccatctatctgcccagtgttgcgatgtgttcaaccatctcattctgtttagggcagtggatgccttcctcactaatgaggtgaatacgaggtcatcatagcactataaaaccacagtaatcaagccagtttgctattggtgaaggaaaaaaagagtacagaaatagacccacatgtatgtgcacggccacttgattttccatagagatacaaattcaattttgtgaagaaagaatacacttttcaacaatagtgtttttttatattaaaaaaagaacttaaattcttaatttgctccatatacaaaaattaattaactcaaaacaaatcataaacctaaatgcaaagattgaaaccataaaactcttgcaaaaaatataggagaaaatgtttgtaatcttgggttagggaagggcaaagttttcttaaatacaacatcaaaatcacaactcataagagaaaaaactgataaattacacttcatcaaaatgaagaacttctgctcttcaaaatccagtgttaatacaataaaaaggcaagccacaaattggaataaagtatttacaaactatatatctgattaaggacttgtatccagtatttatgaagaactcttaaaactcaatactaaggaaacatctcattttttttaatgggcaaaatttttgaatagacactttaccaaagaagatatacagatgatgaataaacacattaaaagatgtttaacatcacagtcattaggtaagtgcaagttaaaaaccggagatgactactatatacttcttagaatgaaaaaaagaaggaaggaaggagggagggagggatggagggagggatgaaaggaaggaaggaaggaagggaaggcattccaaatgctgaggaaatatggagatgtagaacacttggaattcaaatacatttctggcgggaatgtacaattatatagacactttgaaaaataatcttccaacatattataaatttgaccatatacttactattcagtccaggaatcccactgggtgatatttcctccggtgaagtgaaaatttgactttaaaattttaagcaaatgtttaaagcaggtttattcgtcattgccccaactggaagcaacttcaatgtctttcagcaaacttggtccctggatggactacacaggtcaacaatagaaagcaacaaactatgggtacatgcaagagcatctcaattcagcattatgttaagtgaattcagacagtatcagaatgctacatactatatgattatatttacaataattagtgaaactgtaagggtagaaagtgcatcattgctcaccatggggtggaggatcaggggagtggctgactacaatgaccatggagaatttggtgggctgatggaactttacattttgacagtagtggtagttaaatgactgtatggatttgtaagaaattgagaaattatacatgcaaaaattttactctgtgtaacttataatctaataagaaaaaaaatgatttaaaaagagccagcgaccacagtggtaacacattggaattttcctctcactgtttcactgtttgttttgggggctctactgaagagtagagagatcagagcagtagattctggttttgctgtaccactaagcagccacaggttctcaagatcatgatgactttccccaagagctattgtggaggccaaatcagataatgtttcagagacagtttcacaatataagaagccctatacttgacaaagtacagttataattatgtataatatttggcagtgataaattcttcatagcattttcctgtttcatatctcataatcattcattaatttggcaaatattacttgaatattttggcacactcttgtccccaaagtgttctagctccagggaatgatagataagtaagctacagtccactgcccttggggaattcagaatcaagggtgacaggtagacttatcaacaagtcctgtaataacatatgatgaagctggtacagagataaatatgagataaaaagaagtggttcccaaaagaatgattaaagttctcctccaggggtggaccttggaaagtaatccaagaacttggaaagtcttagatatcatttataggagtttagaatttaacctataggtggaagggagccactgagggttttaagtagtggtggcaacacagcagatgacgttttagaaacattatctggcaacggtgtgaatttttgtgcacatacgtgttggggtgtggatatgcatgtgtgtgagaagggatttgggcattggaggcagaaagacaggtcagagacttgtcaaagttaaataaaatatgtagagatgaatccctcaacttaatcgtcagatttcatttgggatacaagaattgcaattcggggaagagtcacagaccagatggtctttggtatgtctgagaaacaaagagaaggttttataaagaagggaaatgttatgtattgtcttgtgagaaagttctttggtattagtaaagttttggaaagctggaaagctctgattggttactgacagcagtgggtaaaattagtcatagaattgcagcaggtggttgcagcaaatattagataaaaccagtttcgggttacagcaggtagtttcagcacctggacttgcagagaattacatttttggagcaatgttgtgtgccctgagtgtttttttcccccagcttctcagctgtttcagttgggtataacaagaatgacccaatttgtatgatcgactttcacagactgttgggtgaaaaacaatgagaatccaaactaaggcaattgcagagcgattttagaaaaggagactgcttcaagaaatattttgggagtaaaatcagcgaggcttattgtctaattccatgttgaggaatgggagacagaagctaactcagtggatgaagataccgtttaaacagtgtaaggccggtacgaggaagctcggatttggtacagaagagggaagaggaggaaggggaagggaaaatgtttgacaggtttgtgtttgaaatcctgagatcaatgtgtgtgtaaatggatctatggtttagaaaagaaatcttagagacacaaagttgggtgttatcagaatactggaaatagataaagccacatatacaataacttacttttctcgttccctagttggaagaaataaccaaagacacaagtaatattcacccggtgatcagatatcacagtgaaatgacaaagtatcatgccttagtttttgcgagtgtagattttgttcagtccttgtcttccattctgtccttcaagcatgtgttttgttgtgtttttgagtctccctcttccactagattgtgaactatttcagagaggcttatttctttcttaccttcagctttaagcctcgtgcctggcacacagcagacactcaagtttttaagtgatgtgacgactggtgattatctattgactttcccccgtctcgttacatagagcatactaatttgcaaatgaaaaaagtgggcttatctatgctaaccccttggctggagttaaactataattcataatttattttcaatattaaccctcattaaaatatatagggtactgccaacatttttagaaactcttaccaaatgtaaatcgagttcaacacctggttcattcattttttaaaagtaatattgtttttctttgttttcataagatttaaaacaaaccatcattactgcctcaatcttattcacccagtgttttttggtgaagtatttgaaatgtattgctgtctttcaaggacactattagaaggccttctgagccagaggaggctgccttctgcttatcggtcttgttatcagtgacagtcattgtggaggatgtaagttgagaaataggagaggcatcactttgaccacaactgtgtgtcagtctcctgaatgattttccctcctgttttgaagtatctgataatgacttcttagagggtctggaaagaaaacaccttctctctgcatttcccttagatactctgcataagctggccttgtatgaatgcaataattttccaaccaattgtggctggtgtcacaaccaattcaatgcacttctgagattgtttatccagatggaatagaaaaatgtggtgcagggctgctgcatgggacccgggagccagaatggctgacttttaccctgacctcactttgtgcttgtagacagagtgggaatccaggttcttggagctctcctgtcacccctgggctagagaacaaagcccttggaggatgcctacgaagaatgttgagaacaagtgcgatctttagcccaacctcttttttaaaagcattatttgagcatgttcaggttgctttaatataatttgtttgattgttcttgtttttgtagggtgtattgcattgattatgtgaagggcaaatgtacatagactcatcactcatatcctgcattagtattgatttagactgctacaaactggcaggaaatgagaaaaaaatgtttcctacttctcagtcataagccaattaaaaaattcaaaatgtatacaattacttcctcggaaattttatctcagaatagatataactacaatttctactaaccaacaaatgaccatttctgtatgatgaatactcagggttctaatattcagccttcttttaaggactttctaattttgcattgagatggacacatttcatctattattcaggagcagagaaaacatgctttcataaaagcaacctgtttacaaaaggctggctgttataaacaggccgtaacaccctcacatatattgttatgaaagtgaaggtatgcatctgtatgtatctatacaaaacacaccatttaatgtatttgtgtatttgtatttctgtaacatacacacattataaaatcaatctaaggtcaaattctccatcataagtgtgagttgacagagaggatcatatctttgtaaaatattatgaaattatatggcagtttggaaaaagaatcaacggtggttttgtatctgcttccagacatttccccctctgcaagcttaaatttgcacacagtaccccacagcactcgagcgcgtatctctatcgccaaagtgatttctatcatgtcctaacctcattagtgaacacactcacagactctcaacacccattctaatcaagaagcaagaaaacaaaatgcatcaatcttaaaacatcatcaatgcaacaaattaagcacaaggtcaaatttcattagggttatttggcatttgctggtagtgaaagattgcattaaaccaaaaaaaatgcatcacacgaatttttttgtaacacataccctttagtaagtcttctaagtcaacaaaattaattttatctcgtaaagaagctttgataaataaagagctgttggtcagaatataaagatagttcaatcacatacatgattatagttacaataattttaatgtaatattgtattgactcatccatgtatatttaaatttttattatatattgaaattatttttaagacatgcagattagcaataaaactaaaaaattacctatgtcttagaaatcttggtgtgctcctccatatacttgaaagcatttccatttaatgtgataattgatatgtttaaactggtctgtcatccactgttttttctgtttgcactatctgttcttttctttcttttttcttttcttcttttgtaatgtgtgcttttaaatttcatttttattttaattgtttaattattttagtgggtttctttggatttatatgattcacctttaatttatcacaatctgccttcaggtaatactaaaccacttcatttattatgaactttgcaatagtatactagcatttctctcttcccagcctttgtgctattaatgacatatgttgtccttatatattataaagcccataatatattgttatcatatttgtttgaacattcatctttcaaagagatttacttaatgtataaactatcctatctgcttacctatgtagtgaccatttctagtgccctttctgtcttttgtacccccacagtttcattcggcatcatttccttccatctgaaggactttcttttttgagagagaactctcttctttgagagcaattcttctgagagactctgctggtaaagcattttagttttcttctattgaaagtagtttttggccttcaccttttttgatgttttcatggcacatctttgcccatctttttacttgcaatctctttatttccccttcattcctgaaacatacttttataagacacaaaatttacaacagacagttattttctttcagtactgaacttgaaaaatattgtgtcactttttttctggcctccgtggttttaggtgagatacccattctaatttgaaatgtcattcccttagacgtaatgcatcatttctctcgggctgctttcagtgctttttctcttcccaaaagattatttattctgaaatctgattcatttatttattttagtttattttctgctttttttctacagatttttttcccttcaagttcatcatatttattctatcctctatcatctctctcagttttactattataactttctaatgtgtttaaagattttggatttgtaacttttttatttcataaattccacttagttgtttttttaataacttctattttgtattaaaattttccattttttatttgttttaagataattcataattgctggttgacgtatgtttacaatttctgctttaaaattcttgccagataattccaacatctgatttatcttagggttggtgtctgttagtgcccttttcttactcaagttataattttccttgttctagttaggatgagtgatttttaattgtatctatcataggtgttttggatattgtattatgagattctagatactattcaatcttgttttaaaccaagtagttcccctattgaggttcagtatgagggccaagtgagtatatatgttcagctttccactaagccctggcagcaccagcccagcggagtggagctcactcacactgcctcattgcagatgggtgaggtggaagttcagctcctcctcaaccctgatgacactgtcttagtgactattgagcactgtctctcaccatctcattgccttcaaaaggggatgtaatctcagctccttgctcaaccctgttaacaccagggagaggagaagtggaggcctgactcacactgatttgttgctgcagagtgggggtagaatcacagtttcccagtggtcatccctttcatttttgaaagatatgtttgtagggtataaaaattacaaattgacatatattttgtttttctcctagtatttttaaaatgttgctccactgtcctctcacttcattggttctgatacaaaatctgctgtcattcctatctttgtttgtctgcctgcaacatgacttttatctctggctgctgttaagattttctatttttcattgattttgagcatttaaattatgatatgccatagggtgattttctttatctttcttgttcctagggttcattgagcttcttgaatctatacatttatggttttcatcaaatttgggaaatattctgccatgattttggggtccaattacatgtatactgtgccacttggagtcacctgtacctcagtaatactctttatttttattgactgtttttcctgtgtttcattttggttagtttctgatgctgtatcctcacattcactaatcttttcttttgcagtgtctaatctgcttttaatccccattcagtgtgttttcaatttcaggcattatagttattatctcaagaagtccaattttttcttttgatgtcttctctatatctacttaactgtttgaacatatggaatgcaattataataactttttattttcttgccttccaatttgaacacctttggcagttctgggaagattttgattgattttttctgctgattatgggtcctattttctgcttctttatatatgtggtcattttttattggatacctagcttgtgaattttaccttgttgggtgctagacatttttatattcctatacatatttttaagcttggttctgaaatgcagttaagttatttggaaatgttttgatctcttgggggtgttttgtttaaacatttgtgaggcaagaccagaccaatttcaatccatgggcatttttccccactactgaggcaagacccttttgattattctactcaatgtagacagtattcctctgtgagaaaggtgggcactgttctctcttaaggaagagagggtcttttagagagtttcagccaggtgcagtggctcacatctgtaatcccagcactttgggaagctgaggtgggaggatcccctgagcacaggagtttgaggctgcagtgagctatgattgtgccactgcactccagcctgagtgacagagagacatcttgtctctaaaaaataacacctaaaaatcatagggcgtcttcttcagattcaggtagtttcctcacatgcatgtactggtcactacttggctgaattcacagatctccggggcccttcttctgtgctgcaatctattctctaatactctttcctgtgaactgtagcattcttgacatccctggattcttagctttgtctcctctactgagggagtaccctgggttctgcctggcttcttcttccctccctgcactgcacatggacattatctcacggcaagaatctggtagcaacagttagctttgcttctttttctccccccttaggaaccactgtctttcgttgcctgaaattcagtgtcttgaaaatacttgtttcataaatttgtctttgatatgcttttatttgttttgcttttggttgtctctggtgggagaataaatctgaattttataacccatcttggctgaaagtggacactgtctcatcaatttcaagatattattttactcactcttgcctctaatgttgtgttcacactaattttcctcctttttaggcaatctgcttttcctgtcaggctgattttaagaaattttctttgtctttggtgttctttactttcacttagatatatatatatatatctgttactaagatatatatatatatatatatatatatatctgttactaagatatatatatatatatatgttactaagatatatataatctgtcactgagatatatatatatctgtgtccatttgtattttcatttgtgttacaaaggctgtcataatacaattcaataactgatgatttcatcaatctgaaaaaattggtacacgttatcccaccgaatattgtttctttcttggtctttttattttttagtttttaaaactctgattagggtagaactctgtccttcatgttgtattttggataatttcttttgagctttcatttcctgatcccctattcacttgtgcccaaactgatgattgcctcatccaccgagtatttgttttaaatatttatgttttcatttcttattttattttttgttgtttaaaaaatcctcatttgtcattgcattagtctgtcttcatgctgctgataaatacattcctgagactagacaatttacaaaagaaagaggtttattggatttacggttccacatggctggggaggcctcacaattacggcagaaggcaagtaggaggaagtcacatcatacgtggatggcagcaggcaaagagagagcttgttcagagaaactcccatttttaaagccatcagatctcgtgagacccattcactatcatgagaacagcactggaaagacttgctcccatgattcagtcatctcccaccgggtcccttctgcaactctcacatatctctgtatggagacacagaactaaaccatgtcattctgcccctggcccctcccaaatctcatatcttcacatttcaaaaccaatcatgccttcccaacagtcccccaaagtctcaactcatttcatcattaactcaaaagtccacagtgcaaagtattatccaagacaaggcaagttccttcctgcttatgagcctgtaaaatcaaaagcaagttagttacttcctgtatacaatgggggtaaaggcattgggcaaataaagccattccaaatggcagaaattggccaaaactaaggtgctacaggccccatgcaagtctgaaatccagcagggcagtcaaatcttaaagctccgaaatggtctcctgtgactcgatgtctcacatccaggtcacactgatgcaagaggtggtctcccacggccttgggtaactccacccctggggctttgcagggtacagcctccctcttggctgctttcactggttggagttgagtgtctgcggcttttccaggcacatggtgcaagctgttggtggatctaccattctggggtctacaggatggcagtggccctcttctcacagctccactaggtggtgccccagtagggactgtgcgtcatggctctgactccacatttcccttcctcactgccctagcagaggttctccatgaggaccctgcctctacagcaaacttctgcctggttatccaggggtttccatgtatcttctgaaatctaggtggaggttcccaaaccccagttctttacttttgtgcactcgcagactactcaacaccatgtggaagttgccaaggcttggagcttgcaccctctgatgccatagcccaagctctgtgttggcccctttcagccatggctggagtgactgggacgcagggcaccaattccctaggctgcacacagcacggggaccctgagcctggcctactaaatcacttgttttacctaggccttcaggcttgtgatgggaggggctgccatgaagaactctgacatgccctggagacatttttcccattgtcttggggattaatatttggctcttcattacttatgcaaatttctgcaggtggcttgattttctccacagaaaatgggattttcttttttattgcattgtcaggctgcaaattttccgaacttttgtgctctgcttctcttctaaaactgaatgccttttacaggaccctcttgaatactttgttgcttagaaatttcttccgccagataccctaaatcatctctctcaagttcaaagttccacaaatctctagggcaggggcagaatgctgccagtcgctttgctaaaacataacaagagttgtgtttgctccatttcccaacaagttcctcatctacatctgagaccacctcagcctggatttcattgctcatatcattatcagcattttggttaaagccattcaacaagtctctagggagttccaagctttcccacatattcctgtcttcttctgagccctctaagctgttccaacctctgcatgttacccagttccaaaatcgctttcacattttgggatatcttttcagcagcgccccaccctactggtaccaatttactgaattagttcattttcatgctgctgagaaagacattccagagactaggcattttacaaaagaaagaggtttattggacttacagttccacatggctggagaggcctcacgatcgtggccgaaagcaaggaggagcaagtcacatcttacgtggatggcagcaggcgaagagagacttgtacagagaaactcccatctttaaaaccatcagatctcgtgagaccccttcactatcatgagaacagcactggaaagacccaccccccatgattcagtcatctcccactgggtccctcccacaacatgtgggaattatgggagctacaagatgagatttgggtgggaacacagagccaaacggtatcagtcattttggtcttttgcttcctatttacatttcaaccttcatttttgtttatttaaatacattaaatcaatttattttatattctgagtctagtaatcccaataactctcagttgttacttttggtttccaattatgtttctttgggttcttgaatgttttcctactgttactttcatctcttattcctggaacatttgtcctagagaaatacttagaggcttagaatgaaaacgtattcctttttaaaagaatgtgtttgcttctactaggcaattgagggactctaccaacctggtagcactttaaaatgaattctcagaatattttcagatcatttaggatgtgtgaatttgtgtggggttcatttccaattaaaatttatactaaacaagcaaccctttagggtcccaacttcattattcagatgtcttcatttgtactgtctacttggggtgtaagcggggattgataatcatctcagagtgttctgtattattatctaatattacaagggaaagggaagacaattctagagtgcgagcctgctattaacttagtttttgtcctctaaggattccttactctctctaaggattcccactttcagtcactgatgcatttaaatgtctaaaaaatgttgaccccaacattttttttcattttttagttgggataattgtttagggtgtctagttggccatactgacaaaaatggaagtcccttatgtttaagatgtttaaattttgagacaattgatattttcaaatcaatgttgtaatgctgtaagtaaacccaggcaagtttggtcgtgtacaattgttatttttagtaaataccaaaaatccttgttatttagaagaaatgcagagccatatatattttctctataaccttgctatagtaatgggtaaccatgaaaatatatctcagactgaattcttttttttttttgagatggagccttgctctgtagccaggctggagtgcaatggcatgatctcagctcactgcaacctctgcctcccgggttcaagcgattcttctgcctcagcctccccagtagctgggactacaggcgcgagccaccatgcccagctaatttttgtctttttagtagagatagggtttcaccatgttggctaggatggtctcaatcacttggccttgtgagccgcccgcctgggcctctcgaagtgttgggattacaggcatgagcagcagtgcccggcctgaattcttttagacatgtgaacattatcagcaggcacaaaagcagtaatgtgtcctgtcctatattcttcataaagtcctgatcctagttctagaaagaactacaaggataccttatgtaaaatgttcactggaggaaaacactaggatattctgcaggtaagattcgcttatgttgttggcatccatgtagcactgatcctgtgaaatcagtatctagacccagtacttttacagaatcactgtacttaactaaaaggtgctaatctgttagggtgaagaggaagagctcactagatttttattaccaattcatgccagggctttatgaggtactcactaattcacgcatcttgaatatcagcaatcaccaatgaacactcactttaacatttattttaataaataacaaattcgtgtgctaatcaaagatggccaaagcctcctctgaagtgtgtttttttgtaggaaaggctggcgaaccactccctggagtttgtttctgatgaggggaaactcactgtccccagagtatagataataaggaactaacatagtcatatatatgtccctagagtatacataataatgaactaacacagtcatatgtcacactgcctctgccgaggtattttttttttaattttattttactttaagtcacgggatacatgtgcagaatgtgcaggtttgttacataagtatacatatgccgtggtggtttgctgcgcctatcaactcatcatctaggttttaagctccccatgcattaggtatttgtcctaatgctatccctccccttgcctcctaacccctgacaggccacagtgtgtgctgttcccctccctgtgtccatgtgttctcgttgttcaactcccacttatgagtgagaacatgcggcgtttggttttctgttcctgtgttagtttgctgaggatgatgtcttccagcttcatccatgtccctgcaaaggacatgaactcattcttttttatggctgcatagtataccatggtgtatatatgccacattttctttatccagtctatcattgatgggtatttgggttggttccaagtctttgctattgtaaatagtgttgcaatacacacaggtatgcatgtgtctttatagtagaatgatttgtaatcctttgggtatatacccagtaatgggattgctgggtcaaatggtatttctggttctagatccttgaggaattgccacactgtcttccacaatggttgaactagcaaactacaggcctctcacaaatatacattttttattagacaggtaccacttttgtggtagataatataacttttttgcatcctcattgtcagttccagctattctattggcatatatccatgagctaaacaatggctcagaattaaaattttggtacaacccaaaatataagatttatgaaaactcccactttttaaagaattgtttcttgaaagcatgttaagaatgtaaacttacattttttttttgttttgttttttgtttttgagacagagtcagtgacatgatttcggctcactgtaacttctgccactctgggttcaagtgattctcctgcctcagcctcccgagtagctgggactacaggtgcctgccaccacacctggctaatttttttgtatttttagcagagacaaggtttcactgtgttagccaggatggtctcgatctcctgaacttgtgatctgcctgcctcagcctcccaaagtgctgggattacaggcatgagccactgtgcccggcctaatgtaaacttacttttaaagtgtgaataattgttacctagttatctctttcatgttaaagaaatgtgctttttgaaaagtcatcttcattgttcaacataaattaatttataaatatctattgaatattctcctttttttctggtcatgaagaatctttcagtatgtttataatcatctattagaacaatatattttattcatgacaggtaaagcctaaataattaattttcagtatttttctggaattgctcaaatctaattaaaactacaagctaaaaatactaaatctttgttgacttcccaaggaggcctcttaaggagactgatttatgagcctttccttcctccatctagctccggatttttggcagaagtcagtgcctaaaataggtgtttgcttgtggtcagaccttgctgctattaatacctattagatgcctaatatattagcttttatttagtactttatagttctgtagcacttatctctttgcaaagtactcttcacacaattatttcaagttttgcaaagaaacataggaaatcagtcttagtaaccccatcccacagatgagaggtctaagaccaatggcctcagtcccggttagttctgtgggctgaactgagatgtaaccacaggtcttctgatcccaattgttatgccacaatgccttacttcccattttgatgaattagagtggaattgaatctaaaatgagatctttacatgccatttcagatgctaaattatttgcacattagaggcaaaacgtgccttctatgtagatgatttatttgaaagtcacctgcgtaatttcttgctaaaagccacttctctcatctctactccgttctctgaaacccaccatttgtgtcagaactggttgaattatagcagttttttaaaggaacactttaacgtgacttaatttatcattttcctagataaccaaaagtccaggcaaaggctatgagaacatagagcataactcagcaaaatgtcagggaagaagctgtgaaaaggactcctaggacatcctggattgcttaggagagaccagaagtggcactggaggattaggcgcttggaagaaaattcccaaaatttgggagacaaagcattaggggaatgagaggaatgaagaaaaaatccaattttgtgggaatccagcttgatgttttaatatagggtctgttttttcattgctttcacctgttacatggagctttcacctgttacatggagcacaaagacataatgaactagctctgtacggaggggaaataacatatagatatttaggcaaatctgtgagacttcccaataatctgtcaaatcccagccacaggatgaacatggacctcatcctccctgtatgaaactcaccaccagtattgtgggcctgggacatgtgagatgtcacatgcacaagctgctccaaagaacatatctccaaagggtttaggatgccccagttaagaggccaacctcaaaaccaagaagatttcatgaaacctccttgtgtttgctaggaaagaaccctgaaatctgtaaagtactaacccaagggaggtcactcttcattcattcacatagtagttcctagcattaatggctccactgaactatttcaaggagctatgtttaattttttgccatctcctggtcattacacgtaattttctagtaaatagtttactcttcataaactaaatattcatttctcttgatgacagtaagctggatagtctgttgtaggagtcgtcattgtggaagaaccagagtagacttaaaataaaaattctaaacaagcttaaaaacttcccagatctccaggaccgtaagggaagaagtcatggggggattcacaaggagggagtcagtagctaaagggctctagcacaatgccctgagcctggtttcactgcaggattcctgccagacgagctgcacactggaaggagcacttgttggtttgtctgcacagtcccacagttttgtcttcaaaacagaacccagcaaaattgagctttcaatattttgtttttcttatctctagcaaagatatattccactgggctatgtttttgattgcctgtcctgaagcgatgacatctgactgtttccttcctacattcaagcactggaattctagccccaggccttttagttttggcagaactcttacaacttatctgccaggcccttaacatccccccatccagaagaattagccaactagcacatcagcaaaaataaagggacagtggtaggcaacattttcgcatcggtagccctggaccaaggacttgccacaggctggttgttgcaaagcctccattctttggtttcctaagacttttttttgttctttttaaaaaaaattttcggaggagtatgttaaaaggcaacctcaatgaggccagactccaggagacattccaagacaagctccacctttataaatcccatgaaggtttatgagctgtaaagtttgcattactttttataaaaagagaaattgcgacattgcaatttcagaactcagatgctaaaactatgctgactagaaagtaaggcaaggccccaaggagaggcattcatgctttgcgaaagaaagcatcacatttagttctagaaactgctgggaaggcagatgcaagctcacagccctaatagtgatctccacaaaccattgcttctcttgctttgaaaagtaattggaattttggttcctatacaaagacctcccaagacatctccaaagataccaacctgtgaccctgtgtagaaaagagagttttgaggctgccatttttaataaattacttcccattatggcccactatcacatctttcttcaaaagtcataagaaaaatgacagtactgaaagttttggaatgtccttccaagtaaatgtgggttcaagaaagctgcacgtgaggaaggtgactgttggtccagccactgccggagcgttgctgctggcgaggcaggagcaggggccgtggtcatgctgcagatgagagaaggtggagtgaacaatgtggcatgctcggcccactggcagcagaattaagagttctggcacttcagcagcggccccagttgctcttggtgaacaaagtttgccttgctagaagccaagatttgttcatggttctaatccagccagtttcttttatgcacactaaaatatctttttcataaaatcttaggttctcaagacttgaaagagcaatgtgccccattcctttcacctctgcactgaattttatctacagtaccaggaacagagtcttttctcaaacaatggagagttgtcatccaattctgtttgctaggcagctcttctttaaagggaacaaaatctacctccgttgttattttcatccccaactcctaattctgccccctgagtagctctcagctgcctaactgctcttctgggcagttacaatctgagagcagttaccttcctctttgttcattactgtgaaacaattcaggcttcttccaggcaagcaaatctttctattcataatcatgtgtggcatcgcggagaacattttctgcaggtctcccacagcatactttccccaagaagaaaaccaggaattctaccatgatattctcctcacatacaaaacatgacatttaaaaaaatggtaacagctatctatatagtttaatggaattaggtaaggacgaaaacagaaacagtctgatcagagaagcaaccctgtagcatagtggttagagcacagacatcacagccaggtggcctgtgtgagaatcctggcttttctgcttcatgattgtgtgatcctgggcgagtcagttaacctctctgtggcctcggttgccacgtctgtaaggtggatatagtaatagtccttgtcttatgtagtagacatgaggattaaataaaatgagttactatttgtaaacccttagaatagtatctgccgcatggtaagttacaatttaacaaaggtgaaattatcctgctgggtcaggtctcaagaggagtgaagaacaaggcattaagttaagcccattattccaggtgtttaggcttaggttaggtgctcttggctctgcccaaggagcccaacacacacacacacacacacacacacacacacacacacacacacacgtacacacaatactgacaattcctaaccctcctcttttctaattcttttcacacaactcaagttactgactgagatcagtcgaaattccttagcatatcaacaaatgctctctgaaatttaaaaataggaatgaaaatgggttttctacctgacttgcgggggagtggtattgtaaaagcccctttcatacttttccactgaattttgctcgccatgagagccgcaggagtatgaatgtgcacctgaagctgcagggcctgaacacagtcatggacctgcttctgcgcctggtgatgacttgcagggagggacttaacctcactcctggatgtggaagcctcacaatgcctgcccttcgtcacccatgtactgggaaaattacagtagtcactacctccatagtttttagaacatgacaagttttcaattaacactcccttttttgtatgaaagcactttaatggaatctcattggtggcacatgaaagctaacaaagtcagaaatattttgatagactgaaattgtttccagtattgaaaaatagcggcatcatgccatctgttcacctgagttaccacctgtattagtctgttctcatgctgcaaataaagacttaccctggacttggtaatttataacagacagaggttaattaactcacagtttcacatggctggggatgcctcacaatcatggcaaaaagcaaaggggaagcaagacacgtcttacatggcagcaggcaagagggagcttgtgcaggggaactcccctttgtaaaaccatcagatctcttgagacttattcactaccatgagaacagtttgggagaatccacctgcatgactcaattatctccacctggccctgaccttgacatgtggggattattacaattcaaggtgagatttgggtggggacatagccaaatcatgtcaccgccccttcattccaacccatgaaaggattctttccatgacacgtctgcctggcacacagtgatagtgtgcagggttcttaaattcctccagcaagtgtctggatggatatagaggaggtacaattccatcatcccaaatcaatggaaaatgggatatcggacatagtgtattcccacggtagcgggactctgtgtagcatgcaccacagtaactacttaagggacacataattaactctctgttaaaaggcaaataacaagtaacaggttaagaaacatattgcaaaataaatgaaaaaatattaatatttctaatatgtaatcttagaaatgaagaagaaaattactccaatgaagaaatggagaaagacaaaaataggaaattaaaaggaattttaagtggccaatgtaatgtaaacgttcagttcaattgtcattaggataaaacaatgtaagttaaggaaaaagctaggtatcttttttttttaaccgattaaattggtaaatatgtgaaaagttaattgcccactgtaatctccaaccttgtagccttgtccctggttacagttttttggccattcttccctttcttccaaggagttcttatatgggctaatagggttctttgcctccagggtcctcaccctcctgtttgctcagcctagaatgtctttcctccactctgttgtgcctaaatgccccttccctaagtccctttgcaacttagagtgttctctcctttccttttcatattttttttttttaccttttttagagaaggggtctggctctgttgcccaggctggaatgcagtggtacaatcttagctcactgcagcctcgatctcctaggctcaagtgattctcctgcctcagcctccagagtggctgggatgacaggcttgcaccatcacacctggctaattttaaaaattattttgtaaagatgggtctccctatgttgcccaagctggtcttgaactcctgggctcaagtgattttcctgcctctgcctcccaaagtgctgggattacaggcttgagccaccacgcctggcttttccttttcttttccttcctaaaacttactgtaattttcaatcatgtcactgcctgtcattattgtgtctcttctgctctggatgtaactgcagaaggctaggaccatgggtggtttgctcatccccggaaacacagtgactgatatgctgcttagattatgggagctactcgatacatattttccaagcaggtggagaattcatggctatgtgatgatgtgggttttttgttttgttttgtttttgagacagtcttcctctgtcacccaggctggagtgcagtggtgcagtcatggctcactgctggctcgacttcccaggctcaattgatcctcccacctcagcctccccagtagctgggaccacaggcatgtgccaccataccctgctaatttttgtattttttgtaaaggtggggttttgtcatgttgcccaggctggatgtgaagttattaagtctctcaaaaaagtgttgtgcttatatagtatgtttagtcatatgatattgttgttttgtaggcaaaaatactcaaataccaccaacttaggttcaacttagaacctaatacaattttcagaagacatttttagttataagtttgaaaagtcataagcaaggccattctttcactatgtcttgatctaaagatatatccgtatctaaggatgtgtaaagggacagctgtattcacagcgtcattcattattgaaacaaccaaaaaagacagaaacatactgtgcccaacccagaggaactagctaaataaattaaggtacattcatgcattgaaatggttggtggccattacacatgtattttttaggaatatgggttgccctgaaataattttattacaagaaattaagtctgttacattgcagtctgtgagctttccctctctctctctctctctctctctctctcacacacacacacacaccacacagagaaagagtgagagaatgagagggagagagaacagaaagaagtcctgaaggatatgtaacaacttgttaacagtggttaatttctgtatggtgggattactcatgattaagtgaatatacattacttgtgtaataaggaaaaatcctttgaaagtattaagttctagagtctattaaaattataagtagataggccaggcatggtggctcacgcctgtaatcccagcactttgggaggccaaggcaggcggatcacgaggtcaggagatcgagaccaccctggctaacatgatgaaaccctgtctctactaaaaatacaaaaaattagctgggcgtggtggcaggcgcctgtagtcccagctacttgggaggctgaggcaggagaatggtgtgaacccaggaggcggagcttacagtgggcagagatggcgccactgcactccagcctgggcgacaaacagagcgagactccgtctcagaataaataaataaataaatacaataaaattataagtagatatatatttagatagctggatgacagataaatagagaagagagagagtaggaagaattattcagttgagatctacacctcagaccctaccaaatcatgagtgacttgcacctaatacagttacatgtcagagttcttaattttataattgcagtctagaatagcaaatataaaattctaccatttaaaataagctattctttatttattttaaagtaaaaaggcttagaaaaaccaaggacagcctctgtatgtcataccatggtgcttttagacaaacaataggaggttacctatagagacatcggttacctacagagacatcaaagacctctttctctaaatttaagacacatttgactttaagacagaatttcaaaaaaatttatctttaataactgcctatgtctttgtttttgacaagatgttttagttattttactctcttcaaaggatagagagaaactcattaagtaaatgtgaccagatcatgtaggttttatccatggtgttgtaaaccaaaaagtatctgaaataggtctcaatcaatttagaggtttgtttttgccaaggctaaggatcatgacctatgacacagcctcaggaggtcctgagaacatgtgcccaaactggttaggttacagcttgattttatacattttaggggacagaagttacaggcaaagacataaattaatacatataaggagtacattggacagcccagaaagggggaacgtctaagtcataggtggatttaaagatttcctgattggcaattggttgaaagggttaagctctgcctgaagagttgaaatcagctttagttaaggtaagagggtgggagttgtggaagccaagttcttgtcatccagatgaagtctccaggtagcttgcttcagagacaatagatgctaatgtcttttatgggatcttaaagggtgtcagactctccaaagcgacctagtaaggaaaggagattttctaaagaatgtaaatttcccccacaagagacagctttgcagggccatttcaagatatgtgaaagaaatatatttcaaggtaaaatacttagatgtacctcaaggcctgctgtcatgtgatgctataccagtcaggctggaatttggtatcttattgccacaaaaagtttgttctgtcagtcttaggatctctgttttaatgttaatgctggtccgtggtgcctcaactccaaaggaaagagggtataatgaggcatgttggaccccaccttcctgtcattgtctgaactggttttttaggcttctttgggcctcctgggctgaggggcagtccattcagtctcttgggggccttagaattttatttttgtttacagcaccataaaggaggatcaggaaataataacatatctcccaccactcctacttttataaacccaagatctccctcaggtcaagcatacacattctaacattccgtccatctgctctattgtatcaaactccattaaacactgtaaaagactaagttatgggagaggatagcgggatctgtcctgagacccgagaggttggtagaggcattttcctctcacagtcttgccaataacttctcagcccctcaaaggctgtggatgtgattttctactccttttttgaaatggtctcaacatgcaacttttgaaatgcaaaatttttgtttacagcaagcaactggcaaaagcattttgttcaaacattccaatcttacttaaagatatgggaaaacatgtctgaatctgatcaaaataattcggagtttctttgcgctggtctggaattcatagcattatgaattgcctcagtcacaacagcatatgtggggtacccatgcatgcagcagcataacaccttcatatgatgcgtgcacgtttgcagctcgctcacacttttaatttcttttcttgagttctccatttcagaagggcagtgagttgaggtgctccagctcatcacataaacaagagtgttttctatggctctaattcatattgcagctgtggttaatgctgtgagtgtttacataaagactgatgcatggatacctttacaacagcagctgggagaccacagtcagccaaaacctcagcaaagtaccgtaaatcattttgagtcagcagtgagacaaaccaaaaaatctttttttctctctcctgttaatgcatttgaattaaaccattaaacagggatgaaggtgaagtgttgtaaaagttttgcacaagtaggacaggggaatgtttgactttggacaccgtgagtagacgtgcattactctgcacctttcatcccaaatgctttataggctagttccaaatgttcctcttctttgaattactgcctgggaagagatgtcttggccggtaaaataggggagaaatggatgctccaaggaagatggccacaaatctctctaggtcactaataaatagggggaacttttggctattataatgttagatccagaaaaatctgaatttaatgcgtacttgtggaacaggatgtgatggcatgaaggcctgggatctgaatggctaaatcatttgttccacatttataacatttattcatttacaacaaaacttttgtgtttattttatttataatatttatgtgccaggcactgtttaagaactggactttaaaaaaggatgaaactctggctccctcccctcaaaagggaagtgcagagtgcttggtggaacagggaaatcacagcacaaaaataaaacaaatcaagcgtgcctgtcagtgagagtcctaagctggcaaatgagagcagtgagtatccaacagcccctctttgcttggagcggccatgcctctgttttgactttggtaagacttctgtctgtttgacaggcttgatgaaacgttttcttagatgacagtgtactctggaatcagagtccatggagcttcctttgatttgaagccttcaggttttccctcatagctcccccgctttcccttactgtaatatggaaactgatacttattcaaagccagacttcattctttctttcctaatggcgtgtatgagccttcacgtattgctttcttgtgagatcacagctgcaaggctgccctatgagtggggcgtcaccacaccagtgtatggtattgttattaaggaagggtatgcttgtgaaattttgaatcttccttagtctaaatacattaatccacgtctaagttctttgggtttggtctcctgccctctttctacacattttattcccctaaaaatgcagtttttatatctccaatttgacctaaagcaaatagagtataaaataaaataaagcgagcctgctatagttatcaaccccagaaaagcttacgagttgtagacagcactagtctggcttgctttgagctggactactgaaaaaccacagagagaggaaaattctgtagtttgtctaagaacgctttacctttcattttaggtacgattaaatacctcaaatttgaaaacactatatatatatagactttttaaaagtctgatatttgctgcattctttaaatgtgtattgattgcttttcaactggttcaaatttaaaactaagggattctgcgctgtgccaagagattagtcagacattcttttgtgtaaatgtaatgttcacaatatttatcagtaaaaagcatgaatctgaagaaaaggcttggctgtcacagaactgttacatcagctcctctccgatggcctgggggagccaaggcgtcccccacccacggcctgcgctgcaacctgtctcctttaaacagacctggaaactgcatcctgctaagtatcccatctaacccatttcaaatttctgtgcgtaaatcagagtcctcctcggaggctttgctgagccaagaacttgagcttccaaaggggtcacctttaaaaaataataataataaaataaaataggaaaaagaaaagcaaaaccctgacctctgagagatctgaaagacgaatcagataacatggaaaagtggctgccagtctccggagagaacagaggatgcgaagcaaagaaatccaggaagtgtgcagctcgccccctcctcccgcgtgtgacccaggtcagaaacgcaaggctcctccttggtccttgtggccactaagtgaaacaaagtaatgagtaagacatttgtattctttctttcacaaaaggagataggaagagcttgtgcggcaggaagtgtctgtttcaccgttagactgcatagttacttggacatatatgataaaacctcaggaaatggactaattcaaaagggtgttcagtttaattgtgtttcctactcagtgacagcattttaagtccttgctgttgagaatctttctattacgcctttaatcttgctccagcaagaacatctcagagtcgtggtggctgccacccttggcaggctgatcctaccaagaggacggggtattttgccaagtgtgcagaaaatggcccggacatgatatttttcatcagctcttgctttcagtttttttcgttttcaattattccttttcctaaaagctgagtactaaaaggaaaaaatgctcaattagcataaaatggaagtctgattgttgagggggctacctaggtggagtcactgtgaactgcttttttctgtagttgatttattgggcccagattttcataggctcctattttaagcctgtttcatctgcctgattgaactgagcccgtccagctgctaagatagtcaccaaaaatatgttccacccactagtgcactgcaaatttgtaataaccagataatggagaaaagatctggattgtagtatttactgatattcatggcttaaatactcctaccatgggcgatgccaagctgtgaacgtgacgccgctgaatgtggagttgggtagagatcccgagcagctgccaccgcctccagcacacccggtctcccccggcagtggtcagccaggaatgcccctgagggccaagccctgaagatctgtgacctcctgcaccctgactcaagtctactcgtgtaggcactagttttctgtagctttctcaccatccagtgctctcccctggaatgcaaactgaaccagagaaggaagcctggggagcttctgcctaagatcttaaatgaagaattaatatttctctaacagcagccagttggagggagtgtagctaacttagaatgagtgaaagaacaaccataaaatcaaacctcagattacagttcatccgtcacttttggaaacaaaaaacaaaaaacactgcttacattaaaaaacttttggccaggcgcggtgactcatgcctgtaatcccagcactttgggaggctgaggcgggcagatcacgaggtcaggagatcgagaccatcctggctaacccagtgaaaaccagtctctactaaaaataccgaagattagggcgggcgcctgtagtcccagctccttgggaagctgaggcaggagaatggcgtgaacacgggaggcagagcttacagtgagctgagattgagccactgcactccagtctgggggacagagggagactacgtctcagaaaaaaaaaattttttttcactttttgtataaacccttgcattttgacatttatctcctccctctttattttcttcatggaatgtgtgtgcatgcagcctgattatttttatcacctgtccctcagtatgccacaagatccgtgtttactgccgtatcctactgtccattatatttgagggatcaatcaacatttatggaataaattgagtgagtgtcttgcttttacctgtctcatggatgttattaaattagcgggtctgttttatttccaacattttaacccaaaggtaatacctgacatttaagagcaaagctaatttaaataatgacagaactaatcatgtagaaatatgcaatgttctcaggaatatggtacttgaaatcaaaatcttgaaatgtgtgacacatggtaagatttttctacatacatttaacaatacatttactattttattatatatcatggcatatatttttatcaattgtattaaaaatgaagaactataaaccaccaggccctccatataataaataaacattatggtcttttgtctgaactttgtatttgacatatgttcaggaaaaagaagaaataagctgctattgtaagtttaaactaaatgtgcttcataagtttttatttttcataaaatttttaactatcaaagtgtctatggcatttctttatttaattttaacaagcgaacattactatttggcacacacttctggcaaggtggagtttgtagttagtgtaaagaaagccacaagctgtacaaagcaattgtaacgccttataagatgccccaaggaatataaaagaaaaaatcctccgcctatggaaactgagaatgctccattgaaatgcttgccagtattatataaatcatggcaaataagaaaaatgaaattaccctattttcttcttatttctctcaaaagagaaatttttgttgggcaaaaatgcaattgtttcttaagataccttgttggtcgactttgcatgtgctacttttctcagtcattttgtgtccttagcacacgtgtggggccgcaacataggacctctttgaacttctgcacaaatgacagaatccccgacattgcatttatgttctcttgtgtatttttaagggacagtctcataaacaccaccaatctgaatatttttataagccctttatgaaggatttaagtttaaatgagtaagttacttatggatttgaccttaatacacattctatgcttttcccctaggataatttcaggggaattttggcaaacagacactaaaagcaaaagtatataatgcaacatggataaactgaaacaaaccacaaaacataacggtgcgccaaattaaaaagagaagcgacactaaagcatctttatgttcattttaactcacacttttgcttcagagtgtgtatgttgcaagggttgggtgtgtgtgttgggacagagtggagagcaggaattgggctgtggtggctttggacaataagtgtcttctgagccatgcctgtctggcagcattattcatttaaacactggctgagaaccttcaattactggtggctaccatttatctaccacctactttgtgccagagactgctcagatgctttgattacatatcctcattgcagttatgggaagagtgtgttgaccttcattttagagatgccttgactgactcatagaactacagcacgtgtcccaatatgatatctgacccatggcagggaggcaagtggggattcaaggccaaattaatttgctgcaagagttgaatcattgccatctgccctgctgaaattgcaggcatgggtacttcatttacagttctgagagaaaactgacagagggagatgagcaccatgggtgcagtttactcaaagtatatgcaatagcaagctactctgaggagggataaaagctgagtgtcattgaagctactgaaacatatttgagacctagaaaataagtacaagtgaagcaaatattaacttacaaagatgttgtggcatttaagggtcaagactgccaggctgtccttagggagattctctaacgtggcctcttgctcagacacaggtctttcctctgctgcaccggaccacagtcacagccactcttgcttcattggaatgctgagatccacctttgttcctgaaagcacatccctggaggtggagtacagacttggaattataacaattctcactttctagtgatttgtcacttaggaagtaatttgcctagagatttttatctgattacatttttatttcattatatcatgaagttcatgtaagaatgagtacgatgaaatcttatgcaagcgtcttagaatttcatataaaccagagaactgatccattatagaagcagagtgtagtaacagtctgaagtcaagtttaagcagttttctgggcaaatgtaatgcttatgagacggtgcaggaaactcctattcatctagctttgaaatcacttaaattatggttactggaaatgtcttctatagtcaacttttttgagaaagagacagaagacaaataaaccaatgggtatcagaggtttgtttttaaagtagctttcagagcatatcatggagcccattcaaaggcagctcagaatttcagacttacacagtaaaggtctattcttcataatgaagaacatggccatatgcttaagtattttctaaattgtctaaaacagatggctttattttgtatagttttggtgttctgtatgttatagttctttgaaaagtataatctatgtaaggattttgtaataactgcatttatgtaaatacggtcagccagcttgcctctccatgcactcacagcttatgagtcctgcctgaactccctgcctgcctgcccatcccctgctgcacatcccctgctgcacatctgaccccaggacagtcgtcttctgtttcctctgctctcagagtcctctgtctgttcatgccatgctcctctactcatgctcagggtcttctcctcgctcagctactaaggaatctggaaacgtcctttcctctgtgttgtcagcctctgctcagcccctggttcctacccttcagtttataaggactcccatgggtcttgcactaaagggccaccttgtcctttggcctcacctcatctctttgtctgtctcacctcccacctgcattctcatccctttccatctccgttttttctgtttttttaaaaagagaagtatcagggaatctgccccgacagtcacataggttcttttctattttccctaagcattggctggtttgagaaataaagggacagagtacaaaagagagaaattttaaagctgggcatccaggggagacatcacatgtcggtagattctgtgatgccccacaagccgcaaaaccagcaagtttttattaggggttttcaaaaggggagggagtgtgtgaacaggtgtgggtcacagacatcacgtacttcacaaggtgataggatatcacaaggcaaacggaggcagggcgagatcacaggaccacaggaccggggcaaaattaaaattgctaatgaagttttgggcaccattgtcattgataacatcttatcaggagacagggtttgagagcaactggtctgaccaaaatttattaggcaagaatttcctcttcctaataagcctgggagcgctatgggagactggggtttatttcatccctacagtctcgaccatagaagacggccacactcaagggggccagttcagagacccaccctcaggcgagtattctctttctcagggatgttccttgctgagaaaaagaattcagtgatatttctcccatttgcttttgaaagaagataaatatggctcttttccgcccggctcaccagcggtcagagtttaaggtgatctctctcattccctgaacaattgctgttatcctgctcttttttcaaggtgcccagatttcatattgttcaaacacacatgctctacaatttgtgcagttagtgcaattatcacagggtcctgaggcgacatacatcctcctcagctgatgggattaagagattaaagacaggcataggaaaccacaaggatatttactggggaagtgataagtgtccatgaaatctttacaatttaagcttagagactgcagtaaagacagacataggaaattataaaagtattaatttggggaactaacaaatgtctatgaaatctttacaattcatgttcttctgccatggcttcagccggtccctctgtttggggtccctaacttcccacaacagagaagtctgtcctcattgtctctccttctctaccttccatttagtttacaactcactgctccgtcaccttatcttttccacaattccactgaaacttttttgatacacatcaccatcttctccaaaaggcctataatgaatgatcacctgtaatcaaagctggcctctattagatttgactccctctttcttaaaactcctccatgcacattctttgtttgtttgtttgtttttgagacggagtttcgcccttgttgcccaggctggagtccaatggcaggatcttggctcactgcaacctctgcctcccaggttcaagcgagtctcctgccttggcctcctgaacagctaggattacaggcacccaccaccatgcccggctaatttttgtatttttagtagagacagtgtttcaccacattggccaagctggtctcaaactcctgacctcaggtgctctgcccaccttgcctcccagactgctgggatttcaggtgtgagccaccgtgcctggcctgcacattcttacacctccttttgttgtcttaagtagttcctctttcttgatctgctttttaaatattcttaatttcccccagattctatgattggccgtcttgtgtctctaaatactcttgctgaagtagcagaaaaagaacacaaaacttgaagtcatggaaacctgggtatgaacgagttgtaacagcatgttgactatatttccaacaaaattgcatgaaggctgtgtgtctgagttttctcatcacattttatcaaaaatctaattttaatgtcacatactacccactacatttaaatagcatatgtaaacattttataattactgcatatttaggctatttccggtgttcatattgtataattgccaggaattttcagtccctaactgttccgataactttttgctgacgagtgccgtatctcctaaaagacactgggctgtgggggttggcttctttctttctatgattcccaacacacacgctatgcacactctctcttactgcccaattgccccattgtttctgagagtgggactagatgtagaaagataatagaagtcaggggaaggtggggtgatcatgatattgataagagcaagagtctggctttctcagaaggaggcttctattcaggaatgacacagttgcccagtttctagttagtgcgaatcttgtgtttctgaattagggggaacactgtgggaaaagaatgaaatatacttgtatctttttcaaggctggcttgtttgcttggtttccacgggagacatacacatacaacactataatttgagttttgcaattcagttaaattgacctattagtgaaaattcctttatgattctattttcaaggttcttaaagggatttttactagtaactcaacttactctgtgtgtgtgtgtgtgtctctactttccagtgtgtctacatctactttagtgggaagttggtagaggaagcgttatagactgccaatcagaaccaatcttaaaccagaaatcttgtagtcaaggattatcttggaaaattcattatttgatgatggagttaattatttaggattcatgtttcttttgagagtaatatggaagtaatttttgaaaagaaacaatgttaaggtgttgcagtaccctccatgcatagatgagagtgttgaagcatggatgtttgtgaacagacctgccctagtctctacaaagagtgagtaggtgtggcagggtcttttcagcctgactggccaacccaaaatgagggcataacacatgtgttgaactcattcaataccttcttgagttgacgtatttggatattaaaaaattcctaagggccaaaaaacaaatataatatttgtttgcacttactgggacaacaaaagaaaattgaaaaattcaaaagctaaaatggtagaaattaatcatgataaacattcatcagttctattcggggaagttagtatatgaaattttgaacctaaagggcaaatgaattggctgcagatatgccatatttgggattaaaggattaaagacaaacatctaatagacaatgggcatgaagagacaattcacacaacatgcacataaaatgttaaaatttctgacaaacctaagaaaatttattttattactaattataaaaatgtaagttaaaataaaatgttttgtaaaagataaaaaagatttataaaaaactcaactctgtgttaaaaaaattcaattgagcacatatatttgaataaatttgagggttagaattttggtagcgttaatcaaaattttacatatacttataattatactcctaggaatttgccctaaaggaataattgaatgaatgttcaaagatataggtatagttgctcattgcaatgttatatataacagcaaaaatgtagatataaatttacatattaatcagaaattaaattttgttaaactatggaacactatataagcagtaaagtgattacatggctatatttatagacattgagttaattatatattaatatgtaattaaagcaggattcgaaatagagtggttgtattttgtatgtgctggtcttagtgtgtgggggagtctatgcaaaaataaaagatttttagtattttcacgttttgtaaatcattgttattttacaaataaggaaaaatataaagctatttattttgaaaagcgcaccattgaacatatgttgatagtgagactgatgaattctgacttttgtcttttatgacgagatcacccacccttcacataatatgacaaaatattaagacattatgaaaagaactgataaaggatacatgggataaaaagccaaatataaacaacagcaattatcatatacttaaggttgtgccatctagatatttatgatcagatcagggaaaatagacattgcaagagtattaggtagatgtgaaaatgatattttaaaaaacaatgtgtcattaaatatgaaaactattaattaagggatgataaataatgttttgtcttatctcttttacaattacttttaatctattaatgatgaacctcatgtgggaaataggacttggaaaattttatagatctcaccatttaacccaaaaggctgaaattactcatttgctgagaaaattgtattccttgggtatatatcatccattagagcagccatttctggggttaaacagatttcagctaaatttcaacagaagatcatcttaatattggcaaagtaaaatgtcactattaattgagaggaaaaatctatttttctcttagaatttcacattatgttcagtgttcaatgcatggtaaaaaatcttggctcctttgattagatatgaaaatctcttcctctgaagagttaaaaataatgtaaatgaaacttctggcagaaaagttatgagtggtacaatttcctgatgttttagtttcatcaccaatttctgtgccaggccacatgttcagctgcctggcagcccctacagtatgtgaaaatatttccctttttataggaatatgctggcaaaaaaccaccacttccatgaattattaatccttttctgctgattattttgaagaagcagaggggcaggtccacattcaggtggctctcagcggctgagacatgcttcatgaaaaactgttgaattaaatgaaaactgtgcctcctttgaccaccagttttaccactacattaggtaacctagagggaaaacgaagttacttttttctgtagtaaaaattgagcaatgaatccattgaaagaatgattggtaaaagtaatcaatgaagaaacatgatgaccaagtgaataatgaatttacaatatgaagacagagatgtcttcttttccagtgatgatgttcatgaaaatataaaactgcaaaatgaaaggagcctgttaaaaacccttttgtgttatattaagggaggagaaagactgaagggtaacttgtctaaggaaataaagatgaccagaggcagagctgttattagaaatcagatgtctgatttaaagtaacaagcaaagccctgtggttttaaaccactattacagaaaaaaattagaggaaataaaaaataatctcccttgttccatcagctgcggagagcatattggtgggtgaccgaccttttgtctatgtatatttgtacagaacgaactccccctgtacttggggagtgttaaacaaaatcaacacaggagaattctcagggcctggatggaaggtcgtgtgcaaggaagtttgatgacagagaacttctataggcattcacaggcttccagaattcatcatcagacactacaactttgtggaataaaaaaggtattttttaaaaattataatcagatggcaggaggcaggagacacatgatagggaggagaataaaaacaggaatatggagaaggaagggaagactagaactgagaggtgacagcgtgctggcagccatcgctcattcttggtgcctcctccgccttggggcccgctctggcaatgcttgagaagcccttcagcccgctgctgcactatgggagcgcgtctctgggctggccgaggctgcagctggctccctctccttgtggggaggtgtggagggagaggcatgggcaggaactgggactttgcttgcactcgccggccgacgcgagttctagatgggcgcggcctcacggaccccacactcagagcggcctgctggtgccgcacgccctggcagtgaggggcttagcactcgggccagcaggtgtggagggggaactgggtcccccagcactcctgggccgccagcgccatgctcaaattctcaccaagcctctgcctcctcgcctcgaggaagggctccggacctgcagcctgccatgcctgagccctaccgcggttggctgcagcacaggcccgagcctcccctacaggcgccgccccctgctaggcggctcctggtcccatcggccacccaagggctgaggggtgcaggggcgtgcagcgtgggactggctgcctgcggccctggcatgggatccactaggcgaagccagctgggctcctgagttgggtggtgacttggagaacttttgtgtctagctggaggactgtatatgcaccaatcagcacagtgtctagctcaaggtttgtaaacgcaccaatcagtgctctgtgtctagctactctggtggggacttggagaacttttctgccaagcactctgtgtctagctaaaggattgtaaatgcaccaatcagcactctgtgactagctcaaggtttgaaaatgcaccaatcagcactctgtgactagctcaaggtttgtaaatgcaccaatcagcactctgtgtctagctaaaggtttgtaaatgcaccaatcagcactctgtgtctagctaatctagaaactccacctttaagaactgtaatagtcactgcgagggtctgcggcttcattcttgaagtcagtgagaccaagaacccaccaattctggacgcagaacacagttcccaagatgagacgatccaatgggtaaataagaacattggccttggggtccctaatctctaacccttggtttcctcacctgaaaaggggatgtagtaatagtactaatttcacagagtatttgagaagcttaagttagctaatatataggaagctagcacctacttggtaagggattaataactgcaaactgttttattgctatgttaatttgggggaaatgccactcttgatttaaaataggactaaagatggctagaaattgttaaacttgctttccttactacctaaaatttggatgttcaaggaattgttcttattttcattgtctatcttgagtgctctttgagatacaggtatcagagccccgacttaaaatgagaataggtgacccaggttattttttcttccctgtaactgggaagtgagggaaggcgagggcatcctgatggagtgcacagaggcagatggggatgccatgaggggtcagcctcctctctccatccctgcttccctctgcacacgtgacccattcttccctcttacacacaggctgttgcatgtggcagcaaacttggtcatgggtgagcctggctttctggcagctgaggagagagagcttcctaccagataggtgcagaaactggcagaggttccatcttgaccccatgtagctaattgtggtgcagcaatgttattagagaggagggaaaatggaagccacagaggttgataggtagatagggtggaagagggagggtgagaggagaatggacaggcagagctggattcattcgtaaaggagcgatggctggtttacttattcaggaggaaacatcctacctgaaaggagcttaaaggctggtttgtcaccctggacacacgtggtagacattgggacctgctctgcagctgaatgcaatttagtccaaggtttgtttaccgtgtctggactctgccatcttccgctctgcatttcaattctgttgaccggatactggatctacaaaggacagtttctgaaagtgaagaatcacagttcattatttctaactgcttcatctaagatttgaaaggaaaaaatcccttctatgaattacagttggccctccgtatccatgggttctgcaccaacaaattcaactgacctcagatcgaaattatttgaaaaagcttatttgaaaaaaatacaacaataaaaacaatacaaatgtaaaaagcagtacaatataacaactatttacatagcatttatatctattactaggtattataattaatctacagatgatttgaagtatgcagggggctgcaaggttatatacaaattctacactgttttatatgagggacatgaacacctgcagattttggggtccacaggggtcctggaattaattccctgtggatactgagagatgactggacatccattctccatgctatatattttccttttaattattgttgctgtttcggttttcctgaaaaaaaaaaaataacatgttttaaacttctctacattataaatctcatttaaaaagtgttgaatcaaggaagtctgccagctacttttgttttctctactttccccgtgttggactgctttggcgaaagtgaataatattaccttactatgtaaagcatggttaatggctttaaaagaattccccagcaactgaataatgggctgccagaaatattcgtggtgccaaaggatctggacatgtctgttccatttattgtgtgtttcttgtttcatcatgactaagtgctcacaaaagacataaaaatccaaacctctagggtatgtggagtttgagggcagaaaccatattttaatatatctagtctcatacctagcatgttaagatggttaggaaagtatcaatggcaaaaaatgatgagcctgtggtatgtcagacactgaaattattaagttgatttctggtgaatagaaagaagtcgttctgccactgctgttgtgcctggttgagtggcctaatgtttattctcaggagtactgagtgtcttgcatcgaaaccttttgacttgtcctgcctgtttaaataagtttacatttcgcagaagtaggaagatgggacttatttttaaattaaaactccctgttaaaaaagcctaacaatatagtatagcaaaatcatttaaattaaaaaatttacctgaataataaatggaacctattaagaaaagtaattgaacctattaaaaataaaaaataagaataatactgaaaatatctgagaaaacagtggaaatgtagaaaaatgtaaaaggtgctttgtttcttccacgaagcaagagaagtcaagccgagcagcatctcaacctcctcaccgtccaatccttccctccggggaccctccacacttggcctgtgcttggccatctggttctcattttggtaggagaccctcatctctcccacctcatagtctaggcaggcagttgccacggttcttgaacacactgtggcttccacaggttatgtattctctgccagtctcttaattgctaggatttcaggggcaggataattgtctgagaattacacatcatagacatgtatcaaaatatcacactgttcccataaatatgtgcaattattatgtgtcaattaaaaataacaatatttttaaaaagaattcctgagaaagggattcttaattgttttgcatgtgactcacaggtcagaagacattcacatgggacccactcccctgggccaggggccaaaagaaattcctgggctggttagctcaaagtctgtgtttttttttttactcctactcagcaaaacatattggaattcagccagagaagagtgacttcatgtgaaaatataagcctgaatctgctttaaatgtgtttgtgtgtctaatccacatccgaaatttagtcatttattatttatcagaattatttaaaacactccatcatgaccaactagtatgaacccaggtcccctggcaaaaccccatgatcatgatctcttgggactagttcagtccttagagaagtccagagaattggccctggggcctcctactcctcttgaggaagcctaatgtctaggagacacttagtggccatccgaagatgaagcctttgaggcagagttctcaagaaataaacctaagcaccgtacgagtttaatttgactttaggaaaagaagccaggtagcttttcagctgccttttagctggggactcagtgctgaacccaccgtttcctattgacagaagtaactctatcagaaaggcagtaattatcaataactacctgctgtgattatcaagcacctagtgcacaacacaatttatgaatttagggctaggtgggtatttacctgcaatagttactgaaatcagaatatgtttaccattgactaagcatcaggaaaatgtaaacaaatggcacgggttagcacaaatccttacttttggtaaatgcagaatttttattaaaaaggtttttcctaaaatttagcacttttccttatatcaggtactcagaaaattattatatgcctgtgacatagggaagaaatattacatagaaaaattgtataacatcttttttatacccagctgtccatctcttatggatttggatatactgttcttgatatcagttggaatagcatttttgtgttcttctgatttaacatgtttagcttaaaaaaaaaagaatatgtgaattctgtggtcaacactggtaagataaaggcatggtgggtgatgtgttggaacttcagtgtcacctggctttccagattgctccacaaaattacaagttgaattttagaacgtacagctgtttgattacgtttaacaggagagttccaccatatttttctgagcaggacacacttagatttttagagaattattggcgtggcctaatgctttaccagaggggttggcatggagagttctgtcacatgcatattttgttgttgttgttgttgttttgttttgttttgttttttcaagatggagttttgctcttgtcgcccaggctagagtgcaatggcatgatcttgactcactgcaacctctgcctccatgttcaagtgattctcctgcctcagtcttccgagtagctgggattacaggtgcccaccaccatgcccggctaatttttgtatttttagttgagacagggtttcaccatgttggccaggctggtctcgaactcctgacctcaggtgatctgcctgccttggcctcccggagtgctgggattacagacgttagccattgcggctggccacattgcaggttatatgcacttaaatccctatgtggactcgacttctgtatatgcggactttttattaaattttctgtactctacaaaggccatctgggactggaggtggggagtaatgcatttgaagaaaaaccagtcatcctacctaaacataaaaccaaatatctagcgtgtgtggaaaagccgaacaaaactatctgagtccttgatgtgccctgattatgtctctcccttccattacaggctcaacatgggaaaagacattccggcagatcggctttgaaaggtaagcaagggttggcatgtctccattttagttactcttgtcttttaagtaatttcttctaagtaatttattgattataaatcaatagtcctgtcaccacccttttggtaactgtatgaccttgatcaagtcgtcattttgcccctccgagcctcagtttctttgtagagcattacttcataaagccttgcctgcacacagagtggaaataaagatagaatggggcaattgatgtgaaaacgcatcttgaactgtaaaacagtacacaaagtaagttacagaattagagaatcccaggaaatggttgactctcccctagcttcatcacctcctatgtcataaccaattctacagttttagaacagaaaagtttatatttctattgatgtcttcccaattattaaaaatgttagatcttattagccttaagtgaaaacctgagatgatgtttttcttagctaaaagcatctccacaccagcatctccccaaaagaaacaaaaatagactcattaaaacatcagaaaatgtgctggtaggtccatgcattttcttttcttttcctttctttttctttttttctttctttttttttaaattttgttgagacagggacttactctgttacccaggctggagtgcactggcatgatctcggctcactgcaacctctgcctcctgggttcaagtgattgtcttgcctcagcctcccaagtagctgggatctcaggcgcccaccaccacacccagcttattttcgtatttttagtagagacagggtttcactatgttggccagactggtcttgtactcctgacctcaggtgatccgcccagctcggcctcccagagggcttgggatgacaggcgtgagccactgcacccgctggtcaatgcagtttctaaaccacctaccttggaatgaatgttagcattttgcacagctttctaccagtggcatttagcatcttatctcaaattttcagtggaaatatagctattgaaagaaaaaaagtcattttaatttcattttactgtcacagtaggttttgactagttctttttaccatattgaaaatgtgtttgtctctgtattgatgaagctgacagagcacttaaagtatacaaaggaaataataaaatacttgaaaatgcattgtttctcctgtagcaataaagaatagcacatcggtagacccatgtggtagcagtttctttgccacttgttaattgattcaaagatgatttatttccctaccaacacctacatcagcaccatcgctgtttgctgtctcagtaagtgctcataattcttaaggtattgcgggaagttgatttggggtggtcagatcccataggccaacttaaaagaaagaatggaaagtcatgcccagctttagttccatgtgaaatctttttctaaagcgtctttcccttgatccttctttcataatatgaaacatctaaaacatacacaaaaatagagataatggtagaaaaaggtcacctatccactccccagctccaataagtctttgccacacttacgttatttattttggctgaaacattttaaagaagttctcagatactatgtcatttcatccctacataggtcagcatgcatctctgaaacaaatgggccatttcttccagaatagtgccatcatcatacctaatacaaataagtctttagcattatttaatacccagtcaatatttacatttcctgatcatctcaaaaatgtcatttgtattggttgcaacaggatgctatggaagcccagacattccatctcattatcacttcccttaagcttctttatttagatcagtgccccccagcccctccagcttcctttcatttttcttcacatcattgacttctgaagaaaccagatcggttgtcttacagaatattttactttctgaatttgtctgtttgcaatattgtttgttattctaatccctcatttcatgtaaattcaaattatttcacgttcagcctctgggaacatatatgtgttgacttctcgtccttttgacacaaacccatcactctatcgttttcgtgtttcctgcacagttagatggcccaggctcatcccctgtttctccttggctcagcctttcctcccagcagccatagacagtggatgtaaaagtatttcactaaaagtttatttacaaaaacaggcagcaggcaggatttggctactgtcatttgttgacctccactgtagactttggtcatcacctggcaggtaaaaaaaactcctgaaaaaattgcacaggctacccagacagtcagccacgcagcatcccgcacagttccaggtttgcctggttccaaagactgagctttcaacaccataccacatggaattcttgggtatgtttatttttgagcctagagtttcaaccattacttttcagtacttatagtatgggtccattgagggcctttggtgatcattctggtttttggatgtcttaacatgtcatcctgtgttttcccatgtcatctcaggttttctcgtttaagggccaacagtattctgcacatcacaacaagcgccttcaaatacaggacagatagtgatctttgaggttcttgtatatttacagttgcaaagactaaatgtcagcagtactgttatatatggcttgtcttttttcttctcaagtttaacctgttctttctcttaaagggaaattccaattatatcttaaatacagctatctggttctttagagcagtcttaaaagctatcgatcttttcatcactatgtccttctttgaagttcatccatcaacctggttgccagcggattattttaaagggatcacatctaaatgaaaagaagtaactgagtcagctaaagctgcaaagctttttctccaagaataaaaaaagcaaagacgctttctgttgtgtaactgttatactgaaaggaagacctagaggacctgccctgcctaccctccttgcagtaacactagatgggatagtggtggacctcccctgagatgttgttcagttgtctctctggaagctgtgtgattatatgcattgtctcataataaatacacgtagtcacagtttatgtggctgtactcataataatgtgtcatttacaccttcacacaatcacattttccctctgtggggctattagtttattgtaagacttcattacagaagtgtgttgtaatatagaaagaaaatgttgtaatgtaggtttgtgtatcttctcagtcacctcccactcctggtactacattagtaatatctacataacaaaagcagactcaattttttttattatagataaaaagaatctgtgcctatcaaatgttggtttcaatcagctcacctttctgtgcagattttctaagcttatgattataaatatttccaaatcacagtcatttattagtctaggatagggtgatgccaggtgggcgtggctttgtacattcgtggacaccctgcctgtgctaatcatgtgtaatcagtgagggtggctttgaaaccaacaagcttggagctaaaatggcccaaattcttggtggcttaatacaacaaatgtttctttctcactcctgcaaaatctgatgaggagaatagacaattctatggggcagctcgcctccacggggtgtgtcattggtaggctgcattctcacagtgctttcatctcaacatgatgcttgaaacaaatacatcttttttttttttttgagacagagtcttgctcttgttgcccagactggaatgcagcggcgtgatctcagctcactgcaacctctgcttcccgggttcaggcgattctcctgcctcagcctatcaagtagctgagattacatgcacccgccatcacacccagctaatttttgtatttttattagagacggggtttcaccgtgttggccaggctagtcttgaactcttgacctcaggtgatccacctgcctcagcctccctaagtgctgggattacaggcgtgaaccaccatgctcagaccatctttcttaattcaatgattaatgctgttcttatggtggctttctgaaatatgggcttctaaattcttcagttctttcagataatacacaaatatttctgggaagtgtagcaacctgttctgaaattataaaatttcaaagttcacttaggcattgaaagaggacttggacaatttcagactggattttaaatgttccctctgggagtgccgtttgtcactacatctcacagtactcaggcaccacacggccatgggctcaggaaggcgacaaaagacaggatataagaaagttcttgggccgggcgtggtggctcactcctgtaatcccagcactttgggaggcctaggtgggaggattgactgagctcaggagttcgagaccagcctgggcaacatggtgaaacctcgtgtctactaaaatactaaaaattagccaggcgtggcggcatgtgcctgtagtcccaactactcaggaggctgaagcagcagaattgcttgaacccaggaggcggaggttgcagtgagcccaaatcgcccctctgcactccagcctgggcgacagagcaagactctgtctcaaaaaaaaaaaaagttcttataatatctatcatagtgatctctcagtgagttctgaacacaattttctctatctaaggctgcgtttttttgtctgggaaaaatatatcaccaagtaaataggcttgagtatattaatttgccagcagaaatcaaagtttttgcttactgggagatcatattgctgtctatttaaaaataacaatattttactgatctcttgcccgtttttaattaaaaagcaaagacgatattctcagtcattctgtgtaatcagaacattacttcagattaccttatgattaacattattgtatgtgattttatttgatgctccacttggatagtggaacaaaatatcttgctccttcaaagaacattttaaaatagaaatcaccctgaaaatagccttctgcaatgagataacaaatatccctagttttttttccttcagtgtagacataattcaaaaggcctagctctgtcttttggggtgaccgcagccttccatagctctgtctgtcagcaagcctcttccccagcatctatgtcataaagaaatttccaaccacctcccaagttttagatattattgctcagtaaaacctgtcctgatggcccactcccaggagcatgacctcttctcataattcttttcacattcttgaacatgtaaggaggagactctcttaataccctggtgccgtgggcaatgcctgatatatactagctaatctgatgtttgtgggatagattaatgacttcttaatagggaaattggagagtgcttataaaagagtggacttaggaaaaagtcaagagagaaaggacccactgtctttttgtcattacgttgcagcagcttctggaagtgtcatttgtcactacaactcacagtactcaggcaccacactgccatgggctcaggaggcggctcactcctgagagtagagggaagagaaatgtggtccaccttgcaagttttttttttttttttttgaaacagtttcgctcttgttgcccaggctggagtgcaatggcatgatctcggctcactgcaacctctgcctcccgggttcaagcggttctcctgcctcagcctcctgagtagctgggattataggcatgtgccaccacacccggctaattttgtatttttagtagggacagggtttctccatgttggtcaggctggtctcaaactccggacctcaggtgatccacccacctccgcctcccaaaagtgctgagattacaggcgtgaaccaccacgcctggccaaccttgtaagtttataagcccgcagtacatggcatggagagatacacagtacctctgtcttaattcaatgattaaccctgttcttatgttagatttgtgaaagatgggcttctaaattctttaattctttcagactgtatgtgcataaatattcctgaaaagtttagcaacctattttgaaattataatgtaaaattttgtcaaagtagtttataatcggggaaatgactgggaaaaatgatttttttaagttgttatttaagattaagaccaaaatattaatttattctcttctttgaacatttttaagcctgtgcttcctgcccacccctgggctatatttggagttttcagataaacatcacaggaatggaagtgtgatttatcaaatacttacactatgctggcttctgtgttcacactttgctttaggatttattgaattcccacaacttccagagtcagattctactgagttatgctgggcgaacaaccccatatctcagtgacttaaaagaccagagggtgatttcttgctcgtattaaatgtcagctgcagaggctgtggattgactgtggctcttctccagtgcctgctccatcctgggatccaggctaaaacacagccctcatttggtacatggctttcttgtggctgaagaagaaatgccttggccataccaggcagtggctcttgaagcatttgctcagtgtgaagtatgccacctctgcctacttccaggtgccaagcccaaggcctgtgggcacagaagcacgctcctcccacagggttccactctaagccacacatcacacacagggatatagaagaccgtcgtaagaaaggagagtgactggggggaagtactacacaatctacacagtagaccttttccatcttacaaatgagtaaagtcaaatcttagaagttaagtattttacccaagattgcacagctagtagaggcaaaagcaagcggtaactcggttttatgggctctaccttctattcattcataatctaccatgctgtacgtgtccataagggtttgttgagcacacattatgacaacaatgctgggtgctagggatgatgggaagaataggtcttggtcttagagatgataccatttatattttatgtttatacatatctcctctatatgtaaacataaggtacataactaaacggtatcatgtaactgactattatattttatgtttacacataactcctatattttgtatttttatgagttacatgctaccatttagttcaatcacttgaaaatgtttttggagcagctgctgctgctgtgtaccaggtgctattctaatgatatctatattacagaagtggaagaaggagtaggtcaatgtgtgaggttgaggcaaggcctggctgcatagttgggggacagggatgggagttgtctgtgaaagcttaacttcagggaacatctgggcagagttttgaagaatggcttcattggcattcatccatctgaactgttagggataaagtgtgaagccacacttgataagacatgaaatctgggtatggagtggaaaccatgtcaggaagtatcttataggcaatgccaagaagtttgaatctttttttttttgagatggagtcttgctctgtcgcccaggctggagtgcagtggtgtgatctcggctcactgcaagctctgcctcctcctgggttcatgccattctcctgcctcagcctcccaagtagctgggactacaggagcgcgccactatgcccagctaattttttttatttttggtagagacggggtttcaccatgttgttggccaggatggtctcgatctcttgacctcatgatccgcccgccttggcctctcaaagtgctgggattacaggcgtgagccaccgtgcctggccttgaatcttattcagtagtaatggggagccattgaagggtgtaaaccccagagaaggtaagcttagatgtgcttctagaaatgtcactcgagcagcaatatagaccagatgagccaggagttcagctaggaagctgctgcagtagttcaggagagtgattataatgtctcgaccaagatagggacagtgtgagtgtgacatgcagatgtatgccaaacgcattttaggtaagtagaattcgaagttacaacttggtgaataattgactgtcagcgtgtaggggaggaaggattctggaatgagtacagcccatgggttggtgcctccccatagctgctgtctccccggggcagcctggaaaggctggggataaaagccctgttgcccatcagtgagcaacagaagtagtgtacaaatgcaccagctccccattcaattccttggacaattcgaggcacattgcatagggttctgcagaagcttcctagaaactttctatacccatgacccacgagcaatgcattctttcttgtcttctatctcttctccatcccttccttttggattttccaggatgacttcccaaataaaccacctgcacccaagccctctgttcagggtctgcactttggaaaacctgaactatgatttcagtggtaaactctcttaagtgatatgaaacgaaacaacctggattccagttttatctttggcttggatttattcttttaaggtacaaaatgacactaatattatttatactattactttaattaccaattatacacctttataagtctgtggctcatacgtttttgggaggaggggtgtcatgtcttagatccctagagaatctgatgtaaacattggacatataaacagaaagttttacattcagtgtcagggaattcaaagaagctcaaaaacacactgtcagcttatctcagtttaaaagcccggttttggatgcagatatcagtgtatttctttctcagatgacaaaatctacaaatgttccttcatgccctctgtcaattccttggaagcagatgggcaatgagttaaacttcggtcatagcattctgcaatttgagacctccagataccctagagcagcagtcctcaacctttttgggaccaggactggttttgtggaagacaatttttccacggatgggggtaggggtagggatggtttcaaggaaactgttccacctcagatcagcaggcattagcttctcataaggagcatgcaacctagatcccttgcatgtgcagttcacaatagggttctcgctcctatgagaaaccgatgctgctgctaatctgacaggaggtggagctggcctgcctctcacctcttgctgtgtgacccgtctcttaacaggctatggacgaggaccagtaccagtccaaggcccaggggttgggacccctaccctagagagagcctctcctttttttttttttgttttgcatatgttgacactgagacacagagaaattaagcagaagaggtggaagtgtgatttttatgaagatagagttaaaatccggatctgactttgtatttgatagattcaatcagatgaagttgtattactaatgatttcattttgcccccatttgataagaatgttatcaataataatagtaatcatattctactcagcaccctagggcatattatgtattcatcagttttattaaactccacaatgctctaaagtggctgttggcaccacactagtttatggacatagaaaccaaggttcaaagtacttcaccatgtgaccacccagctcaaagaagtaaacagcagatttgaactctgaacgccaccatccaacctgctttcttgctttaggtcacagtggcagttttcagaagtaactctactgtcccttactcttagtgtcacctgcagtgtgtgtgtgtgtgtgtgtgtgtgtgtgcgtgtgtgtgtgtgaatagaagtaggtgatttaccttccctgcttcacaccctgttacagctcatgcacaggccagaatcctggtatcaaccattagaaagcccagagagaaaatcctgaggctcaaagaaaaccctgagggtctctgatggtggaagtatttgcagcaattctatcctatattccttatacaaaataaagcaaacacctggagcccttttgctttgatacaatgaggcaaacttggaaaacaccagagaatcagatgggatggattcttcctcagcccaccaccatccttcggcatttgctgaacttttattaaagtcacagaattcaggtctttcagataagactagtgtgaacatactaaaatattctctggcactaatgaaatgtgtttgtttttaataaatcttttttctattcttttctttcatttgaaaaacattgttgcatgaagaattgagcatagtactaaatgctaacgttgttttctatactataattagcatgggtccagggaaaactctgaatctttgctagtggctgactggggcactgaattgaaaggattttaggcaaaaatgaaggttgtggttaggtaagagagatactgcgcatgtgtggaggcagaagtaggagcacgtctattttccattctggatgagagtttgccagggtgattttcctatccccagcctagtgtgtgtgtggttgatgtttggtaccaaaatgcaaacatgaaaggtttggaaggacacggtgactagtggtcactatggtcaccttaggcactgatagggaaaactgacgtgccaagacaaagacaaactaaatggttaatctttaatctgggtgaagtactgactgacaaacatacctctaacttaaccagaattctgacttagattttgttcaaacccattgtcatgagatatctgcatttcatcataagatagtaggcagaggtctcttccagtcttgctataaacacttaagtgcctgtgactcccacacaacgagaaaagttagctcttaggaaagaagcttttacatgtatgtgatactatataatcattgtaacgaaactttccctatgcaattgatcaatttcgatatttgccctgatctgccaaggtatcttgtgtgtacttgaaacacagattaaaagccagaaattaatatatatacatgtgtatgtgtggatttaggtgtttgtgtgtgtgtgtgtgtgtgtgtgtgtgtgtgtaacaaaagtaagtgatttatatttttaggctgttgagagctttacctaggacttccaacagagaaactaattagctttaccttcctttattcaagcataatgacataatttaataagtgtttggtgaaaatatctatttttcttctagcaaaaataagcaatccttcacgaaaacttctttctttcaaaacatggctggaagaaaatattctctgatttgtaatctccatcttcctaaattggatcattatgactaatataaacagtcttcgagttaatgaatgacaatgagatcctacagaaaacagtgcattcttgaactaaaaaactgaattcccaggtcattaccttgactgttctaggaaagtcagaggtgttagcatgaacattgtaggtttcatgaggggcatgaagagatgaactatatgtcactgaaacatttcaagtcttggtgtagacagcatgatgaacagtagacaggaaattcatgctgtttgatatggaggtaacagttgggtgttgagtgtataaaatggaatgtttaggggaattgtgctaataggcagctacaagagaaggcttcatatttcttatttgttctgcatcctacgtgcaagtctgaaattagctctctgatatctctaaccaccataaaatgccttttccataggcattttatgctgaggaagctcagccagtgaagcaccttactggagacaaagacattactgctcaattaaaatgacagcttttattaggtggatttcataggaagtgtttgagttttccatccaaatctttggaaatacattatcctagataaagtgaaaacagtttcttcctgattcttcattttcctgatatacctctacacacacacacacaaacacaccttcctaagtttacacagaatatttgaagtagcgaacaactacaggattgtcccagtattgtatgacttccatagcttggttgtttcattcccaggtcagtggagattccaagaggttgagtaacttcttgacagctgaacgaaggcagttaggtctttttaactatagagcccatgcttccctttgctagtctctgcaggccccactggggtcttcttatgtgtccagtgcaatcccgttgcctggatgtgaagctgcctaaatacatgttgtattctctgcctccctgcctttcttggcgtcagttgattgcatccttcattgcttagggacccagggaagctttggtcaggcaggactcccaggcttcgtatgtttacttaatccttttctttcaaccccatcttggcattgctgagcccccaccccactccttgacattgctcctataccacgctgatttgcatctctgatagaaacaccttcctgtggctgaaagattgatgttcacttctcctttctacagacttcctgctatacttactcaggcataggctaaccctcccttccctgggaaggtaatggcccttcccctgatcttaagcctcattccaatatttccttacctcattcttcctagacaagaaaacaaaattatttttactaaaacacagctataatccaatttttcacctatctactgaattaatttttaactccccaacctaatattcaggacgtcccccacccacattttcagtcaaattatctctcactacttcgttctgcacacattttaactttccttatggttgcagtctgacttcatcccacactttctttctcctatttcctttttttttttgagacggagtctcgctctgtcgcccaggctggagtgcactggcgcaatttcggctcactgcaagctctgcctcctgggttcacgccattctcccccctcagcctcccgagtagctgggactacaggcacctgccaccacgcccggctagttttttgtgtttttagtagagacggggtttcatcatgttagccaggatggtctcgatctcatatacaatattttactaaaactctgtctaaatatatacagagtctctcttaggtaaaacttttacctcttagatcacatccatgcaagggtggaatgctgtattcatgagcgtgtgcttagcacaatgccctaatgcaaagaagatataaaataaacatttgttgcacttaatttaatagacagtttgtaagccaggattttatgttaaatttttttgtctgcataaccaagaaggacttgaggagcttgcaccagcctacctcaatatcattcgatagcagagaaagtctttgaagaccgtgtattttattaacatggagcaatcatttcctgtataaaaggaagcgtactttagaaatatgtaaattattgtattacataaaagacttattgcccttaattcagaagggatatattaaatagttacagtttgttggttacagattggattttcctttcaccttgagtgtacacttttagaagttacatgtgcacttaaaagtgtttaaatgtattagtttgttctcatgctgctgataaagacatacccgagactgggtaatttataaagaaagagaggtttaatggactcacagttccacgtggctgaggaggccccacactcatggcagaaggtgaaaggcacgtcttatgtggcggcaggcaagagagaatgagagccaagtgaaaggtgaaaccccttataaaaacatcagatctgggccgggtgtggtggctcacgcctgtaatcccagcattttgggaggctgaggcgagtagatcacctgaagtcaggagtttgagaccagcctggctatcatggtgaaatcccgtctctactaaaaatacaaagaaattagccaggtatggtgttgggcacctgtaataccagctactcgggaggctgaggcaggagaatcgcttgagcctgggacgtgggggttgcagtgagccgaggttgcaccactgcacttcagcctgggagacagagcgaggctccatctcagaaaaaaaaaaaaatcagatctcctgagacttactcactaccatgagaaccatatggaggaaaccaagcccaggattcagttatccctcaccgggttcctcccacaacactattagcagtgtggttatcagagtaggcagtgatgtttagcatttttactttttcattcaggggtcttaggatttgaggatagacattgcatcgttctattgctgtagtgaattaggagtgactcaccttatgtggggtggttgagagactttttttcagcagagattatgtggaaggccatggcagagaagtaaacaatcctgcataccacacctcacccccaactctttttggcagtaggtggtgagcagaactgaaccaacaggaaccttcttctcagacatgaggtggaggccggtgatgccggacctcacacagcaaggatcagtgaactaacatcctgaatttgtgagccatgagacctgagagggtgtcactcagagggcaaatggcaaaccctggtcagttgtctactcagtagcacagggaggcagcaacattaaattaggaagtcagggaggcctcacatacggcttccagtggcttcttccagatgctgtttattgacctgcttgccataaacagagagaaaattgttttcactcggccatcatgagaaatgtttgggtttgaaaacttctctgcactctactctgaccagttaaatatatttatttagaaatccacacagataatcgaattccatattggactgagtgtaatttcagtggatttgctggtgtttttgtattagaacactaatggatggagactgcagtgcagggaggataagaagacacctgtccttagaaatctgaaacccaatggtcaggcctcgccccacattgtcagatggtcaccagcaccttccagaaaacaggagtttaattttttgaaggaaaatagtggtaggtaatatgaaggctgctctgtttgactcattcactattactaggacccatggtctgaagggttagtgtttgctcccagtccccaggaatactagtgtgtgttctgagtcatctgcacattggcctaagttacttttcttttctttctttcttttttttttcgtttttgttttttttttttgagatgaaatttcactctttttgctcaggttggagtgcaatggcatgatcttggctcactgcaaccttcgcctcccgggttcaagagattctcttgcctcagcctcccaagtagctgggattacaggcacacgccaccacgcccgggtaattttctgtatttttagtaaagacagggtttcaccatgttggccaggctgatctggaactcctgacctcaggtgatctgcccacctcagcctcccaaagtgctgggattacaggcgtgagcctgcccgtgcctggctctgagttttagagacagacagaaacaacatcatcagcacccattacacctgttgctggtagtccattgggtagagatgaaatgtgcaggtcagagggagcgccccatttcccaggtgttaaactgaggatcactccaatgcaaatcctgagtgaggcaaccccacaatcaccaaccccacacggcactgctactgctgcacaggtaccccaacaaacggcaccattccccggcactctgttccagctggggggctctggtgtggtcactgaacaacctcatgaggccattgactttcttttttgacttactattattattattatttttgagacggagtcttgctctgttgcccaggctggagtgctgtggtgcaatctcggctcactgcaacctctgccacccaggttcaagcgattctcctgcctcagcctcccgagtagctgttattacaggtgcgcaccaacatacccagctaatttttgtatttttagtagaaatggggtttcaccatgttggccaggctggtctcgatctcctgacctcaagtgatccacccaccttggcctcccaaaatgctgggattacaggcatgagccaccatgctcggccatgaggctgttgactttctaccaaataacctggtgggagctagaagccagtggcatctaagtgcctggaggacacatgttgcctctgggcaaatgacagcccactgaggcttcagggggaggaatgaccatgcaagagcacgggcaaattcttcattacagactctcatctcaggaaagagagggagggattgtgggatctgcagacatctaacatcaaaatgttagtggtggcaggtatcccgagctgctggcagcgaatctatacgggtctacagcaacttcaattcttccctcctcagatgaaagaatctgactgaggggcacaaggcagaaaaagaggccaaggcaagatttagagcaagagtgaacatttattaaaaagctttagagcaggaatgaaacgaaagtaaattactcttggaaggggccaagtaggcatcttggaggacagatgtgtggtttgagcttttgacttggggttttatgcgttggcatacgtccggagtcttgcgccccttctttcctgattcttcttcctttggggtgggctgcccacatgcacagctgcctgcccgcacttgggaagagagcatgcgcagtgtcttcactggagttgtttgcatgatcacttgaggcgtgcttccctttacctgcgaaatgtccctggaaggtcatactctgctattttgccttttttttctttttttgggacggagttttgctcttattgcccaggctggagttaagtggggtgatctcagctcactgccagctccgccttccgaattcaagcgattttcctgcctcagcctcccaagtagttgggattacaggcgtccaccaccacgcctggctgttttttttgtatttttagtacagaggggatttctccatgttggccaggctggtctcaactcctgacctcaggtgatccgcccccatcggccttccagagtgctgggattacaggtgtgagccaccgcacttggcccattttgcctcttaatgcacatgcttgagcccattcacccacctcctgggattttatcaggaagctgctgatcaccagtttcgggtgtctttctatctatacggagacggcctttccttgctgctggctgcgaccaattactattttaaagagacagttaacaaccacctgaccatcatctgatgctcacctgactttcctggtggcgggtgggggcaatcctctcctgcctcactcatgcctgactagctacctactgtaacaaaagcacctgggtatcaggaggaagctgcaaggtcatcacagtgcctagcatttagtagatgcccaaagaatatttaacagatgtgtttgtgaaattgaatgctaaaagcagaaattcattacagtataaacagttagctgttactgaacattcggtcccaccaaatttaacaactataataaatgatgatttcttataccattcaattaaaaatgtttgttaaaaacgtaccttatagccaacattgagatgagcatgaatgatgaagtaggtaagaagaagaaatggtctcatcctgaactgctcacccatctgaaatagatgccccaaagctcactgttcatatggacagcatttacttgaattaccaaggaacccatgcagagagacccttgcatctggactggaagggagataattactgcgggaagctggattcatcttgatgaattaaagaggggtcaatatttgcacagggaagggaagagtctacaaaggacagggacagcagtgaggttgaggtgggtgtgacctgcctgcacatcgctgaggaatctgacctggctggagcagaaggctggcatcttgcaaataagatagaaatgcacactgttcaaatgtgtaggcatacaaatctcagtggccacagctcactctgggactgtttattttattatttttttaatttataaaaataacaaatctttgtttaggagaatatctcattaacctagccataattcaataaatcagtgattttgtaataggtcttgaactactaaaacataatttcccagaattttaagcaaagggattcgcagtagaaacagtttcctctgaatccagcattgttaattttatcctggccataaattttctattagggaaatccccagggagaaaccactgaagcagctctgttgaaatactgcagaaaagggctcaaggacctttactgaccatatttctttctgaatgttgagatgtcagaaaacaatgcctaccatttagtacaatttctgttattttcaacagctacatatttacagatgtagcttgtttaaaatatttcatttgtatgaagtacttgttagattttggtggtgatttcttcatttacatttttatgttttctcagattttgcttttcctctctattcctactcaccacacttgcggtctttattgtttcatgctaaattgcttctgtgcttccctcacccccgcccctctccccatctttctctctccctctctctggttcattgaggtgcaatttacattcctaaaattctacccattttaggtgagtagttctatgaatttgaaaatatacacaatcatttaaccaccaccatagtcaggatgtgtgttatcttcattatccccaaaaagagtctcctgccctcggcagtcaacctcccacctcttcccccagcccgtggcaaccactgatctgatttttctttctctggctttaccttttctggattgtcatgtgaatggaatcatggagtctatggccttttgtgtctggcttttttcacatggaataaaccttttagatttatccatagagtcacaagtatccatacttgattcctgtttaattaattaatttttatttataaataatacataataattgtacatatttatggggtacattgtgataattcccttttattgctaatggtattccattatatagacattatataatcagttatctgctgattggttggtcgataattgggttgttttcagttttgggcaattatgagtagagctgctatgaatgtttgcaggcaggtggttgtgtggacatcatatttttctttcactctaggagtctcttaattggctgttctatcttcagtctgactgcctatcaatcctgcattaccctaaatgtttaccggacccatttctgaaaattaaagcacacttgaactgcatgaagaaacatatttaaagatattcttgggtgattctatttgtagtatgtctaccactctattttatgtgctttacaaatttatattttcatttattttatttgcttaacagaagctttaccttttgacagttaaaaactcagagctatttatcactcatttgattactattttatttctgaaaaatttggaattttttatagctaattacttttagcttgttataatagatttgagtacagcctttgagatccctcacctgcagtctcaaaattgcaatgctctgaaaacattttagcctagttttgtgatggcaaaacctgacctgaagtcacctggtagctgaagggagaccattcctgtgagtgcgaattgtcctcatgtgtgtgtttgaacagggccaatgcctagtgtctgcatcaagcggtacatcatgtatgtaacatgtgtctttctgcattctggaaaaggatgaattttgaagtacatttggctccaagagatttggaaagaggatttgtactgtcttcatctgttccctacacaactgccttacttgtttgatgatggtagtcaaactttttactgtgaccgcaggaagcaatgcactttcttttatttttttttaacagagtctcagtctgtctcccaggctggagtgcagtagcgcaatctcgctcactgcaacctctgcctcccgggttcaagtgattctcctgcctcagtctcccaagtagctgggattacaggtgcgcaccaccacacccagctaatttttgtatttttaatagagacagggtttcaccatgttgctctcgaactcctggccttaagtaatccacctgcctcggcctcccaaagtattgggattataggcgtgagccaccgcttccagccagcaatgcactttctgttttgatctggtacaacacgtgatttcaaactttcaaaggaaaaaaaaagttactcttaccacttgcaaggagattcgatatattttttatttcctttgttctattatattacagaaaaaataaagtactggttgattcccactaagtttattttataatatgctaattattcatgacctgcatttggaaaaacaccaggctaaacaccagtgctcagcaggagggatggtaagctcagaagcgaattagaagtttattccttgatatgatttggctgtgtcaccacccagatctcatcttgagccgtagttcccataatccccatgtgtcatgggaagaacctggtgggaggtaattgaatcattggggcagttacctccatgctgttctcgtgataacgagtgagttctcatgagatctgatggttttctaaggggattttcccccacttcacactgcacgtctcttgctgcctccatgtgaagaaggatgtgtttgcttcttcttctgccatgattttaagtttcctgaggcctccccagccatgctgaactgtaagtaaattaaacctctttcctttataaacccagtattgggtatgtctttattagcagcgtgagaacagactaatacattcttgttatagctgcttactctaagctgttccctgaaaaaaatggcaaatgctatatttcatggcacttgcagactcagccacattgacaaatgaggcctgctctgccttagaaatgtgtactgtggattacattcataatcctcacactttagttcaagcaaatggagaccctgagactgtgtcctcactaaataggagtaaatcactggcttcccctgtatgggctgtagtttaaacacacaagattttactggctttccattttgcagtacttcacaagagctttgctagccaattaaagcatcacagtaggagctggtcagttggagtttgatgggggagcagatttgctctgttatgggataaagaatttatctcaggaattaggctgtgtataattatggacagtgctgggggagccaaggtccaagaggaaagacagagacatggtgactaaccagtcaacctgagacgtcagcagttaaagtgggaccccgatggggagcccctggaaaggtccttgggagctctttcttctatgtggctaacacatccacggggtggcagccaagcatctggcagtggacctggggctgctgtggtcccctgggcagctcttagggaggagaatgaggatgagggaccctacctgacacctccttgttagtctgtcatccactgtgtaaagagcttcagaaacagttgtcctgcttcacctgtaccttccaggtcacacacaggtagatgtctctttggccatttctaattcagagccacgaaatgttgggattttggggacaatcctcagcttgaccaagttgataaagaacaacccagcacctatgaggttactgtaaaatgcagattattattctaaatgcccttaaccgtcatcttccaaaaacatagtctaaatactcatgattaatttcccgaatctgcaaataaagacattagagtcacactttatagttttcagggtcaaccattgtgtccaaaagccttaaaataattcattatcaaaatccaaagatttctcaaggtagcttaacaagaacactcttacttctactaaataggcagcagttcagattaagttgctgctattttccttatcttgaacatttgctcagtggtagtttattcaacagtcaagttacagaaaggggaaaaaactgatagtacttggggaaggatgaaagccgaatttgaaacctagaagatggcaggtgacggaagtacctgtgcacacctgggtggacctgtgtctgtcctcctctctcttctccatctcttctctttcagcctctttttaccaagaatcaataaactgccttttcatcattccttgcctttccatttttccttccttccttttcccatcaagaattgagattttggtatccacaaagtgtgcacattaggatcatgaaatgaccccttgaactgttggctgtagcagcatgctaggtttctgaaaaactgggttgttgagggagaggggttgcatggaggtgttggtggaagtgtaccctgtatgagaaagtggctctgtctcgggggttgcagaagtgacagctggatgtggcagttgctatggattgggaattagttacattaaacaaatcactgatggggaacttaactaaatatattaaggataatgggagccatgtttgtcactatcagagcaaagatttacaaagcagaggctagaaagaatcctgagcagttaaactcaagttgaaagtaccagaatgaacacgtgggttttaaaaacacagatacacaagaagatatggaaatagttgtaaaggcatatgcgtgtgtgtggaaatatatgcaaaggactctgtcaaataagaggacccagaagcaatgtcgcccccgtaacaatgctactccaagtgcccagctctgaataccagggtgcacaaaaagaaaatagggctttctgaaggaatggagcccagagagtagaaaggcttggagcagagaaagtagaagacaggcctaaaaaccttactgtgtcagaaagtagaagaatgcacagtgaatgacaaggacatttcccaggagccagcgtggaggggccctcacaactcaggggcaatttcagcatcagaattgtagtttcaaatacagtctatctaataaaagagaagttcatgcatccacactgatattacttagctaagaaattgatttattggaggtaagaggaagtgcttacttgcaagtgcttacttgcagccaaataccaattcatatttaggggcatcaatgaccaccattaggcagccatcatgacagttaatacaggcaggagtcattaatgtctgctaaagttggtgggtggaagcttgataaggcagaggacattgatgcaatttcagaatatatccttacaaagttcaaatcacatacaaagtaaacatgatgacccagcagacaaagctggtgcacgccaattcgactaggtgatcacggtgggatgagctggggacttgtgcctcccagtgtgttgaactgagagcagtacagcaccatgtctgtgtatgttttgcaagaattcatgagccaggttgaggatcatcctccataatgaaagacggtactcattcagattgtcaaaggcatgaaagacaaagaaagactgaggagttgtcccagaatgaaggagactagtgagacacaaaaaactgaatgcaacacatgcttcccaatgggatcccaggcacaaacaagtacaaaatgctgtgagtatgtgtggcaaaatgtgaatggactgcacattggatggcagtgttgtgtcaatgctggtttcctgtttgggaagattgtatggtggttgatatggtttgggtatttgtccccacccaaatctcatgttgaattgtaatccccaatgctggaggtggagcctggtgggaggtgtttgggtcatagggctggatctctccgtggcttggtgctgtctttgtgatagcaagttctcagtagatctggtcatttaaaaatgtgtgtcggccaggagcggtggctcactcctgtaatcccagaactttgggaggctgaggtgggcggatcacgaggtcaggagattgagaccattgtggctaacaaggtgaaatcctgtctctactaaaaatacaaaaaattagccaggtgtgctagtgcacacctgtagtcccagctaatcaggagactgaggcaggaggatcgcttgaacccaggaggcggaggttgcagtgagccgagattccaccactgcactccagtctggtcaacacagcgagactctgtctcaaaaaaaaaaaaaaaaaaaaaagtgtgtcacctccccactctcccacaactctccgtctctcttgctcctgctctgggcctgtgatgtgcctgtttccccttttaccttctgccacgattgaaaactttctgaggactccctagacaccaagcaaatgccagcaccgtggttcctgtaaagccttcagaaccgtgagccaattaaacttcttttctttacaaattattaaatctcaggtattcctttatagcaagacaagaaaggcctaatacagtgataatttattagaaggtccttatttggggaaagtacagtagttccccctgatcagccatttcactttccatggtttcagttacttatggtcaactgtggtctgaaaataggtgagcacagcacaataagatattttgagaaaaagaaagagagatcacattcacataaattttatcatggtataatattataattactgtaatttattattagttattgttaatctctcactgtgcctaatttataaattaacctgtatcataggcatatatgtataggagaaacatcatatatatataatgtgtatatgcgtatatatatatggtttggatatttgtccccacccaaatctcatgttgaattgtaatccccaatgctggagattacatatatatatatatatatatatatatatatatatatatatatacacacacacacatatatatgtgtgtgtgtgtgtgtgtatatatatatatatatatatgtatgtatagggtttggtaccatctgcagtttcaagcatccactggggttcttgaaatgtctcatcccaggatgagggtggatactgcacacacactgcagttgtcttgtctttacttatctgacacaaatgcgcaaaatgcacaaatgcacaaaacaccatcagcacacacttcctgaatatggactgagcttccacttgcttggttcaccacactttgtgtgtgtgtgtgttagtgattttgtctttttatccatctccaaaactgcttgtcctatttacacattctcttttgcgtgaggttttcttcggattctggctttattttcttcttgattctttgcacttgacattttgtttcctccttgcttctaaacctatgtacttgacttgaataggaacaaaccctggctcatttttaatccacgcccacagccctgaccactcccaagcccagcttctgctagtcatctgaaattcttctagcaggccatttatgagcagagcaaatagcttggtttactctcaaattcttaggagggatgcattatgttttttcactttgtaattcaggaaagcgagaagcgaaataacttgccttatgttcacataacaagagagtgacttataaatgttccccaatacctctccaaacacttaggaaaacagtcaaggttcccaatgaccctgaccgtggtacctttcaaacctccctcctaccattcgttctcatttctagatgacaacaaaatcattttgcttataatcccatggacacatcatgttgtttcagactgccttcaaaccccaccacatacttcaccaactgagggaactgttcctatcacctccttgacaaatacagtgttttattccctttttatttattgatttgtttttgagacagagtctcgctctgtcgtccaggctggagtgcagttgctcaatctcggctcactgcaagctccacctcccgggttcatgccattctcctgcctcagcctcctgagtagctaggactacaggcacctgccaccacgcccagctaattttttgtatttttagtagagacagggtttcaccatgttagccaggatggtctcgatctcctgagctcatgatccgcccgcctcggcctcccaaagtgctgggattacaggcgtgagccaccacgcccggctttattccctctttatgctgagcttgccacacacgtgtggtgttgcattcatctgtttttcgggaatgtattttcttccatatcagcctctcctaagatacacaggcctatacaaagcacactggctttctcagcactgtcagcctagggcttggcaaaatgtctatgatatgatagacgctcacacatatttgtggaaataaatgagaaggaatgggtccagtttgtggtctttaagtccaaagttcatgctgttttcgctcttccttgttatcttctagtagtgacatacaaagattcttgcttttttctcctgacccagtgtttataaagaggataaatgtgctactctgttggagccacccactgtgtatcttatcttcttttagtaaaattaattttagttcatttttcttaagttattcgatgcactaattccagcaggggggacatctgatgtgatgcactgtgttcactgccagtgtggtagaaggacggagatttctgctagtcgttaatggtgtccttataccccacctccacgaagcaggcagctcactagccaggcaatgtggccagtgctttgcttctcacttggaaggcaagccatttcaggatgtgagccatgtggtgtggctctgtttttgtgcctgttatggtggaattttcccctttgtcatacataaaggatttgaggactccaaacaataagctataagaataactagggttggaggaggacggaatatccctagcaaacacacagaaagtaagtaagaaaaagacaaatgcatagcagcactaatcacaatagccaaaacaggaaatcaacctgtgtccatcaatggatgaataaagaaaatgtggaataaatactcaatggaatattattcagccataaaaggaaggaaatcctctcatttgcgacaactggattaatctagaggacattagataagccaggcgtagaaagacaaatatcacatcatcacgattacatgtaaatggaaaatctaaagaagtaggactcataggccagttgcggtggcttacgcctgtaatcccagcactttgggaggccgaggtgggtggatcacaaggtcaggagatcaagaccatcctggctaacacagtgaaaccccgtatctactaaaaatacaaaaaaattagccaggcatggtggcgggcacctgtagtcccagctactcgggaggctgaggcaggagaatagcatgaacctgggagggggagtttgcagtgagccaagatcgtgccactgcactccagcctaggcgacagattgagactctgtctcaaaaaaaaaaaagaagtaggactcatagaaacagggtaaactgatacttaccaagggctgaggtggggaggattggagagatgttggtcaaatgatgccaaatttcaggtacaccaggaagaataagttcaagacctctagtgtacatcatggtgactctagttactaatgtattgtattcttggaaattgcttagagagtagattttaagtgtccttcccatgaaaagaagataagtatgtgagatgatgtctgtgttgactcacttgatttcataattccataatgtatttctctaatgtatagttatatatgtatatctaacgtatgcctagctacgtaataaatatctatagtttttatttgtaagttcaagaataacagtaacaatagcaacaagaggtgctggtgagcatatggagaaaaggaaacccttgtacactcttggtgggaatgtagattagtgcagccattatggagaacagtatggacttcctcaaaaactaaaaacagaactaccatgagacccagcaatcccattgctgggtatatatacccaagagaaaggaaatttgtgtgtcaaggagatatttatactcccttgtttatttcagcactatatacaatagccaagatatagaatcaacctgtgtccatcaacagataaatggataaagaaaatgtggtacataggcctggtgcagtggctcacgcctgtaatctcagctctttgggaggctgagttgggcggatcacaaggtcaggagatcgagaccatcctggccaacatggtgaaaccatgtctctaccaaaaatataaaaattagctggaggtggtggcaggcacctgttgttccagctactcaggaagctgaggcaggagaatcgcttggacccaggaggtggtggttgcagtgagctgagatcgcaccactgcactccagcctggtgacagggcaagactccatctcaaaaaaaaaaaaaaagaaaaaaagaaaatgtggtacatatgcacaatggaatgttatttagccatgaaaaaatagtgaaatcttgtcaggatagaattggaggtgattatgttaaatgaaacaagccatgcacagaaagacaaccatcccatgtcctcattcatatgtgggagctaaaataatggatctcataaaaatagagtagattggtggttaccagaggccagggaggaaaggagaaggaggagatgatgggaaaaaatgttttaaatgaaaacctttgcataaaaaagaaagaattgtctttctgataacatgcttcctgtatttcatatgtttgaatgtaattgtataaaacgaagttaatatattagatttttaatgtccttactaaatacaatttgtcaattcccaaatgttgtttttgaaatattactagttgagattaaaagatttgaaactagaaaggaaggcagaagtcaaatgcaagaagaggcagaacagttctctcaagttgggccgggggtaactggagaaaggccttgggtcactgaatttttgtcattatttttcttaagcaataagaaagtatttctgaggggatttcaggatcaagagaggccactgtggccttctcctggcgatagtcctgccatggtcacggaatcagccaagtaaacacatggggagctctcggatgcctggagaaggtgacaggatgagagacgagtggatactgtgtatgaccttgtccgtacctaaatattgccctcaacaagttaagaaggcacacattagttttgattaggatacgtgtaaaagaggcgggtgaaaattcaaagtgatagaaactgcatcagcagagatctggatgttggaatgactctgtcactgtcctgggatgatgaggagcctggaagaaagagtgtcagtttagaatcagcaagaagtgagattgaagatggcaaaaaaaagagtactgtcgtggggctgatcaccaggctgagggaggactttggatttggcgctctaggttttggggtatttttaatgacttatctaagagagtcacaggacaaaaggagtgagttttattgttttggagttttttgttgttgttattcaattcttttgtttgttgtagtcgttcaatagcagcagttgtgtgttggtaaatgtttaacaactggctctctagggaaaaaaatactgatttgcagcatttataccaatttccatgatctgatgctcccactgtggtagactctaagctagtaataatctttcatggagcacagaattgggaagagtcagtcccaggcagtttcagcaaactcctgaggagcagagtgcataaaggcaagtaagtgatggtccccttggcccggcatcctactctcacctctgtgaatgccctccgccaaggccagggagttaggactcttttaacagacctgctgcctcataaataaccagtatacccttttaggagaataaagcactgtgtgttccaaatggaaattagcaactctcacagtgaggttagtagattcaaatactcaatccgtgtggcactcacacaaatccggccaccaatgtaaaatacatcatacatacatacatacatacatatctatatatctcctgaaaatccagcaacaattcataccttaaggtaattagatatctgcgtttaatgactgttttgtggtttaaaaaaaggtacctaatttcacagaaacaagctaactgtttgttttctctaatgcgtcattaactttggaatcccttgatttgaatattggaagtgattctcaataaatgttacatttccttccagagtttgtaatctaaacctttctctatttacaccaaatatattagtcttgccacacacatgacttgctatatgaggtcagatattaaataaacatagtctctctctcatatcaaaattatatatatatatatatatatatatatatatatatatatatatatatatatatatgatatgtgggaagcagttgaaatggaaatcaggggtcttaccattttattgagtttttgctatttgtctgcctttaaagttattgaagccaagtgactaaagacacctgcatcagagtcatatttaagtttaagacaaacaaaagtagactatctctcagcgtgtgaacttcagaagccactagggaaccatcttaacagttcctatttgtttaaacaatgctcatttgacattttagtcatgttgttgtaattcagttgaaggtgacctttccaccaactctgatttgcccccaaaagttgttctttgtgaacttctgaagatgactgtgatggtcctctcacctggatgcctcacagcaatactccaacatttttcttctttcctggtctcatctaaatttcattgctgccttattttgggtattcatggtagaaatgaaattttggagttggaaagatcctaagaagtcactttgtaaggtgagaaattgaaacttagaaaaataaagtagtcttcccatgagtatccacctgtcttgcttcttctctggtctttgacaggagaatggcaattgaatttgattaataaatttatcagaccaaattcaggcatggccatcagtgcctcaattggtcattatcccagtcaaagtaattggtgtagtatctttcatattcgttctacacaggaaaatataagcagtctgactgttgcagcttttaaaaacagtctgaagtattaaagatacacttttgtatctaccaaccagctttcaccaagcttaagaacttgagcattaccaataccgttaattgtatccctctcccctgcgctgaaataggtgtttgtcatttttatagtagtttttatgcatgaaaccctaagcaatctatattttgcatatttctcatttttttcaccattatgatatacactcatattcacagatgtagacctggatcacacatgcacttgtacttatttattgctgtgtagtatttgatttgatggatatgccataatttaatgcctagtctcctctttatggacaggtaagttatttagaaatttcagcttccttgagttcctttcaaggggtataatcactgtctgaacaagtaagatcagtatgactctaacaagattggaggctgggcacggtggctcacgcctgtaatcccagcactttgggaggccgaggcgggcagatcatgaggtcaggagatcgagaccatcctggctaatatgatgaaaccccgtctatactaaaaatacaaaaaattagccaggcgtggtggcgggtgcctgtagtcctagctactcaggaggctgaggcagcagaatggcatgaacccgggaggcggagcttgcagtgagccgagatcgcactactgcactccagcctgggcaacagcgcaagactccgtctcaaaaaaaaaaaaaaaaaaaaaagattggaaaggactcttttgcctgttcgagagaacatgaagtttgaggtagtttagtatgtgcttccgtgtaaaacacgtcattgtcatgcacctggaaaacagtgcagcttaggtcattttatgggaaaatggacacattggtctcactgatttattaaaatgggacttcatctacacaaaacctggttagcctgattctgtgcagaattggcttgaaataaaatttaatttattgttaaatgccctgtagtgtatacttatgattaggttagagaaccttacacacatatttatgctatgcactgtccctggataatctaatttactctcttgactttagctaacacatgtgagaagaaaactcttgaacctacctcatcagccatgactttgctcccaggcacaaactccatgtggctttcagtttaaagtctcacctctgcacctgaaagtcctaaccacacctgacactcattgtgaaaacaccacctgcactaccagcagccacgtcactgtttctcctgtggccttcatttccttggggatcatgtttgtcctttgcttcaggtctttctgtagttctggttatgtgattttttttttttttcaaaacatccaagctttgtatggtctgaccttaccctgtgtttctgactttacttccttcatatataacttcacaaccaatactctgtgcttagagacagtgtctggcacatagtaagtgcttaataatttttttgaattagtgaattaaaaattctgtcaaattgagccatttaatgttcattagatacacttcatttcttttgtttttgaaatattttctccaacacatttatttaataactatgaacatatgttttaatgagttatagcttccaattttgacaatgaaatctgcatgtgcaaataactgaaactttatttgtaaactctctgtgatctcaatgccattaccaggcaacagtaatgttccctcctcttagtgtttgtgtattatcttccccgagctgaattacagagctctttatggtaggtgtctcatctaattcttcaacagtgctttgcacaaactatcatgataaaaagaaaagaacaaatatttgaagaggcagcgatatgtcctggagctagcatgcatccagccagcctttactgatggtttacactgcaccatctaccatgctggtccccagggaaacagatgaaacaggcaagggcttctgttaggcagattggtaaatcagtgagtgacacagtgttaaacatctactgatggaggatgtgggagggatggcggtccattctattctggaatgggtgtggaggggcaaggtaggaagggcttcacagaggagacatggcaggtgtgtttttagagatgaggagaacctgaagcatactgggagaagttggccaagggagaagactgcacacttgctcagagggaaaacactggcgcgttctgggtacgtgcattcagtatggccggaatttgaggtagagggaaatgatggcaagagataagggaaaccagatctgggatgtggagggccccttgtcacgcttaggaatgtggatgtttcctgggggccgtggggttgacatgatcagctttatgctgctaaaaactaaactctgatattaatgtggaggcctggctggcagaggggacaacctgagatgaaatcatcaggatgctgctaccgtcacccagaggccagaccgggctgtggggataaaggggagggctgggaaaggagacgttagaagtcagaatctcctccagtctttcagtgagagaatggaagcttccaggttctgttttggtcactaggttgatgacagccgtgttttccaaaattaggactataggaggaagagctaatttggagtaagaataacactgaatggaaaatctatgggatactgaagtacagatatccagtaggaaaatggatatatgctaatgtttctcagcggacgagttggactgggcattacattatttgcccttaaaaccatttcttaaaaatttaatctaacactatttcattctaaagagctagtgttcatgaaacagcttttgggaaatggtgtgctagaaaatgttcattgatctgtgattctgattgaaatgaatggataagtcaccatgtggatgctgattagggccttggggatggatatcatccagggtgatcttgtagagtgagaagaaaaataaatgaagaacagaattttgtggactcatcaacaattaagtaggacgtagagaagagtctggtggctacaatacaagtcagaatttcttagtggggcttcccagcaacatgagttttcatggatattcataggtaggtagagaattagaagagagtgtaagaaaaccacgggaacggagatttgggagtagaaggggttggtcttgcttgtcaaatgcagcatggaggtggaatgtgatgagaattggaatgggtcacttgggccttgcagttgggagagcaggggcagcccctgagagggcattttctgagcagtggtgggttgaggaggcctgttgcattaggtggatgatgggcaaggggagcccatgtagtgagtgttggctccaaacacaaagtgagaaagtaaaaagcctgagcttgctgtcaggctctgtctccaactgtgtatttgaaccaggcattcaaaactcattggtttccacattctgtaagatgaggaaatggactagactatttctaattctcatccagctccataatttcaatgactgacttagtgaacggatgggtagttgggtgattagatgagggaatgaaatgagatttaccgacttccaaattattaaagacttattaaaaactaaatgtatagagaaggtaggtgtataattatgtacattagtatagtttccaaattattcattcatttcaaagagaaacagagaccaaggaagattctgtagcccagcacttcccaaaagctgctccttgcacactagctctgtcacatgtaatagtcttagaagaaactggtaagaaatggtttccaggtcaaataaatgtaactgttttactacagaacttctcaagtcttttagtataatagtatgcattgtgagtttctcacattgactggaccaatgactgtttcttttttctcttttgtcttgttttgttttgttttaatggaatgcatttctgaggactggcattctgatgaacgtactttagtaagcactgaagaaggaaacacaattgataagatggtctccaaatgacatatcagtcagactatgacctgtttattgtgcatacttttcaaaagtatcattgtttctgcaatggcagtattatgaatgcactgctttgttaactcagcaagccaagagtagtagttaatagtttagcacctctatggctgaatgattccattctaagtaggggtcgcagcccaattctggattcagtagctaaattctatcacagcaggtggagtaattgctttagcaaactacattcatttattcccttaatatatgtgtgttataaaatgtctcttttgggaccaagaagcacaaagctgagactgttgcctcaaagtgatgtttgcaaattggggcttaatgcaatccacaggtgggaaagatataaggctctggctttcctgctctgtctgttgtggtgtaagaagcagctgaggccacagctggagttcttgttactttaatataagaagtctttttctctcgactgtacttggatggtgcttttcataaaatgacacagtcaatttgttttccatgaaagagctataataatcgattgccaaaaatccacctgagtagtaccaacctactactactcctgacctcagccccacaccgaaacagccacccaagcctggccttttttcttactggtctcttttcttgatccccattttttctcattccttgatccccattttttctcattctaatggtattaattctagtttacccttttcaatcatgttaggtagactttaaaagtatacaatgaatctctgcaattttcctatgatgaattcattcatcagatttcattactataatataaatgtagtttggatgaagctctcttaattggattttcttactctttctccaaatgaaaggaatttgctgtattttaagacctttaacacaagcatttttttaaatggggtaagagtttagaggcgatttgtaaaaattaagctttcacaggacagttcctcttccagatcattttttaagttgatttgtaataattgtacatattttggggtacatgtgatattggatacattcatacaatataaagtgatcaaatcagggtaattggggtatccatcacctcaaacatttaccatttctttgtgttgggaatattttaaatcttctagctattttgaaatatataataaactattattaataatatagtcatcctactgtgctattgaacattagaacttattccttttatataactctatttttattctcattaaccaactactcctcgctcccccttcctgccatccttctcagcctttggttaccacctctctgtattctctgcctctatgagatccacttttttagctcagacatatgaatgagaacattgtctttgtgtgtctgacttatttcacttaaaataatgacctctagtttcttccatgttgctgcaaattacaggatttcattcttttttatggctgaataatattccattgtgtatatacagcatattttcttgatccctgattcttgagtgttgatggacactcaagttgattccatatcttgactattgtgaatagtgccgcagtaaatatagaagtgcagatatctcttagatatactaatttcctttcttttgagtatatacctagcagtgggattgctggatcatatggtagttctatttttaagttttcgaggaacctccatgctgttttctatagtagctacactattatacatttccaccaacagtatacaggggttcccctttctccacatccttgtcagcatttttttttgtctttttgataataaccattctaactagggtgagaggataactcgttgtggttttgatttgcatttccttgatgatgagtgatgctgagcatttttttacataagctgttgtccatttgtatgtcttcttttgagaaatgtctatttcagtcatttgcctgtttttaattggttgtttatttttactattagattgtttcagcttcttatatattccgattattaattcctttcagctggatagtttgcaaatattttttccaattatctaggttgtctttccactctgttgattatttcctttgctgggcagaaactctttagcttgatataatcccatttgtctacttttgcttttgttgcctgtgcttttgaggtcttacccaaaaaaatctttgtccagactaatgttctgaaatgtttccacagtgtttttttctagtagtttcatattttcttctagtagttttatagttttcttctagcagttttcatgttttcttctagtagtgtcatagtttcaggctagaccattttttaaagcaaatctgattagattgaagattgattcctaggagatcctagattagaagactctttaattaagttttaatttttatgtatattatagtaacaaatacgtggaaacattctatttataacagtagttgactagttaaataccgtctgtccattagtatgatgatatataaaaataaatcatcaatgagttgtaaaaatgttaatgacatgttaaatgaacaaatcagcttgcaaacagtaggtaaataatgaacttagttttgttaagtataaatgtgcacatccatgtatagaaggaagattggaaaggaaggccatgtggatacatacatgggaaagcggttgaaagcataaaagtgaacgtagggagaatggagtataattctgttctctatgtggcttttgggaagttagattgccttttgaagccttagtcttttcacgtgtaaaaggataataatgcctaactcaatatgatggttggttggattaattaataatgtgtctaaagctcttagcacgaagtaactgctcagaaaatggtaggtattattgataacttttattttccaaaatattaacagtagctatttctagatgccaaggttcttgctatttaatatttttaaatattttcaccaaaatatataatatataatgtaaacgaatacagtgtgtaatcacttaaagtgcatatgaatatgtatatatgtgtgtatgtatttacatggtatattgccctatcttttgcttcctttccctaagtaagttgtatctctgataaacattttttcaaagacttaaccctcctttgaagttctatgcttgatttttccatggatcatcttatcttccccagaagttttaatgctggtacagactcttgactcctctacctgtatcctccctattttaaactcattttgtaaacctaagtctgtataactttttcttcatatcacctagtcatttcattagctttttcttgttacagcttattttatattatatgagtgagcagagaacatgccgggaatcgctcttcatgtggctttaataatagtaataggtactgtggttacagcactacacatcactagagcactgcaagcccagttgctcagtgttgcaaaggcacacagggcaggcatctagcaccggatgagggacatggctggcccgtgtcgtgtgctgaatggtgtgagaagtctgccagtgcctattaagctctggtgtcttgcagcagagtgagcttagccagaacacatttcagctgaggtgatgtgtgctggccaactatgctggcaactcagtatactgcctctcattcccatattcattaccactggacgcctcccaaaatcacagatggcgtttgtattaccttcccagacagatctctcctccttttccagttgaagccctttctactctccacttcaccttctggcctttgctgcctgctatattattaaatatatttgtttcaggatctcaattataacaaaaatgccctatatgtgtgaaaattatctaagtgtcaattgatgctgctcttctcaaaatgtaggcttagtgaaaatatgtgtttcattctttacaaagaactttcacgaacattatttcatgtatatgtatttatattttcttctaaaaccgtgacctagtatctcatgtcacttgaacaaaataaggaaggcaaatagtattacttcctcagcacagcagaacagatggctgtgagaagcccccagcaggatgcaactactaagtttcagacttggacttgaactcaaatcttctaagttcagtgttgtttctctgggattaaaagagaaaatgtactggatccacctttcttggaacaatacagaagacaaaatcaaccaagtatacaaaataatgaagaggtcctggattccaggattactttaacattttctctattttccttgtatctttgacttatatcaaaagtaaaatatcttctagctgctagtatgtatttagttttagactgcttcagctagattgcaaacaactgcatttgtactggacatgtggtttatttaacaaaaacatagtccattaggacgttttaggagtgaggattggttcaaaagttctttataatatttctgaaactccagggaacactggaatcttcctgaatgtgtagattttgtgagacactgaggtcaataaaaagctttcttgtaccttttagggagaaacggagcatcttttattttaaatcattaagaagaccaaaacatcctataaggcagtttaaccgtagaaatataagaactaaatttttttcccctccccttgtttttcctttatagcttaaagggagctgatgctggcaatgggatcagagtgtttgtacctgacatcgggatgttcattgctagtctgaccatctggctcctctgtagaaacattgttcagaaacctgtgacagacgaagcagcacagagtaacccggagtttgaaaatgaagaattggtaaatccaactccatgtctcttccttctttgatttctgaggaccttgacccttaataagttgcagaactatgataataacagctgagcatacagagcacgttatgattcacagtgcttgacataaacgtttactgtcaaattgcatgacaccctcgtgcagtcccggtgggcagacactctggtccacaccttagccatgagaagacaggctcaggggtgttcataggtaagggccaggctttgacccaccaccccaaactatcacgtgatattatctcggaggctaaccgtgcaaggtcatacatagtgttatggttcaattggtctgggtaccttagttattgcagaatatttaaagaagtaacatctggtagttttagggaaaaaaatgagttcctccttgcagggcagctttccagtctgtgcaccttgtcctgctcagtggactggtgttaacttggcatgctttgatcaagttgttttaaagcactccaagggggaaaaacatacatatttggaaaagtgtgagaattttaaaaaggtaaaaataatgaacgagatgtatgtttgctagctggttgaaaggtttcaggagcaactgctgaattggaagcttgtcctattttcgtccttgggtatcagagctgtcagacggctctcacgctgccccctgaccagcctcaggacactgttatgttctaataactgtactttgttaggtgaggttaggagacatcagtttaaagagtaattgatttattagtggaaagataacatttataaaggaaaaagtgactattttatttggacatttgatgcaaaacgcttgcaagtactaaatgttttcagtcataagctttggcaagatattacacttataaaactgaagttaattgaagttacttatattgagaatgttaaccgatgagccattgagggaggaaaattctcacttatggaaaatgatttatatggttcacaagaaagcagacaatttccttgtatgcttatttaaaaaacaataaaggagggatagaattcaataaacctatgcaaactagaaatgatattgtctagccaggcactgtggctcagacctgtaatcccagcaccttgggaggcccaggtgggcagatcacctgaggtcatgagttcgagaccagcctggccaacatggtgaaaccctgtctctactaaaaatacaaaaattagctgagcgtgatggtgcttgcctgtaattctagctactcaggaagctgaggcaggagaatcacttgaactcaggaggtagaggttgcagtgagccgagatcacaccactgccctccagtctgggtgacagagcgagactctgtcttaaaaaatatatacattgtctaaaattcttatgggtaaaagatatgcaatcaccttgcttatcaatattctgctatttttaaggcaaatgttaaaatgatgcttggtgtaacagtaattatagtaaagtcaaagtcactactaaccacttacatcttactttcaagacttgacaccataaggcatgcattagtgccctaaaaacggaagagtgcttcttcttcttgttgacattccaattgtaagacagaggatttaaattttgactattttttacatttacagtttgaaaatgactttatttaaataatctttaccaaaatttgcctaagtttggggaaagtaaaccagtaactcacattcttcagactgggtatttgttatttttatgatttataaaagcaagtttttgtttgtttgtttgtttgttttttaacttaagttctgggattcatgcgcagaaagtgcaggtttgttacataggtatatatgtgccatggtggtttgctgcaaccaacaacccgtcatccagatttcaagccccgcatgcattattatcctcataaataataactatagaaggaggggaaaggataagtattgaaaattgagtggacttagaagtcagacatggaggccgcctagtgtgtgatgctgagacaattgtttcttctctttcttcttctacaaaagagagacactaatactatatcacctagtagttgtgaatgctaaataaaatttctaataaaaagcacctgccacagtgcctgctcattttgcttgcttagataaattgctatttgctctgctcattttgtccttctccaatttgagaggtagtagtgcaatttcaaattccaatgttcctcttagaattattgaaacttaaatgggaagatattttgaggccaacccactcagtaaaagaatctcttctgtgccattcataacagataaccatgaaagatttacaaagcttcttataaaaataacttacatgaccaaggacaaatgctgtttgccataggactaagaaagcctacattgatcaataaaaagccacggctgtgaggtcatgatgaggtgccattcatctgatgaagaaaagaacacaatgcagtcacatgggttaattctaaagtcacattttcttcctgatttcaattttcagagatagatttaggatacttcacttccatttgaaatttgcttgaatatgtaagccttatgtattattaatcacattatttaaagataacaataagatggacagatactctaaacattatttattagggacattgaaaatactaaatataattatggaattattttccttctcagttacatttgtttggggctattttacatcattgatttttattctcttgtcacgttccagcccatcaggtagcccaggaggaacagggtggtgggtgaatcttcttagattaattcacaaggaaaaattgcttccatgtgacaatctggacttgaatctgagaggaataaaagtacctggccaaaataagcagggaatttattttatttttgacaccacagcatatttcctgctgcttataaatcttggagtttgcactctagaatgtttggtttttaaggatactgaaagaacagtgtttgctggcattatttcttctttcatttatctcagtggagaaatggcaggattaatctgctggtgcctgtgagaattccttttcaaaagcggtgttgttttaaagcagcaactaatccgtggggaagactcttgggtcttctgtaatcttcactgatttgataaggctcaagtttggtgttttaaaggtgttcacaaatccaaggattccccataaaacccccagtggaagtggagatggcagtgcagtgggagcctgtgccttgctcctgcattttactgacagccaacttcagcaaggaaacccttctcctcaaatgtcatcaaaggttctttctcaactgacacatctgtggtcttgctcatttgttcattttaattcagaagcagatctacaaatcagtcataactgggagaaagtttcctgatctgaaatcttaaataagaagagttgtattatgaagattaaattgagtagaaaagagttatttacataataaaacaatatatcatttcaccaaactgacattatcttatataatcctatgcttacaattctttctagctattatatgagatttgaggcctttcttttagatagtattttaatgtattattaagccaaattctgatagatcaaatgcttattcaaataggatttgcagttatgacttagcctgtgtaaagaggcagcttcttaatagactgacaagtcaaatatgaaggataaaaagaatattctattataagtcatccccatctgctaaaaattcagggatgcaatattaagtcctgctaaatttattctggacctcaaagattttgcaccctgctttctaattcctagtgtctattagcctgtcacagcatctgcattctagcacatgacatgaccaaatgggctgtgcttcaagtctcaactctgaggttcaagttgctgttttttttaaagagcaagagacaaagactgagagaaatcaatcattttgttgtcttctagttaggctttcaacatgtgctcagttctagcctgagatttagtctaaagtctccagctttaaatttcctggatcccatttcttcaagtacacagacatgatcatttgaaacatggaaccattcagaatggtaagaagctgaacggctgcccagttgccttgcaaactttgcacttcatgacttagtgtgaatggaaagccttctttgttgttgtgctaaaggctgtcactgccactcttagtgggtaaagtgggcgactccctttgctggtccttaaggtcactttcagaaactgggcaaaacttcctgtcatacatacctcaaaatgtcggacacttggtctgccttcttggggaaaacactttcacaatttggacaaaggttttactcctagtagttttagatgccattagtttcagtagaagagacgattttttattgtaggaagtcatggatctatttattgtcttctggaaagttttggtatttatcacagactagttaactttgagtccatgactgactttattcccccagagtcttccagccacatccctggtcaccaggtgagagcatggatgcccactcatcctgtcctctgataccaacacacctgtggaacaggcccttgggacagtcagtgagagccaccttcattgcatacaaaggcggccaagtgtggtggcccacacctaaaatcccagcactttgggagggcaaggtgggcagatcacgaggtcgggatattgagaccatcctggctaacacagtgaaaccctgtctctactaaaaatacaaaaaattagccaggtgtggtggcgggtgcctgtagtcccacctactcaggaggctgaggcaggagaatcgcttgaacctgggaggcagaggttgcagtgagccaaggtcacgccactgcactccatcctgggtgacagagtgggactctgtctcaaaaaaaaaaaaaaaggcagggatattattattgacaatatgttcattgagtggacattgcctagcatggacttgagtatacaactcataataaaaatgatttaaataattcgcaaagaggaaatcaactaaagtatctttaaactatttaaacgaaatgattacagattaatcttcatttttatttcgcccatttaattaatttagcaacatttaacagcatgtacctcttctctgcctttttcaaagaatcaaagctccaaaaacgcctttcacctttaactatctttttagatcaatatttttacaatttcttggaatatgttgttctgtctttgcagcatttgataggtgatttcatgcatttgaattgcaaataaccacaaataccccatgggaaacttgtgtgaggcaattgcagagcccctgtgttcctttcttggggggtagagtagagcctgagatgaaaggaaccagagtcccacccctcatgctatccatcccaactccagagaacctgcatcactcaaggaatctcagtcacttcttcgtactactttcctcctttaaattgtaaatacccctgaaatagaatttccacccacttaatgtaaataggttccccatattgctttgaaaatattggtcatatgtttgggagcgggagacacagctccttcccctacctccactccttcttcccactgacttacccatcaaggttaatagaagctccatctacccagctgcttgagccagaaacactgatgtgacatggatttcttggggcctttgtctgtcaccaccaacaaatcctttgaattataccttcaaattctgtctgaaatcagtccacttttctctactcactgccacaatcctcaccaagcagccactgcctctcagcaaggcctgaaaatatgttctaaatggatctccccacttgagcttcccttcttaccctatccaattgatgctgcacacagcatctggattattcttgtataattaaaattaaattatgccacttccctagataaaacacttctttggtttcccattaacctagaataaaattcagtctcttgaccttgatgctcatgactctgcatggtttggccacatcctgccttcatgtcctcaccctgtgcttttgccccactccctcactgtgctgtagccaccctgcccttctctctgtgtttggctagggtaagctctcttcctgctgggtctcttccaggctgttcaatctcatgtagatgtcttctcctcactcttgtccttctggactctgctgtacagtttgctcttgtgcagatgctcttctcccgactcttgtctttccggggctctgctatgtagttcactcttgcacggatgctcttctccccactcttgtcctcctggggctgtgctgtgtacttcactcttgcacagatgctcttctcattcttgtccttccgggattcgctcttcagtttattcttgcacagatgttcttctccatcttgtctttcttgagctctgctgtgtagttcactcttgcatggatgcttttgtccccactcttgcccttctggggctttgccagggcacactgatatgtaggtgaactgctcttgattgaccatttcttgctagggcttcagagaaggatgcttttttatctatgggcatgtttatttattcagtatatctttactgagagcctactatgtgccaggataaacaaaaactaatatttaacaagaactattttttgttttcttgctttgcttgccaagacttttgtccttttttaaaaaaatcacatttaccttgggaataactagagtaggtcattccaaatccctttagtcagacgtaatctcttttttctctcaatgtccttaggaccttatattctcaatttataagtagttatatcttccctgagtgactactggggtccctcagaaaaccactggggtcccatgtggattttcatttgttatcccaccctggacctagcactgtgcttggagcagagcccagtcttggttaaaaaagtgctgagtggagggagggatagatggaggagacaggaaggaatactgttgattctgaaacagtaccttctctgctcaatattttgacaccttcatatcaaagatgtgagttttgtttgcatcttagtctatcacaagtaattatatgggttctgaatctttctggaaactgttgagcaccaagaaggaattgtacatcctcaaaatgctgcctttgtcatcactgtataaattttttatttttggagtgaataccagggtgaatcatttagaacagctacacttagctggttcctacaagagaaaataggtggttcaggatgagtagtaatctctggaactaatgtgaactgagtggatgatataggtgtgtgtgtgtgtgactgctgatttgttttgattgtgttccattaagtgatttttacaaaaatatcttaaagaaaaaagcctttaaacagtcaattgtatttggctagtctccattattgttcatttccctttcaaatgatgttcagatgattcttaaagactattgccattctaagtaggtgaattaacctgggaagttttaaaaaagttcaagtgcagggtcagaatagttcccagacctatgaagtcagaatcctaggggtaggggagtacatgtggtaggaattggactagttttttcaaagctccacagatcctttaggcattggtctaactggccactgtctgctgattcagtttgtccttccctgttctttattaaactttcattgctttgtagatggtggttgaaagcaacatctatacactcacttttccaaatgaaatagggactgcttaagctgatcttaggagtttggaagaataatcttcccaaaacaaatgtagcaacagaataaaatatttgctttatccattaaatgcgatcacgttaggcttgcataaggtacacacaatagcattcaaacacatctatctttttttccctcactgcttcctttcacaagggaaccctggggatgaaattcatcttctgcagtgagtcacaaccttgtcttttccttcctctggctcttgtattgagatgaacccattctgttaagataaattgttaacttttaataataaacaatgaataaacaattgatgacacttcagaaaaatgctccttttgcctcccagatcttttggctcattatacatgactttgatacacttctatagaaatgtttttaaaagcttggttttaaccatgaagaagagaaaaaaatggattcagctgcatgaaaagctctgctctgaggtccaaagctcgactgaaacctaaaggaggttccagagataatttatttcaatctattttccaaataagggagtctgctaggatatgattaaaaaaatatattttcaaattgtgcctattcagctgaacccctatggagaattcattgatcagtggttgccaatgtcggccagggcctgaattctggaggggctgcttcaggtcaccccagagagtactttaatcatacagcttcctggaattcattcccataatttctgatttagtaagtttgaggttgagcctggtcatctgccctcttaaaggtccccaggtgatccttaggatttattccaacccagttggatttttagagtgcttgggagtaatgaaacatggatgtttgtgtcctaccaaaagtgatttattgtgtcttctttgtccaaaattgagtggaaatcatggtggatgccacggcttaatggaaccagtactgctgtagggtgagaggatgttgtgggatgagatgcagagacgcaaaggtttagatcccgtctcattgtgggatgagagctttgtgtttaggccctcattcagggccctaacagagaacaggctggccttgtgtaaagttgattccatagcacctaaagtttccttatgtgaaatgagagatcttacactaatacatgttatcaaatgttgaaatcagcaacttttatctatgttttccagtattctattatttttattttatttttaactgactaataactattatatatatttatggggtatataatgtggtattttgatacatgtatacattgtggaatgagcaaatcaggctaattagcatattcatcatctcaaatacttattatttatttgtgttgaggacattaacatcctctcttaactattttattttttattattttgttttatttattaattttttttttgagattgagtctcattctgtcacctaggctggagtgcagtggcgtgatctcggctcactgcgacctctgcctcgttggttccagtgattctcctgcctcagcttcctgagtagctgggattacaggcgtgcgccaccatgcccagctaatttttgtagttttagtacagacaaggtttcaccatgttgtccaggcaggtctcgatctcctgacctcaggtgatccacctgcctcagcttcccaaggtgctgggattataggcatgaaccactgtgcccggccaactattttgaaatatacattaaaaactacagtcaccatgcagtgcaataggtcccccaaaatcattcttcatgtctaagtgaaattttgtaccccttgatcagcatctgccctttccaggtccctggcctccttccccagcctctggtaactacccctctactctctacttctatcagtgcaacttctttagattccacgtataagtgagatcatgccgtatttgtctttctgtgcctggcttatttcaattagcatattcttctttagatttatgcatgttgttgcaaataacaagatttcctgttaaaatcataaacttttaaagaggtgagataaaggacttaaatatctttaaataagttttagattttgacatggtcaataatctgtataatcatttatttgactttttaaactgtaaagagtttattttgtcttcagtttctaagatgactcaggaaccagggaagttaaatctttatttacagcctttcctcctccttagcctcaaggccagattgaagttctgttccgctgcagggacagcttacagctccagcaagcaagactgcctgttagtaaacatgcgagagtgagtccatgctctttcagaggttcagtgtttatacatcagcagaagaatcactttgggggaaaaagcctgcctgttaataagccagcctgacgtgactaatggcagttctggccctgacctaccaggacagtaggggctcacagagtctaacccgtctcgctcttggctctcagcttggcaaatttaaaaagtatttccaaccgacagccccagggatttctgtataaaaatgctgaaaaccctaaagtacagtggtatgtttataaaaatcacaaaggcccaatccttcctaagacaggtcagggaaatgcatttgtataacctcacaaagacatcttgatcagagatttctatttgatttaatctacatccgtagcaattctataattgaataagaacacatttattatgaaagtcacaagtgtgtttctgactgtgacccaggaggcccttgctgtgttctttctttggcttctttttcaagtgcaatgactaaaggttttggccaaacttccttcctagagggagattttaaatgtgttgctcacctgttgtgatggggaaagaagcaacagatgcctgatgagcaggtcatttgtgtgttgacgatggtgtgggtgtcctggcgatagctctggtgggtggatttctttgtggggagatggagtaagctgaatggaagagctgccctgggacccgggccttaggagctggagaaggcatcctaaggggtgggaacaacctgtcccacagcaaagaggcaaagagagcttgtggattatggattctgctagtcatttcttgcaaggaatgctgacaggcaaggagatggcatagatctggaaaggcagagtggtcttaggggcagcagcacctcgaggagggccatctctgtattccctccaggtaacctcaacaggctactgacgtttaaaccatcatatgctggcgaattccaaaaagccctcttcagctccagcccctctccaacactccagactcctataatagctgcctactggatacctccaagaagaatgcctgaatggggtctcagaactgaattttcaaaacagaaatgtggactctccgtctccaatctgcctccctcctgtctgtcctccctagacaaaaatagaggagctaccctgattatcatctatccttcctccccactttaaacttcctagctgcacctactaatctaacctccaaaacagactccaaagacaggatcttcacttcagccccaccactccctcccctctcctccagcacagccaccacctccccgctgctgcctccctctgctccgccccaggagcaactagagttatgtggcaaagcaaatcatgtgtgcctctcattagacggagtggttgaagatcaaagtctgatttgagtaggttcaagagaaattaggtagggaagcatttttactctaaatggaatggtgagtccagcccactctgctggagtgtttcaccttaagagacaaacgtgggttgaaaggatgtgtttctttaaggtgagacagcaaggcgcccttgcctgttaacaggggtgatccagcagaaagaaagcacattgtgatgcaggagagagagccaggatggctgggctgttctctccctggtgtcctgagcagatgggatgcagtcatcatggctggagcatatgcagcttgtcttgttacaggaggagggcagagtgcgtgcgtggcaggccagctgcaggtgagtggtctgatgtactggctggagctggcagctcctctctgggagcagtagaaagcaaggtcatcctctgagaatgagatgggaattgttctctaggggagcggaagtggccacgggcctggggacacttaccctctttctgcacatgccaccaagccttggaccagctctttcctccacccggaatgcactttgccaggactttcacagggctggtaactttgtgacattcagatcttagcttaaatgtcacctcctcagagaggctttccttgacctctgaatcggaaacagccacccagtttatcactaccacatcaccctattcgacctccctgaagggggcattcattactgtgagatatttagctggttaatattttacttgtttacgtgtttattgctatatctcttcctatatatgctaggacacactaggccctgtatgggtagaaaaatcttattgattgagcatgagatgttccttttgcttcagaaaaaaatatacaaatgtgtcatgatgaaatacagtagaagtcaagttgaagtggcccaggattaaatccctgtgggtgtgtgtaggtgggtggagggctggctgggtgcatcctgtagccttggctcatcaatagtcaactccagtcacccactgtgtgcacccttctgggcacacaaaaggcctctgagtcctgaaggccgctttacgcttaactagaacttggcactggcactccagtccctgccttcctcccgtgaacttggtcatagtaagaggtcagacaccgtcagtgaatattatgtaactatctgacctaaatatatcaaaaaagaaccattaaaaatgggaacatggagaggccagaccctactctttaagtcttaaatagatgcctgaactgggcttaacaattcttcttagctttgtgagactaaagatatgaagtctgtcagcctagagaaaaatgcacacaaagtttcatgcatctcagacagactccttttgccttaaggtgatggctttatttatgatttattttcttcttttcttttcttttttttttttttttttttttttttgggttgaagtctcgctctgtcgccaggctggagtgcagtggcacaatctcggctcactgcaacctccgcctcccaggttcaagcaattttctcctgccttagcctcctgagtagctaggactacaggcacgtgccaccacactcagctaattttttgtatttttagtagagacggggtttcaccatgttggccaggatggtcttgatctcttgacttcgtgatctggccgcctcagcctcccaaagtgctgggattacaggagtcagccaccgcacccagccacttatttatgatttctttaaaaaaaaaaaaaaagaaagaaagaaagaaaaaagaaaaagtcgtaacccttctagggaaatattctaattagccaaagaatttttcccatttattctttaaacgcaaaacgaacaagcaaaaatgccttagcatacccagtttaaaataatacatggaaatatgcatatgttctggtacatgtgtttactccctaaatctctgcttaaagcacttaggtgctgagctgccgaggcttgaaccagcgtatcattctctaaaaggatgagacaggaagcagctctatatttagccaagagaagcccgggaccactcatccttccacagtcaggaaatatggaaatagtgaacaaagataaacttagaaaaaaaccagaatttcctaagcattgattggactcacctttcagtcgaagctgtggatagttttatcaaacttcttatcaccttggtggccaactctgtaaatttgaagatccaaacccagatcgatctaaactaaacttgttaatagatgtttcagagagtttcttctttgcttattaaaaaaaaaaagcacaaatagggaatatgacatgttattagggaccctataattgttatgtttacttcttccagaaagatcagagttacttgggcttatacggggattatcagagacctgaggggaatgaactggttgtcttcccttttttcctgatctgtgaaattcaccacgttgactgacccatgaattagaagctctataatctgctggctggataggcaggctcctggacttgagtgtttcctgtttgtcatttatttaggctgaaggagaaaaaattgattcagaagaggcactgatctatgaagaggatttcaatggaggagatggtgttgaaggcgagttggaagaaagcacgaagttaaaaatgttccgcaggcttgcctctgtggcctctaagctcaaggagttcattggcaacatgatcaccactgctgggaaagtcgttgttaccatcttactgggctcctcgggtgagtgtctcccacactggctgcacgtagcaaaaggcacaagcagtgctttggtgaatgagagaaatggttgaagaagaaatgaaggaaacagtctgttccaccacatgaatatcataactgtagctcttgtaaaactggccacatgtacaaaccacacaaaataatttttccgggttagttctagttttgatgtttttagatggtttctgttaacctctgcaaaataatctttttctatatatgctaagcgactccattttctaggtttagattagaataacaacaatcctcttccttagagctttggaatggtgacctgctgcaattaacaatgtgcatgcacccatcacaagccatattgtgggttctggaggtctgtctgcttacatgagtccatagtcaccttaatataactctccaggatagactatttttcttcctaagttagattgtaatcttccagcacagacgctcacttcctttaaattttggacttggaccgcttattccataataatgttatcttgatcttttccctccttccattccactgctcaccactgccccggagctatgggaggcgtattagagtagactcaagcaaactgcaaagatgcagcaacttagctgttttttaatagtgggaaaaatgggggaaatgacagtagaatttctcaagaaataaaccacaacattttaatgaggagtcctttcaaaatgcccaataaaacagactccttttgccctaaggtgatggctttatttatgattccttaaaaacacttttaaaggagttattggccaggagcagtggctcatgcctgtaatccgagccctttggaaggccaaggagggaagatcacttagcccaggagttcaagaccaacctgcgctacttggcaaaaccccatccctacaaaaaataaaataaaataaaacaaaacaaaataaaataaaataagcatggcacagtgagagtttaattggccaggatgtactagttaacttaaaaaaaaaaagtagtaaattattataaagaaaatggtgtcaggaaaggttggaacagacatacagatacatgaattcttgaaaatttgggagaagtagaaagatggaaacaggcaagtaaatatgcagatgctactggtatgaaaagtagacatttacttagttcagacgccacaggtggaatttttttaatcatctggtatatctttgtatttatagttatcatttcatatgtgactttttcacaataaatctagcattaatttttattatataaatcaaacatgatttttaaaaattactattttaaaaaacctaaaaacacttgaaggaaattcacataatttcaaatagtcacattcactgaatgataagtgaatttccagttctacctgactttgtgattacgtttctcttccttaggcatgatgttgccgtctttgacatcatctgtgtatttttttgtatttttgggtctgtgcacctggtggtcctggtgccggacgttcgacccattgctgttcagctgtctctgtgttctgctggctattttcactgctggacatttgattggactttatttataccagttccaattctttcaagaggcagttccacccaatgactactatgcaaggtaagagaaatccttatggcatttccaggagaggttgtccccccacgcctttgggaccttggtttggcattgtgaatttacaggggttattcttgatggcaggcaattgctgtgttaagcaaagattttgtgggggtgggtgaagcagtctagcactttcattgtattggatgacacagtctggaaggaagacagtggtctcttcagatggagatgccgctgggatgcaggaggacagggagctgtcatgtgtaggaataagacacagagtctcagctggggaagaagatcaggaagaacattttacaccgaagaacaataaggatgtgccacagcatccagctagaaaggcgtttcatgggcctaatatacgagaacaaattaagcgtcagaaacattaactaattgtaaaagcttaaaaataaaagtcccagcctgggcaacatggtgaaaccccattctacaaaaaaaattagctgggcatgagggcgcacacctgtggtcccagctactcaggaggctgaagtgggagcgtcacctgagcctgggaggtcaagactgcggtgagccatgatcacaccgctgcactcccacctgggtgacagagtgagaccctgtctcaaagcaaacaaaccaacaaacaaataaataagaaaatacataagtctctggtgtgagagagaaagggagaaacatcaaatactttgcttcgattggagatgactattacaccaaatccttactatgaaaatgagaattaaaggtaaagaatctagcatttactttgacttttaataagtcattctcagtgaatgagagaaaattcctccatgcaggatgatgttagataatgacagggcaaaggaataatagaattagagaattactattcatcaatccttaatgatatgttctattatgtccacacctgaaataattactataaaggtcgtggtggttgcacaatgacaaagtagaaccttgttggtgcttgctaattgcaaagaaaaaaaataacatctttccaaaggtgtgatcaatatcttgaggaattgattgaagtcaacatgatcaaaactgagatagcttaacatttcacacctctcagtgtgatgcaacagatgagctatacagcatcatatggttaagacttttgacctaacctcccatttacagaaaatataaaggctaggaaacagtttaaatagctccacaagaaaaacaatcaaaagaattcaaaatgtggattctgcaaggcaaatgaatgggtctttaaaaaaaaaatcagcatggaaaagaggcctgcatagagagtggaggcagcaactgtctagttcagaggagcacagtagatacttaaacctgtgtgaagcacagctgtagatcagatcctggttcaacaacaaattcttaaaacttttttggggttaaattggagaaatttcaatgttcactggatattggactatagaattattgctgatttcttaggtgtatgatggttttgtgggtagacagaaaaatgccattattttaggagatacatggtgagttatttagataagctgtgccttgatgtctgcaacttaaaaatggcttaacaaccaacataatagattgatagatacatacatacataggaatagttaacagagagaagacaaatcaaattatttaaactaggtgatcagtatagggttatccactgtcctatttgaacttttctttgcatgaggaaaggttcataattgacagttccagaaaaaagaaaggggacagaaatggtaatgttagcagtgaaacacatctgagtctcgcagcaccaaagtatgttactgacagcgaattcccatggatctgctgcaatttcaatttttgcttccttagaaaaatgaattctactgaggtgcataaggcaggagagactgaggcaagttttggagcaggaatgagtgacaatgtattaaaaagctttagagcaggaatgaaaggaagtgaagtacacttggaagtgggctaagcaggcgacttgagatcaagtgcacggtttgacctttgactggggttttatacattggcttgattccggggtcttgggccccttttcccctgattcttccctgggggtgggctgtctgcatgcacagtggcctgccagcccttgggaggggctgcatgtagtctgtttactggagttgtgcgcatgctcacttgaagtgctcttcgctcacttgaagtgctcttccctcaccgaatgctcctacaaggtcatgtaccagttaaactccgccattttacctcttactgcacatgcttgagcccactcacccaactcctgaagtcttatcgggaaactgttgatcaccagttttgttttttttctgtatattgggagactgccttcccaagcccccagctgcaaccaattactattttagagaaacagtgtaaaaacctcctgactatcaccttatggtctcctgacgttcccggttggtgggtggggggtgccctctcctgccccactcatgcctgaccacttacctctgtaacagtagaagagggtgtgagtgttaggtgaagacggtgccagaattctctctgctgtgcctctggatggtaatgtagtgctttttgtcttcttgttgagaaatgaggaacctgcaatttaaaagaacatgaatattattaccataccagcaatacaggtttgcatcctttcaagacatcataatgtggttttaatgtgatcgtaaattataaagacagaatgtgtgagagggcccagtggccttgctttgattgatttatgtgtaaaatttggccgtggtaaaactagttgtggctgactgtgtctatacagtgctaacaaaaagagagagagagagggcacatgctatagagagctattcagtcaaatcctttaagaccacttaaattcagttaaaataagtaaaagttggtgctggacacaagcatccacacccacacacacacacacccatccacacacacacattcccaccttattctaaatccagttggctcagttgattgtattagcctggcaactggagaagtgaaattcagtctaataagaaaagaattttgtatagacacagtaaaactggggagcctctttaatagtgcatattcacataatatttactccaggcagaagtgaataaaagctaaatttcagtgcagacattatttctagactaaattaatgcttttagtttcctttaaacgtttaatttttagtttgttgaacacatatagcaaaaagttttgtactgctgaaagaactgccttttagaggatgacttaattgaaaatgtaaatatcctctgtagggcagaagttttttggtttttggtttattctttctactggcttaaggatcttttatgccatctagcggctgagggtagaaaatacaaagaatattcagaaccacctcgaaaatactagatcaggcaaactttctctgtaaagcttagtaaatagttaaggctttgagaaccatatgctctttgtcacagttctttcaagaagtcattataatgtgaaatcagctgggcaccatgtaaaatgatcatggctgtatttcagtaaaactacaaatacaaatttgcatttcatattccttttacatttaatgaaaatttttttaaatttttccccaaccatttaaaaatgtaaaaatcattattagctcatacatggcaccaaaacaagcactgaactacacttggcgcaggggctataatttatcatcttatggtaaagatattaacagttctaatagtgtaataacatcatatttgctcttcatttgaattgtcataaaagtaaaattataatttattacagacatttcggtacatcatccccttaacagtttaaaaggtctgttattataatctcatagagtaagacattggaagttaagttgcttatcagggaatagaaaatgtgagctaaacaatgcagtatgtaaagttccttgttgtagatttcctccccattaacttgccgataacaggacattacattttattcctttaaaacatggaaattagcatatttaaaccatagctttatcctagggcataatttcagtgtattgttattaaccccaaactctgagttggaagaaaacaaactgcagactggcaaaaaaaaaaaaaaaaagataaaagaaaaaaagaaaagaaaagaaaaagagaaagaaggaaacaaacatagaaataaagaaaatcaccatgggtgggtgtttatcacaaatttcataaccacggagactccagcccttctgtctcacttcctggatagataaagctgcccttaaaacagtccaagcaatttttatcttctggtaaaaaagctttcaaatgtgctctctggtgagaattaaccttatttttagaaatattgaattgatattttttgtcacactgttatactaaacacatgttttttggtcatttggaaaaataaaataataagaaaaaacactttaaaatgtaatccttattcccagaaataaatactattgctttttagccaaatttttttcagaatctttcttatgtctataggtactttttacaaacaaattttgaatcatattgcacatactattttataatttgctgtatttatgcaaactgtgtattttcctatgttataaaatgttctaaaatgtaattttcatagagtgcaaagtgattgtgtagctatattagaatttagtcaacccctgagttttaaccacgtagatgatttctcatttttgttctcatgaataaggctgcaacaagtgcccacattacttctaaatctaaacaaaacttaatgatgagcaagttgcaaccccacattctcgcagctgtgaaagagcctttgcagggctgtgggggtgcttgcttctgctggaggatgcacaggtgtccaggtcctaggccaacataatgttaactagcttaccggtttgcgatgccctccccatgcatatggtataaactgaaattccacgccgatgtgtggcacagggctggagtttcatttttctctagagtaatcccttcttttcaccccatggtcccaaaaaatcacgtgcttccttccagtttcatctgcacatgtggttgagtttttgcattacttttatccaggagagggtgagaattagtgattcccttccgtttatgcacacaggtgtggcacgagcatattttccaaaacaaaatgtaggacttattatgtgacagagataggtgtacttaggggaggttaagatactgggtctgaaattgagattattcttcccaaatctgaagtgctgtagtctattataacaataactgcaaaactcagtgaccacactcagaagttgatccagcagaagaaagcttcaagtgtatccacataactaaatctaagaccagtaatataccattcaaaacagtctgtttaaaagaatagagccctatggcagctgttagtctggcaggtctcccgaagaaaaatggtgaactaaacaaaatttgcctcagctaatgcaaagtaatttcttccaaaggttttgtattttcatagggaatttcagtagacagcaaacactacagtttgcaagacaggaagcaagaatggaagaattaatgttatgaggctgatgttcggtttcccccagctcgaggtgtgcatatcctcatgcgtttcctacttgtagggctggccccgtttacggttcagggatccttgggcggcttctgtcctataggcatcctgcgttaacgatgcagatggtgccctgagcaaagcaaaggagccgggggcgggaggactcaattcctgtttcactactgggaatctgtggcctctgagaggctttaaaacacacctgtacgtgataaacttgagtttttctacttggtggtgctttcagttaaaagccaattttaatagtttggccgcacatcacagcctgcgtccttgtgaagaagatacctaaagaaattctggattgggagaggggccaagcgcagtggcccaagcctgtaatctcaacactttgggaggccaaggcaggtggatcacctgagggcaggagtttgagaccagcatggccaacatggcaaaaccccgtctccactgaaaatacaaaatgagctgggcgtggtgccacacacctgtagacccagctactcgggatgctgaggcagatttgcttgaatccaggaggcagagattgcagaggttgcagtgagctgagatcgtgtcactgcactccagcttaggtgacagagcgagattctgtctcaaaaaaaaggaatccttgggtgaattcttctaaagacacttcttgacaaaaagagggctttttgttggtttgcttatcttgtggtgatctggataattcagtttaaagttctgaagtacttagagtggaggggatggcaggaggctgaaatggatgcctatgatttccttcatcataatgtaaacacttggaacctatagatttatttctagatcctactaatgaacatttagcatatgttcagcactgaaatgagcatgcaactttgaacaattcgttaagttgtctcttttaatccttgactggctttcattccaactcatgaactttctctagatcattcccaagagtcactgcaggggtcggacttgtttgctcaagttcagtttgttgttttgctgcttttcaccttacattgtgaggtttcaaaatgaagggtgggaaggaatgggaaagattctcagcccattctctatgaaaatagcattctctcttaaataaatgtacaatgatttgtcctgttacccttttttatcatctacttcaataaatcatgataattagaaaatgaattgtttagtgaaggaaaagctcacgtttctgtcaatgttaaaacaatgtaaaataagaaacagcaaaacctcaaattctagcatgatgagtttcttctaaagttaaaaaacaagcattccaagtgcaataccatttatgtttatactttcttataatagttgtaaaatatcaattatatgcaaggagaaataagtgcctcaatgctgtatatctttcttctagtttggagaagccagtggggtcatctagaaaatgaaagaatgcagtcagctcttctgttaggtctgccgcggtcttgctttgcaagcggctacataatccggttattgaaatgaatgtacttttgcaccccatcaagattgctagagtgtgcctgtcttgcattggggtgatctgaagtttcataaacagaaacagcacagaaagactaaattgtgtttaatggagaccagttggcaaaaccttcatctgaaatcggtccagtgtgtggagaaaaacaaatgtaaagcacgttattataatgctaaggaatgcaaatgaacccaaccaagctaccactttcccttcacctttttgttagaagatggcattggcagcagttaatctctagtgtttaatttgtgaagttggcagatgatacatgataaacaagtgtaggtttcattttgaaaagatgcttaatgatgaagtgacttattctacaggtctcattcagagttcatttatgcttatctgaaaggtagagttaggtgccccaagagaaattgactttacacagataagtggaaaatcaacagaacttaaatacttgaactctgagttcatctggaccttggtatcgtttgggggcctacgtgggtgtagtggggaccgggatcccagggcaatgaggtgtcctactcagccacgacacctgtactgggtacaaaagcaactgtggcttctcgccgagcccacgggcctttgcactgcgtgtttatccagcccagtgacctaagacttccccactgcaccttccagactctcagcctggattaagtgttctgggccagatttctctccttttgcccaccaagggcatctccacggtcttcctttcagtttttatggagaagatgcctctgtgggcacctagaattccccacagttagccagactcagtgactcattctaaagggtccatagctaggattgcagctcacctgcagtcacctgccccggctgccgtcatgtcatctggccagcgagcatcacatgggttccactgatttaataataccacactaagaggattctgctaatgctcaacagctcattccctggagtccacgggctcgagattgaaccttggccctgctattttctaggcagagcacctagcagaactttactaaaactctctgtacctctgtttccttatttataaaataggggtgaagatagtgcccagcccagagtgggtgggtgtagtaagcaggagagagcatatcaagtgctactgatttttattgttgtagtcatcaaatatttttattattcaaactcacttccccatttccaacagttctagccttatctcccatcatgcctgcagttcccctgtgcacataaagcaattccatcccttatactgtttcctttgctggaaatctcctgctcactgctctcactggctcctgtttgtcccttaaacctacccatgcacctccttccagaaccttccatcttcctttataaggaaggaaaattatcttgtaggcaattattctgtgcaaacttgctttataacaccagctgcattgggccataataatcccttcatgcatatgtctgactcactaggacccagttcttcagagccatgatgggcttttttggctttggtactctcaggatttaacactgctgacatacattggcctctcaggaactcttagttcaagcttcttttctctctctgtttcctaaaacccttgtattttatctccttatatatcagaataatgtaaaacttgattttcttgaactctaagtgataggttttgctatgaccccacccaaatctcatccccggtgggaggtgattgaattatgggggcaggtctttcctgtgttgttctggtgatagtgaatgagtctcacaaatctgatggttttaaaaaacgggagtttgcctgcatgagctctctctttgcctgctgccatctgtgtaagatgtgacttgctcctccttgccttctgccatgattgtgaggcctccctagccatgtggaactgtaagtccaataaacctcattcttttgtaaattgccaagtcttgggtatgtcactttcagcagtgtgacaatggactaatatactaagcttcagatgtggccactggctataagatgtgtggggaaattattttccagaaaggtcatcatcaatcttcatacacccacggcactcccactgcctcaatccatccacagattattgaatatgaagctctgcttaggaactaagtgaggcttaatggtataagtagccatggttcttaacgtggtgtttgcaaatatttagtttttgctttagaaaaatgatgggctttaaatgtatttatttgagaaactccaaaagacctttatccttgatgcttaaaataaacatgcctaaagtagtcagtagctttaacttttgaagacatgagagacttcagtttctattcagtatgtccttcagagacccagtttgcttttcattgttgagagacactgggtaatgtttcttaattaatgtgggggtcctggtcttgaaaatggggctcctttacctgctgcagagcagtgtggtagaaattagtaagacagtgtgcccgagggctacccatcctggtaactagcaatcaaccaaagaatgtcagttccatgttccccctggaattttctgtagaaacacatgtatgtgatttttttattattattattaaactgctacatgtgagggttaagtcaggatgtctttactgatttccagtttgtgtggaatctagtaatttagtaaaatctaatccaaccaaataactcctctttcatagtctcttaaaagcctaaccaccatccttgtattactgaaacaaaaaaataaatcctgtctctggaaaaaattagtattatttaattgtgtttcttggtattctcccagtgaaacaaaacatgttccttaaacatagttgaagttgtgtgtgtgtgtgtttatatatatatatacacacacacacacaatgggaaaaattataataataattattccccataggttatgaatattaaatggattaatatttgtaaaatggtgtctggtatgtattaagaactataaagaggtatttgttaaatacattagttaaatacattgtcctcatagttaactagacattcatcatttaattaaaactataataacatgtaaatatagtttgtcccatatctcgtctttaaactgtgatttcaaacaaattttggttttaagcaatctacttttaggtgcttgtgacctgactagaaagtgccgtcattatttggtcagttactttgtatgaagcacttgctgagtgtcttgcatctctcatttaattctcataataaccctatgaggtaggtactttttttttttttttttgagacagagtctccctctgtcgcccaggctggagtgcagtggtgccatcttggctcactgcaacctctgtctcccaggttcacgccattctcctgcctcagcctcccgagtagctgggactacaggcacccaccaccacgcctagctatttttttgtattttttagtagagacggggtttcaccatgttagccaggatggtctggatctcctgacctcgtgatccacccacctcggcctcccaaagtgctggcattacaggcgtgagccaccgtgcccggccagtaggtactgttatttttatgttcatattttaaacaatgcagaaaagccacctttatttttattttattttattttattttatcttttgagacagtctcactctgtcacccaggctggagcacagtggtgcagtctcggctcactgcaactcccgcctccgagattcaagtgattctcatgcctcagcttcctaagtagctgggactacaggcatgtatcaccacacccggctaattttcgcattttttggtagagatggggcttcgccatgttggccaggctggtctcgaactcctggcctcaaatgatccgccctccttggcctcccaaagtgctgggattacaagcgtgagccactgtgcccagcccacacctttattaaatgacagaaccagggtttgagcccaattctctctgacttctaaggctgtgcccttatgacctacactgggcataatcaccttcataacatagtaagccgacatagtaatatgtttctacagccttcctggaatgtttatgaagactcccttcctaccatcctgttccagaacaacttcgtggtaaaccagcctttgcactttgtcacatagaggtttggaagctcagcaatttgagcctgcatgagggacatctgtagccataacaccatgaggtagcccattggtctggacctaatgggtgtggagtgagctactcttgttggatgcatagcatttgaaccctggcagggagcactgctggagaattcacctggcaactcgaggtcggaaactgtatctcattgacctttgtgtctctcagtatcaagtagcatgtcagcatgcccgaggtaccaatgaatgcttgctatgtgaaaaaattaccctttctacatttagtctttcaaaatacgaagtggataaagattaggcatggttcacagttaaatttttttctaaatttgctccaaatgatcattatgtatggacatatcacaaactatggctgaatagtacatttaggtgctttcaagtttagaaattaatagcaaattagtggtggtaaatttcttgaagtagaaagattgacttttttcaagttaagagaacagcgtataaaatgaaatctaaagagatcttttgagaaatctcattctgaaataaaacaattacttagctatcaaactttttattggaaagtgtgagcgtataagaaatgaaatctaaagagatcttttgagaaacctcattttgaaataaaacaattatttagctatcaaactttttattggaaagtgtgatcatcttgtttgttaagagttaagatcctcatccatgttctgtattttaatttattgcagcaacacctcattaatttttcagtttgattgtagataagccaatttggctgctttgtgaagtattttgagaataaatataccaagatatattgcctcataactacttggattgttgaagttcagaatgttgcttatgcagtaacttttgctgttttatctgctttttagctccaagtagccatgactcaaggataagagattagctcttaaaatgagaagcaagatacttttaaattttccctacagaatttgctacaaaagctttctgctaagacaacttgacaaacgttttaataaacttgcttgttactcattgttgagtttttcttaacagctttattgaggtataaataatatgcagtaaactgcacatatttatagtgtccaatttgataagttttgccataaacacatccattgaaaccatcatcacaatcaacataatgtcttagtctgtttaatgttgccatgaaggaatacctgaggctgggaaatttatcaagaaaaggggtttatttggctcacagttctgccggctgtacaagaagtgtggcgccagcatctgctcctggtgagggcctcaggctgcttccactcatggcagaagttgaaggggagccagtgtttttagagatcacagggtgagagaagaagcaagaaaacaacagagaaagtgccaggctatttttaacaactggctctcgaggcaagtaatagagcaagaactcacccactttccctccccaacccttcatggagggcattaatctattcatgagtgatctgctcccgtgacccaaacacccctgattaggcaccacctctaacctttgagatcaaatttcaacatgagatttggaggggacaaacatccaaactatagcagataaatgtacattcatgtatattaggttggtgcaaaagcagttgtgttttatgccattaaaagtaatggcaaaaaaataaaaaacaaaaataaaaaaatgcacaccaactttttttttttttttttttgagacggagtctcgctttgtcgcccaggctggaatgtaatggtgcgatctcggctcactgcagcctccacctccaatgtgcagacaattctcctgcctcagagtacctgggactacaggcgcacaccgccatgcccagctaatttttgtatttttagtagagacagagtttcaccatgttggccaggatggtcttgatctcctgacctagtgatccacccgtctcccaaagtgctcagcttacaggtgtgagccaccacgccctgcgttgcaccaaccttgtatatattaatatatgtgtgtgtgtatttaatcctgtaaaaaaaataagtggagttacaacccaaaattacaatactattagcttttataattgcccatgtatttaccttcaatggagatctttatttctccacatggctttaagttaccatctagctttctttcatttcatcctgaaggagtcccattagcatttctagaagggcaagccccccattcagcttttattttgaaatgtcttaatttctcccttaattttgaaggacagctttgccagatacagaactctcagttgacaggttttatttttctttcctcacattgaataaatcaactcactgccttctggcctccaaattttctgctgagaaattagtttataatcttattgaggatctcttgtacatgatgagtcacttctgtcttgctgcctccaaaatgtagcttgccttggcctcccccactgtggctcaactacaagctacatcttttcagctcatgaaacttgccaaactctttctgggtttccctcccagcaccaggggagggaatttagtgctgaaaactctcttgatgcagtaagcttgagcaattttagggattatcttgtttttctctcacccctcaaagattgagatctactctgatatatctcaaagattgagctctccattgcctgatatgcaatgtctgccaaatcattgtatcatatatttttgattgttccaagcaggaaggcaaatctaattcctgtcactcacctgaacaagaaataaaattctgtggatttattgttgttatgccaaaagttcaaaacgttgtctgtcccttcctctacaaatcatctcagatcacgatgctggcaaacacattgaggaacctttcctttatcaggaactgcatatggctctcctcatatcccacatctaactagtgtgcctgtgtcatcactgatgggaaggagttgggtaataatctgaacactcaattaaaattcactgggcaagaggaatgcatgttttctaacatttttcttgcttctctggagaatctggtctccagaccccaaatataactgtcagaaagaatctggccacagtgacagctatgagtctagttcatatagcagatccaattcatttatgtagaatgcctgttaaagtgacttaattgattcaatttcagtattatccaattacatattttctgagaggtggactgaaatcttttttttttattgtcaaaagtggatattttggatatttactataaatagattacttgtattgagctagatttttctcacctattattcaagagagactgggttcacttaaaattatagaagaaatcatacttaacattaatgttgatataaaaatggtgtattcaccttccttccattgctaccctcaataaaaaaggaccagctctaacgttcattctcatgatttactggatttggaacggttaatgtgaccaccaattcaatattttacccttctaaaccttttaatttcattgtgattaacatacatggcacaagcatgcatctcgatgaaagtaaattatgtattaattttatctctatgacatcaaaaataaattaaaaattcttatagaacaaattaataacatgcatttattttttcataaagttagtatttgactttctctaaactcactttgagctacgtttccatggtacatgttacacattaaaatatgttatgtattccttaaaaagttaattctcaagaatgatccttttgacccatactttttgtcaggtcatgctaccacaatatttcttggaaagttatagctatatttcatgaaattaacttcaaacagttaagactttatcctcccaaaacagaaacatttaacctgtactttaagtgagaagatgcaagtttttgtgagactcagccaattgtttcttttcctagatacgcttgtttctttctgagcatctgtaagtttacatacaacttctcttacagaagatttattgctttccccgttacagcacacctccaaaaaattgattatccagtctttttgcttagctttctggtaaaaaaaaatgatactccttggtcaataattcacaggcttatctttagtgtccttgctatagattaaaatgcaagtgcagaaagccagctactatcctggggttgagatcttctcttgggttcagtgagcagcctccatgcccttcagggttgactcctgctgctttactgccaagccagacatggggccagccatcatctcctccctccaccagccagcacatgaagtggtctggcaaagtaattctatgggaggaaaagcttgacaatcatcggcataagggcttaacagaccagagctagttgccaaaaaccattctaccatggttgagtagtattccctctagagtgcagtgctctttgatgacaggggtgatatcctatttatctggatatccccaccactgcaggtagaacccaacacagaggacacagcaaatacttgctgaataaaaggacaaattaataagtgagtcctgtaatggaactatcccatgactaatgctttttctttagagttttctggtactttgaaaaatatcacattattttgtctgagaaataaggcagtgggatgatttgaggccagcagactgggacttgtgagtttcactatttactattttttcagttatgtgaaacttaaatctctacatattctagaaacaatagcagatgccttgcagagctgttggttgacatgtaactcatcagaggaaccctccacttgccattactctccctctcttctatgtaactttggttattgactatgtaagactttaaaatgtggcatctaaacccatatttatattatagctatttaggggaaattatatttgtgggtaatagaagtgcctacatttatgacctctcatcttgggcttcttgatagggaggggaggttgcctggcttacgtgttgagctacgtcttgctgtcataggaagtaacccaggagtgtggaagaccagctggtcatgggagttctggttctgactcatttctcacttttctctcagaggtgacagtgtgttcaagcatgggaaagaggccataaatttgcaacactcatagaatataaacattcccttatgaaccctacagatgacatcagagaaagaatgcctgtgataattaaatgtaagccccttccatgtggcctctatttgtccaccaccaatcatagttctgaatacagcacaccctgcacctgatgcaaaattgtcctatgaacagattgctttttattataaggcagtatcctgcaaacataatatgaagcccaattacagtaaattggcaaatagttaagacatgtttgtgcccccaaaagcttcagaagcatgatgcagagcccaggggactcagtgcaaagtttttccaaggttgaaaaaacaatgtagtgtgaaatctatcagattacaatttgctcacacacaaaataaaatatctatgggtttggcatggaaacatgtttaaagcataagtaagaaaccaataaaaaaaagatggttaaacattggctgtgttttccatatgatgcaaggcagggggtagggtgggaaaaggaattggaagccgaactagcaaaaacttattgtaaaagacagtattataggatgggatgccacaagaaatggagagaaacttgctggaaagataccttaaagatactttaaagacagttctagcctttttcccacagagacgcttgtgtaacatggaggaaattttgctgggtgtggtggctcatgcctgtaaacacagaactttgggaggccgaggcggacagatcacctgcgatcaggagttcgagaccagcctggccaacatgacgaaaccccgtctctactaaaaatacaaaaattagccgggcatggtggcaggcaccagtaatcccagctactcgggaggctgaggcaggagaatcacttgaacctgggaggtggaggttgcagtgagctgagattgcaccattgcactccagcctgggcgacagagtgagacttcatctcaacaacaacaacaacaaaaaaaaatgaggaaattttataaaatggttgggaacacaaacattgctttgtgaggatatctgactacccatgcctttttgatggtatgtctttgttttcattcatatgtaaaaattaattctgttctgtccacccacagttagattttaggccttttcttacatagattgtaccatagaattttggattgggaagagatattgataccatctaccagtggttctcaagctttcttgctggccccaacattctaaaggatgtgcatggtggtaaggatgggtcatcctcattacccccattccagcgagtccagcgtgatggagcactctacaggtacctggatcagcactgtggtatggaaggtgagagaggcaagatggctgcagttggaaaaggtattctcagaagatgctgtgttcccctcacaggggacttcttttcttcccttgaggatcagtgagaacttaaaggctcttctcattctagacttaggaaagtataaaaacaaagttagtgaaagctgtcaaaataaaatcccctcaaagcattgatttccaggttctgttaccgtccacaacaggagtgcacaccatcccctcctcctcacatgcttcttggcatggaaagagttgtgagcaatccctgtgcgaagagtgtttctttgcctaagaaactaacatacaggttatgagtgtgtaagagtgattataccccacaatagaagaatgtgtgttttgctgaaaccaaaccacagttgtgagtatcctcagtggcccttccccttcctttgatcatattaccaagatgaaataaatacatttttcttggcaaaaaaccaaatattaataatggaacataaaacaatgttgtaaattctgtacatgttcccaaccaccactccaaatcctcccaacctgtgcagatattacctccccttaagagatccagttcacttgagcaggattgaggttctattccatcttaaagaggacacttgtatcctcttgtttgccaatgccatcaatatggtattaagctctgacctaggcataagacaagtttatgttatacattgtcataataatgatatcgttgtagccaggatttcttgaccaactattataggacatggcctatggtgtgactttatatgtttgacatcatatacctcattaccttaacctagtaattagccacaaagtaatggaattaacaatagcttcacattaaacagttgcaagtgatctggtttctagttgtagctcctttcctcaatatagtaagtgaccttgagcaagttacagccgggctagcaaagtggggaggtattgggtagggatggggaggagacaggagtggagagggagaggtcagcaattgctaacatttttttcatctcaaaaatattcatgatttgaaatagatccacaagccttcaaataagtgagccaataagctcaggatgggattgtttgcttagacaggagtctactcactactgagagtcagcattataaattccaggaatcatcagtcaagggggaagagttgatctaactcccaactcttaaataggagataaggggagtgatcctggagcataactaagtgtgtcgagagtaactttattccattttgtggtactttgctcatgtaatccagtacctgggggaatcatcacaaactgttcataaagtcacaggaaggaaaaaaagcataagcgacataggcttatttggacctgtttacattagtttctgacactgatattactctgtcagagtgagcaaacatttttcacaaaggacattactataaaaactttcatccgatctttgcaatcgagcatttgcaaaagtactgtgagtcagagttggactttagtacaaattactcgaaatttaaatgatcaatgtaagaactcaggctggacgcgctggctcatgcccgtaggccaaggtgggcggatcatctgaggtcaggagttcgagaccagcctggccaacatggcgaaatcccatctctactaaaaatacaaaaatttgccaggtgtggtagcacgtgcctgtaatcccagctacctgggaggttgaggcaggagaatcactggaacacaggagacagaggcagcagtgaaccgagatcgcgccactgcactccagcctgggtgacagagcgagactccgtctcaaaaaaaaaaaaaagaacttggttaggagttttactgtgtagctaagtttggttccaggcattctgccaatataccattatgtgcatattttaatgaaatgatggtgtaaagaatgctggaaaaatagagaaaagatatctggaaagtttctctgtctttacagaaagatctgttttgtatttgacaacaaacactcttctgtggcttcttgttcagtattctaaatatggaatgtctctttctcatcctgtgttttccacctccttaccaaaaaaaaaaaaaaatgaggtcattggagaggcctttaacctaggagagctgcaaagactgtttgggctgttataataatatactgtaggttgggggcttaaacaacaaacatttatttctcataattctggaggctggagagtccaagatcgaggtgccaacagagtcggtgcctggcaagggccctcttcctggttcacagatagtaccttctagatgtgtcctcacatgatggaggggtgaaagagctctctgggtccctttcataagggcacagatccctttcatgagggcttctcccttgtgacctaatcgcccctcaaaggcccgacttcttaataccttcacatggggagtttggcttcaacctaagaattttggaggacacaaacaaaacaaaagcttatgatcacgcccttgtgaaagtgagagtgatggaggcaggtgtgggaaaagggcactggagtttcttgtgaaagctagcggggaagaaacttaaaggaagagcctttctgaggctggtgttctaggcaccctgccttttctaggaagcctggccttgtggaaagggaagggctttggagttcagacaggccaggcttcctctctgatctagcctcctgcggctttggcttcttcttcctacagttgcttacatgatacctacctcatgaaatcagagaggtgttaaaacaggctgtgggtgtcaagtgcctgacacccagcagggattcaatcacattctgttgcattctcccaaaaagactctgtgactccatcatgagggattaaaggggaagccggcacctgcatcacagagtggggctgggctaatagtgataatatcatagttgtaatagttaaggtgtattgagcacatagtattgtcgggtgctagttacttcatttaatcctcccaacaactccataaggtgtggtctactttattatgcccattctaaagacaggaaaattgaggtgtagataagtgatttgctccaagtcacaggatagagatggcaaagccagagtttgaattcaaatctgactctaagtatttgacagcacaacagaatgactacagtcaacgataatgtactgcatattttaaaataactgagagtggaaatggaatgttcctaacacaaggaactgatcaacgctgtaggtgatggacaccccacttaccctgatgtgattgttacacattgcatgtctgtatcaaaacatcacctgtgccccatatacacttacccataaaaaataaaaacagaaattagcttaaaatgtttaaaactctaattctgaagcctgtattctaaatcactctcctattctgctcttctactgcatggaaaagttttgaggtctgtagaaaagcaacaaagacaaggattaggaggaatgtggtccagggccaagcctgtgttgacaagggcaaccttggcttcagggaaagggcagcctaatgcgttttttaaacaaaggatttgcagatgcatttttgtaggcaagtcttgaggctccaaactggggaacaaacacatatttgacccaaagctgactagaaagaagaaagtgtctctccagagagatatgagaagctgagagggcttgggtgaagcctgcgggtagacacagattggaactgtacttggctctggaagcctctgcgaggtgaggtcctcacagcttgcgtggttcaggtgcagtttgggctgtacaatctctcatccttgtagtaactgggggcacagacgggttattctgaactccaacagaaataaaaacccaccggggagcgagctgcctgcatgttctgccaccttcagccccgccccaggagattccaggggttctggggcagggcccagtgttagtgctttagaagatccccacatgattccaacaggagagggcgaggctgcaggtgtcacagtgggctccgaagtaccagaagaaaagagaacacaggaaaaataagtgaatcccagtgcgtcagaactgtgtttcatctctgtgctgccactgacgcacccagggtacctgttaccctgggcttctgtctctgagccctcaaccatgctccatgtgccatgttcatgacgactgccccatcctgccactgtgttccttgggtgttgctgcctctctgccaggaaaagccacacttgctcttctggggctgagatttctctcgatggcatgtctgccaagagctgccagcaaggcatattctggagaaataccttccacatccctcagagcctccaggatcctgtagtgggctcatgggagcagctgtgtgaggagagtgcacccccggagggcaggcagggaggcggaaacgtgggctcctccagcctagggacctgcccaccagtgtttttcaaactatggtgaagacaggagttacctgaggtgctgatcaaaaataaatgcttatccctgggccccacctgacttgggaacccggaatgtccatggcccgggtctgagaattggcattttaacaaggagcccacgaggagaagcacttcatatcacataatcctgggcgggtggagccaccgtgtgtctcccatggagggaactgatggaattgcagagcggtacattcccgggtagttctttcctgcgtttgttcagtcattaaacaagtactgttattaagcatctactctctgttcttgctaaagtagacaaagtacccctcccatctccacagggccaattgggtctctatcaaaacattgctcagctacttactaggcgctgtaggcattgggtaaattacttaacctctctgtgcatgagtatctttgtttctcgtattagcataatagtaaccacatctcctttgggtggcagatgctctatgtgagcctccatcaaatgaataagatacccacattatagcttgtctacatgtggtagcccttactttcacatatatcccccccttcccctaaattctaatgagaaagtagaaatgttctaggcctaatgagagtatttccaactctgtttttgttttgttttgtttttttgagacagagtctcactctgtcacccaggctggagtgcagtggcatgatctcggcgtagctgattacaggtgcccactaccacacctggctaatttttgtattttttgtagaggcagtgtttcaccatgttggccaggctggtcttgaactcctggcctcaagtgatcctcccacctcagcctcccaaagtgctgggattacaagtgtgagccaccgcacctggcctccaactctgtttaattgtatctattcagcattgttttgggaagaacgttgagctaatcagtgctttccaagctatggtagcctgagaatcacggagcttggggaccagagggacatttgaaaaatgcttacccctgaacctcacccagacttaggaacacagaatacctagagatgggatgtggaatgtcatttaaacatttttttcatttttaatttttgtgggtacatagtaggtatatatatgtatggggtacatgagatattttgattcagacatgcagtgcaatgcataataatcacatcaggttaaatgggtatccatcacctcaagcatttatcatttctttgtgttataaacatttcagttctactcttgtagttattttaaactgtacagtaaattattgttgactgtagtcaccctgttgtgctatcaactctagattttattcattctattaatattttccccaccccactacccatcctagcctctggtaaccatcattccactctccatctccatgagtcagtttttaaaatttttagcctccacatgtgagtgagaatatgcaaagtgtgtctttctgtgactggtttatttcacttaacataatgacctccagttccatccatgttgctgcaaatggcaggatctcattcttttttatggttgaatagtaccattgtgtgtaagtaccacattttctttatccattcatctgttaatggacacttaggttgcttccaaatcttggctattgtgaagagtgccgcagtaaacatgaatgttcagatctcttcgatatacttctttcctttttttctggatatatacctaggagtgggattgctggatcgtatggtagctctatttttagtttttttgaggaacctccgtactgttttccataggggttgtgctaattgacattcccaccagcagtgtacaagggttcccttttctccacatccttgctagcactttttattgcctttgtttggataaaagccacttcagctggggtgagataatttgtagttttgattcgcatttctctggtgataaattatgctaagcacttttgcatatgcctgtttgccatttgtatgtcttcttttgagacatgtctattcagatcttgaccaaatttttaaccagattattagattttttttcctattgaattgtttgaactccttatatatcctgattattaattccttgtcagatggatggtctgcaagtattttttcccattctgtgaattgtctctttactttgctaattgtttcctttgccgttcagaagcgtttcaatctgatgtgattccatttgctcatttttgctttggtcgtctgtgcttttcaggtattacccaagaaatctttgcccagaccaatgtcctggagatttttcccaatgttttcttttagtagttttatagcttgaggtcttagatttaagtctttaatccattttgatttgatgtttgtaaatggagagaaatagaggtctagttttattcaagtgcaaccagaggcataaaaggggggaaaggacagtctcttcaataaatggtgctaggttgcattggttgtctgtgcttgtggggtattatgcaagaaatctttgcccagaccaatgtcctggagatttttcccaatgttttcttgcagtagtttcacagtttgaggtctttaagtctttaattcattttgatttattgttgtgtgtggtgagagataggggtctagtgttaatcttctgcgtatggatatccagttttcccagcaccatttattgaagagactgtcctttcccatgtgtatgttcttagcacctttgtcaaaagcaagttcactgtagatgtatgaattactggcttccctattctgttccattggtctgtgtgtctgtttttatgccagtaccatactgttttggttactagagctctgtagtataattcgaagtgaggtaatgtgattcctccagttttgtacttcttgctcaggatgactgtggtcattctgggtcttttgtggttccatataaatcttagggcttttttttttttctacttctgtgaagaatgtcattactatttttatatggattgcactgaatctgtagattgctttgggtagtaaggacattttaacaatattgattcttctaattcctgaatatggaatatctttttattttattgcatcaattttttccatcaatgttttatagttttcattgtagagatctttcacatttttggttaattcctagttattttgttttgtttgtaactgttataaatgtgatcactttcttgttttctttttcacattgtttgctgttggccatatagaaatgctactgatttttgtatgttgatttttatattctgtaagtttattgaacttgtttgtcagctctcaattttttggtgcagtctttaggtttttccaaatataagatcatatcatctgcaaataagaacaattatgactttttcctttccaaattggatgcttttatttcttcctcttatctgattagctagctgggacttccagtaccatcttgaataacagtggggaatgtgggcatccttgtcttgttccagatcttagaggaaaggctttcagaatttcctcattatgtatgatactatctgtgggtctatcatatatggcttttattgtgttgaggtatgttccttctatatccagtttttttttttagggtttttggtacagcattttaacagcttcgtcaggtgatcccaaaatatcctactttgagaaacactgagttaaatgctctgtgtgatgcaaataagcataagttataaaacttgtattttagagaagttcagggatcgccgagaagatgacttctctacacacagaagtattaaattaatatcaatcaaatgcaataagtcatgtgaaggaacttaggtgaaaaatcatttaaaaaatcattaaaatgtaagggaatgcccaccacttgaattaagtaaggagtgaatggttgagaggagagagcccaatgaagacatgacatgctgaggaaaggcttcctggaggaagcagcagcatgaaccagcagcaaagctcaactgtctctgttgttaatctcagcatacattgaactcatgcaatcatcaagaagcatccaccagacactgaggatgcagcagcttggaagtgatggggtgagatggagctctgggcattagctagtaaggaagggaaatgtattataagactgtcatgttcttacagatgctcagactccagacagtagagttcctctgaacatatgaccagtattgccacccgcatggtgctattattggcataaggatttggtatgagaagaaccaatatttgagttccggaccctctctgggcaccaatatctcacacactttgcaataattcaatgatccacctagaactcacacctttatgtatattttaccttctactttcagttttttccagggtcatttaggaaacaatggaaggaaaacatgaatcccttaattgaagaagctgttaaaatgcaccaaaatccccaacctttttgttaaaataggaatttcttcagggcagcagctccatttctcattctgaagaggttcgttgtctgatgtccaggttagttagtgggcatccaattttaataactttaaattgttggacttggggaaattttccattattgacaagcttttaagaagatagggaaaattttctatcaaatagtacttcaacatcctgtctcaaactgttgaactttgaagctaagtgatacttatgactacatacaggattggttttactgtaaaaaaaaaaaaaaacaaaaacaaacaaacaaaaaaaaaccgtcatgctatttcgagcttgtctaggtttattgaatgctaagtttgccttggggttgcaatagtttatatgtttattcatcttttgcttataaaatctccatcaacctagtgacctgggggtgacttttgtccatgagatttaatagtttttttatgttttgcacaggacagatttttaccataaattaattttctgttagatgtcattgaagaaaacaatagtaaaatagaagttaaaggctttattcaacagctacacatcaagaagccccttaacatgagctagttctctaagttgaagcaggattggagtaggacaggtagagagaagagaggaatatgtggctgtgatcttgtccaaggttgtagttgccttcatctgtaactgctgcaaaatctgtagttgaaatgattgaaagacgatgccaatggttcatgcccttttcttgaggtggttgatgcaataccatctggcagttctagagcagttctttcaaaaactgtctttgtaagcctggtgagttgtctgttggctgcctaataccacctaagcttcaggaggggagatgatacaaaagacataaaggcagggggagcagagagagaaaaaaaggaggcaaatgttggtctaagcaagaaaattgggttgattttgattattaaacattaaacatggggaaaatgtatgatttaaaaagtgttagttctgttctttgttataaaggattttaatcaaaagtctttgtagttactatagaaatgaaaactgaggaatatacaagggtgtgaacatagaaagaaaacaaaggtggcagaaaatggcatacttttaaaaagaacctttaaaattatagtggcgatgcacactcattggaaaaaaatctaaatatttcagaaaaaaataaagagcataaaattgaaagccttcttcctttaacttgttcgtatctgtaattcagtttttatttttccaccagagataactgaggccagtaataggtatcccttcaaacatttttctatatatttatgcataaatatatatctattttctatatatctatgcataagaacataaacataggtcagagtgaggctgggagggtgaatattgaatgcatattgctaagtgaaaaatccaacctttgaaggctacatctgaataattctatttgtatgactttttggaaaagaataaagagatggcaaacagatcagtggttgccagaagttaagggagagaggtggcagaaggttgaataggtgaagcacagaaaatattttagggtggtgacattattctgtatggtaccgtagtggtgaatacgcaacactatacattcgtcaaaacccattgcactttatagcataaagagtatgccttaatgtctgcaaattaaaaactaaccaattagaggttggaagatctcagaatggaatgtagactgtgacaaaaaaaatgtaagcatataaacaatgtgttatttcactgaaggaagatggaagaaatttgctgacttaggtaactggaaatgagtggagattgtatgactgaagacaaaaggaactgcatataagcactgtgctttatttgattagtttccaatagaagtacatgttatcagttctgaaatcactatacatgtatagagtgattaaacaaataagtaaatagatggcagatgaggcagcaggtgtcttcctgtttgagagggaggttacagataagcaacaagggaaggctagaacaatatgataacagattggaattggagtcatcattaggaactcatatttactttaacataaatacagatggtgatatggataaatatttctatatctgcgtatatgcacacatattttcttgttctttcaggtgagagggcctagaagcaatgaggagctgttgcagtgagcacagctagtgcccacatcttggtttctaaataccactctccaataaaaggaaccagggctccttggagaaatggctgatactagagttaggtcagggtagtggtcaaagatggaataatttgaggaacaaaataaataaagttgtattggagtaaaaccttgggtataaaatgcatattgtgagtttatattgatataagtaaatgattgaatgaataaatgggagataagaggcaattctgtccaaaatggaagaattcagaataattcctaactttccaccccattgagtgtgggctgtgcattgtgacttctttccaaaatatagagtatggaaagtggaggccaggcatggtggctcacacccataataccagcattttgggaggctgaggcaggcagatcacctgaggtcgggagttcgagactagcctggccaacatggtgaaaccccatctctactaaaaatacaaaaattagcctggcatggtggcacatgcctgtagtgccagctacttgggaggctgaggcaggagaattgcttgatcccaggaggcaaaggttgcagtgagccgagattgtgccactgcactccagcctgggtgacaaaacaagattctgtctcaaaaaaaaaaaaaaaaaaggaagaaaggaaagaaagtggaaaaaaaaagagcaacttctttgtggagagacctgacaaacactcagccaagtgatcaaacttaacatcatcaggtataagtcatgttgatagcatgtatccttggaatggtgtgatgagaatggcactttacccctgcaacctttctcccccaaatccttaacccctgcataaccatgagaaaacaaacaaagcaaaacaaaggggcattccacagaatacctgatgagaactcagaactgtgaagctcatcaaaaacaagaaatatctaagaagtcattgcctagaggtgcccgtagagacatgatgattaaatgtaatgcagcattctgcatgggattctagtgtggataaaggacattaggtggccgggcatgatggctcactcctgtaatcccagcactttgggaggccgaggcgagtggatcacctgaggtcaggagttcaagaccagcctggccaacatggtgaaaccccatctctatgaaacatacaaaaattagccaggcatggtggcgggttcctgtagtcccagctactcgggaggctgaggcaggagaatcacttggacccaggaagtggaggttgcagtgagccaagatcacaccactgcactccagcctgggtgacagagaaagactctgtttcaaacaaaaataaagaaaatgacattaggtgaaaactaagaagatttcaataaaatatggactttagtttaaaatcatgtctcagtattgttttgttaattgtgacagatgtatcatactaatgtaagatttaacagtcgaggaaaatgggtatagagaattctctgtagtatgttttcaacttgtctgtaaatttaaaattgttctaaaatttaaaaaaacacttgaaatatatcttggaacttgtttcatatcaaatatagatatggatatatagatagatggatttttttattattttaaatggatgcatagtattccataatatacatatatatgtcataagttatctagaaatctaaatctaaatttctctgtcatgttcatttaaaattttattagctttgcactattactgttcatagccaacaaatatccttaaataaacatgaaagcatatatgcaataacttgtctgtatctaaataaaacataaaacctaaagaagttttgaaaaactccagcagagaaagctgcagatgggaaaccaaggctctgcaaatattaaggtcttgaaggcctttatatcaccttcttgttgcctttattttaaatacattttttcccacagactatggagacttgtctcttgctactctcgtaaattattccctagccccagatttctagagtagtctgtggtttatttatgcaatgaaatactacccagaagttaaaatggactatattatatatgtgcataaaatatatatatagggttaaattcatataacaattgtatgtattatttatgggtgcatacatatgtagaaaaagtgagttaaatattcatgggaatgatatacactgaccttaggataaggcttgaggaagaaggaagaggaggagtgaaagaactgtaggcaaggctttagctatgccatgaagttttaattactttttcttaagtgtgctggcagaacgaaatgtggcagaatgcgaatatgtgcttcctctgagcaatgggtgtctgtgtatgttttataagtcctatcattacattcaattaaaaaatggaaagccattcaccattcatgtcagtctcttgtgttgttggtaaattattgtgggattctttttccctctgattcttcaaagactagctttgtattgcttgtatctgcacctgttgattgcaattacatttatccctcccctccctttgtttctccacacactctgtactttttgaactgggttgtttccatttaaggaaggccatatttgaagatgaaaactaagcatatttgaggatgcgtgaatgaaaaaaattattccttcaagcattcaccaaaataatgtgcagctttgattcttttatttttcacacgttctagataacagatggcactttagggctattaacaggatgtgtgagaaaaaattcagggctatatgtagtgattcttttaaatactcccgttgttgagtggacaatttaagtcatcatagttgtgaagggaataaaagagaagcggcaggttgtttttgttagaagtaatctccaaaatacaaaataagaaagtaagagaaaatttcctacttttgcaaaattaaacaatctgaaagctcaaattaattattcttaataaaaaacaaaaatgttaatacataaataaaaagaatcttttctgtctaaaaagagaacctagacatttcagcaagccagtgcaaattctttcaagctctctacttctacctattcggtaccttataatggagttgatgttactggcaatagctctaaggtcataaaatgtcttaaatactttctgaatcatgaaagaaaaagttatatcattttcaaatcatcttagtattaagagatattctatttgttttaaaatagcagcctgtataatgtctaagaagttcacagacttcaatctagctgagttccaaaagtttgttgagccgctgatttttctgggttagatataaatgttaatttccaagtttaatttatgaaagttagtttaatccacagtagcagacttctgtttgttggctgtcttttggttcatactcccttttagaaacttggcaagtagacattcattagccgcttagtgcaccccaacgcgttcacaaaattgcaaagagaagcattgataacatctaacaggaaatgtggtgagccggctcctgctgtgccgttctttagtccacaggttcactccttcccgacctatgagagctgattccactaggctgattggaggccagcagacactggcctggttccctccatgctttccagggctgggacttagcagaaaggagcctggtgctccagcattcctaatcagggagcttctccaactaagtgtcagggcctctaagacataataggaagtttgtttcagtgttttctcaaaggtatttttagccatcaccaccctggaaaagggaattttaattactatcattgattataatggtaattttaagaataccaactttattgggaggaaaagtttcagctatttatttccaatataaagctgtagaaaatgttagttagggatgggtaagccattagcaagagatgattgacaatattctgacttaatactctaagtcactgctatcccaaatggcagatcagtgctggtccatgaattgtttgaaacagattttcaacaagttaaatgcagacgttgagagaaagcatttaaaatttatatagcacaatgacattgtggtgacatgcaggcatgtgatcattttctactaattattattttctgttacatttacaaatgtattagtacaaatgaatagcaatttttaaagggtctcataacttgagaaacacattttagaaggtaagaaacttgttagaaaatctattttcattacaaaatgtgtaactttgattttctctgacaaatttatactagcactattgcatttgtaatcaatgactctaatcacgtttaaatttacaaacaatataaaaagaaagtaaaaagagaacaaggagttttcctgagattctctgctaagaattcaagaaagacaaaagtgtggaagaagttgaaagaggatgtatgttcacctgaggtctatgttgtaaatggtgagagacagggagggcgcaggatggtgctgtgggtagaatctttgatgaaaaaggtggtggtgggtgggggtgatacttgactcatatttcctggttccagcaacctggaaaacttctaggttgtatctgaaatgaggtaagaagagagaaaataaggcaagatgtaattattcattttaatgtataagctggttacaaataaaatatttattattcatatagtgtttatatatagtaagcctttgataaaaatattgttttaatcagaacattctacttctaggtgggtaggtagatacctttatgcaagtatatattcatattagtcaggcaggtgttaaaaagatatgtgaagtgtactagaccagctatcctcctataatcaaagagaaaactagagaaaatatatgaaacaactgttttcagatgctgagctattggaagtgtgggtttatgatggctgagagaagggaaacaacaggataggctaaaggatttttccagctttctacctggaggaatttactgtacattatgtggggaagggaatccaaactgagcatggtggtcttgctgagctgaagatgggaatttggagaggatgagaaggctgatatttgtggcacagagtaatggagaggagaaagacagagaaagagctccagagatcttcaaggagtcatctagacactttagctgaattctaagctgtgcatgcataggtaagactccatgaagtcagacaaagcaaaactcccggggaaagaacaaaaattgaggaactgtaaagttagtaactgccagagctcatatagatttctgaaaatattttagctttggccagagtgaagaattcttctactctactgggactgagctaatcataccgtgaaggttactgcaggcccatcacaacaaaacctataaacaagcctactaggataaagctgatgcaagtaacttaacttcctgccagtataaaactcaacactttttaaatgacaacaaaatcgagacactcgataatgtagaaataacaatgttcagcatccggatgaaaatttttagacatgtgaaaaagcaagagaaaactcaagcaatgaaaatcaaactataagtgaaacctccttaaaacagctttttaaaatattttcaagattacagaaaatggacataatgaaaacaggaatggaatttataaaagagaattgatggacaaaaagaacaaatgaaactgaggagctacaaaaataccatagctataataatctactgaatgagcttaagagcaaattaaataccacagaagaaaagatagatgaacttgaggatagaatgataaatcctacccaaattgaagcacaagaagaaaagaaattgaggaagaaaaaaaaaaaaccactgaaccacataagctataggacagcttcaaaaggtctaacagaagtataactggagaaagatgtgggcatagacaaatgtatattaagaaataacagccaaatgtttcccaaatttgttgaaaaatataaacaccctgtccaagaagtttaacaaactccaatctaaacaaacaaaaagaaagtcccacaaaaacacaatataattaaaaaatttgaatatcagtgatagagaaaaatatttaaaacagtcaaataaaaagacacattatgtgcaagggaacagtggtaagaattatcacactcttctcaccagaaatgaatgccattcaaaaagcaataggataacattattaaagttgcttctcaaagggaaaaaaactatgaacctataattctgtatctgagaatgtaggtagaagaaatgaaggtcaaataaagatattatcagatacgaaagactgagagaattttgcaccagcagacctgcactacacaaatattagaggatgctcttcagacttaaggaaaatgatttcaggtagaagcttagctctacaaattacaagctcttgaaatgagattcaccttttttctatctctgtatgaagttttgtgaagatattatgtcttcatgtaagaagctgcagcagtttcttgcgaccgtgagagaacaagcatgaaggtgaacaccgatgatgcattgagaacaacattgagaaaacacctgtgtaattgtgcattgaattagctaacctggaactgctcatctttggattttttgttaagtgacatgttcgacattgatagagcagtcagcattaaaatctgatcaaagaaacaggcagtttcacatccttcatagctgagtctttggaatacattggtatgcttatatcttcagcattattctttccattgattaataactgtaatctaaaatctttaattcttttttatttttgaatagatattcattagaataatgaaagagaaaatgtacactttaagaatttcttctacttaacgtttttaaagattgcctctttatccaaaaaacagtataccatttataaatatttaactgtatatcatacaaatgcctccagttttatccaaatccactgttaaattacccatgtaattattccagtagaaatcattatacctttttattgttaatttcatcaatgctttactgtaaagagtctaggtgtacttaaatgcagttctcagagttcttcttatgacaattaaatggaacatttccatattattttggtgggggacgatgtgtatatttactgtttaaagtgtaacaaaaaattattagccactaacaatatagataaaaaataaatggccaatagacttactttagggcgtgcttttcaatgatttcaatgacatctttttattcctgtttccattaaaatgaagccaataattcggttatatattctaactgaaaatgagactatgaaatgatagcccttctagtctttgacaacaggagaatagttgaggaaagtgatgcattgacgtgaagcgaaatggtagggaacacccgtgaggatgctctaaacaaatattttgagactaatatgaacatacaatactgtatgtaaatgaaaattccaaactcatatcttatttactgtcctccatcaaacttattcagttaaataagaagtacagatgagatagaatttttagtgatttagcaaattctcagtatgcaattcttattctttccattccctttctgttacattcctatattactattgatcctgcaaccattttcaaatcaacacaaatagctatttaaggctgtctctgtgctcgaattcatctagagtaaatcattttgatacttccgtgatgaagaattcccaggaaaatattgggtatacacaagtgtatattcaggacatattcaaggctatacatagagtttgttcaacttcattcacctgccatgaaatgggctacatattaacttcttattagtttcttattgtaaatcaccttcccctcaattccttttaaagccgtgctgaattcaacatcattgaaggttaacatggagtagtaatctaagtacttcaagaaatttcttatatctaatctaatagcactttggcagaacagagatgacaaggaacgtgaagtatgactacttctttaagggtataaattgtgatttctatctccttgttgatgttccagaatctatttagtctatttatctgtatttttttcaagggacagagaaacaactcaaaaaataagaaaaaagtatatactttatttagcatatgttgtaatcagaataggctatgaaggaaaacgtttaattcaggtaatagtcttcttagaaacattgtaaagtcctacttttttttttttttttttgacagagtcttgctctgtcgcccaggctggagtgcagtggcacaatcttggctcactgcaacctccgcctcctgggttcaagtgattctcctgcctcagcctcctgagaagctgggactacaggcgcctgccaccacactcagctaattttttgtatttttagtagagactgggtttcactgtgttagccaggatggtctctatctcctgacctcgtgaaccacccacctctgcctcccaaagtgctaggattacaggcgtgagccaccgcgcccagccataaagtcctactattttgaagaatgtttctgtcttgttcaatcttaaaacatgaaacaataaaatgaggccacggaagaactttagaaggtcataatcaaattgtcttatagtgtgtaaaaatatggtctataagttttttatgaacaagattgtgccttataaattttttacactctgccttttcctatactagtgccatgtatctagctttaataaatggatacttcgggtataatttcattggccttatatttaatgttcacttagttatatttaagagatcaaatctcacctcaaacaacttttaatagagtgttttaattctattgtcaaattggtgttcatcgtatttgatattacctaaaatatctagacaattaaacagggtgggatatgttttttataagggaactctcattaaaatggtatttgctgggatgagatttaaatagcaggtaaaatattagtttctactaataagagaaaagaactttccaactgactttaactcaatgcttcccaaactttaatgtgtatataaatcacttgagtgtcttgttggaatgcagattttcattcagtaggtattgggtggggcccaagtttctgtatttctaatggaagaagctctgagggacaaggtcctagaaaacctgcaccatttataattgtaccatgcctaattttattcctctgcttgatgagccccaacgtatcttcaatgttttaaaaattaatacaataaaactgcagtgagaaaagataaataaatcatttggttctatgtattagtttctatttgtgcaaaaaagcaaaaatacaagttattccagcagttaccacatctggaaatatcagacatggatttcattgaaatcctccctaagacataaattacatattcatttgaaaacgtactgactcattttgccttaacttgacttcttcagtgatgcaccaattttttttccttttgggtattgtcaatactatataatgattagtggagaaaatctatagatttttattgggtatttaggtgttgcccctattgttttgtaagcataattaattttctgatgaacttttgtttataaaagtctttgaaaacatttctgattatttttgattgataatttcaattaatcattcagtcaaacattcctgattgatagtttcagttacatattgcaaaattattagtaaagctactactagggttgccattataataatctgaacatggcccatgtatagaaaacatgtaagtgctttggaagcatctaagaaacaatatttaggctctgaaagagtttacaacccatttcaagccacgagacacagaaatataaaagaacactaatggcataagacttcgtgatctttggttaaatgagaattacagatattaggttcaccaaaatgtcagtcacacacagcatgggaggtgggtctggggatggagaggcttcagactggcagaggttgagaaagacaattgacaaggaagctcctcccagtgaagagccgagggcttccagcatgagacttaggtgtctgctaggcagggagtcttcccagctcctgcctagtgggatttgatcataaccgtaatccggtacctgtgttgtgtttcccgcacctcctttctccaaatgggagtttttattgcactgatgatgtttccactccactgacgtgtgctgggtgcaattttgtggacctgtaaggagcgaataactgaactgtaagagaggaccaagcatcacctaggcctccacctcatgagctgtataactgggtagaaatttggaactgtttttcttggagaggtagaaagtatattctatgtgtgagaagaaagtgtccataaatatttagattatagctataatgtaccatcagaagactgttctccttcttctcttgttcctgagtgagagcactcccaaatattatctaggtacgttgctgtggaaacaaaagatgtatcattctagcttgaactatatacatctatacttttatacaaggaagaaattgatatctatcacataagaaatctggtgaccctgtagcttacaatccaaaacaattgtatataggatattttcaaggcccgtttcagcaattctaagttgaagtgtcatgaaaagcagttcaaaagtcgtatgcctatcatttctggtcttcacattacctctttgagatacgttatttactagcctcattttccaaatgaggaaattgaggcttaaagtggttaaatgtcctactcagggtcacgtaggtaatcattcaggcagggctcgaatccatgtctggatcaccattcttttcttttagccctatagcctctgattttaagtttatcctgagttcatgctaaggcaatttcatttaaaaggtgtgctttaaaatactaagtagaatatgtgccacttgaattttcattgtttttaacctttaaaaataagacccatgttttgttgccattagatttatgccattagagtggggaaagggtcggtaggggatggaagaaaaagaaaagttaattatttttagtgcctggccattttccccacaattagttttataagctgctgcagggcacctatgtctacttaaagaattaaatccccagggaccatcgatgggtggctgcagttattgctagctttatatcttcaaacataattaatccgtaaggttgaactctttcctctgaaccaggactcgcttacagaaacgcagcttcctccccctttcaaggctgcttgtcatgtgttcccctgctctcagttgagcccatgagtgtgtctcattggccagtcatcatggccactgatccacttagctcctggtgtttcatgaactttctgaatactctgcctgggaattcccatagggagcccaggatgcttggagtctgtcaccaaaccctttccagggaaaacggtatgagaagaggaatggctgaacatcctgggggctgacaaggcttccaccttgacagagctcagccgagcttcaacaatcctcctctctgttgagtgtggtttctgtgttttgagtctagtgtctgtagtttggactcaaattctcaaacttcctgaaatgcatctgcctctttgtggctacttcccgttaccatttcttcctccattcatttcaattaaaggatgtggggttaaaaatgagaagattattaaaatacatttcctctagaaaattatttgtccccaaatattcgttttatgctagttggaaacaatatatttcctggcttcctaaaaggattggaagctgtcttggaattagaactctgagctcttcaggaaaaaagaagtttaaattaaaagtatgggacggggcacggtggctcatgcctgtaatcctagcactttgggaggccaaggcgggcagatcatgaggtcaggagatcaagaccatcctggctaacacagtgaaaccctgtctctactaaaaaaatacaaaaaattagctgggcgtggtggtgggcgcctgtagtcccagctacttgggaggctgaggcaggaggatggcatgaaccagggaggtggagcttgccgagagccgagattgagccactgcactccagcctgggccacagagcaaaactccatctcaaaaaaaaaaaaaatatatggtgtcccatctcacacctattaggatgactactctgaaaagcataaaataacaagacttggcaaggctatagggaaactggaagactgtgcactgctggtgggaatgtaaaatcgggcagcactgatggaaaacagtataccagttcctcaaacaaccggagcagtttctctattaaaaatagaatggtcatacgatccaacaatttcacttatggctatatatagaaaagaattgaaaacagggtcttgaagagatatttgttcacccatgttcataacagcgttatgaacaatagtcagaaggtggaagtgccatcaacagatgaattaacaaatgggacatacatatgtatatatttatgtattcagccttaaagtggaaggaaattctgacacatgctacaacatgaatgaaccttgaggccatcatgctacgtaaaataagacagtcacaaaagacaaatattggatggttccactaaataaggtaccaggtagtcaaattcacagatttagaaagtacaatggtggtttccagggcctgggaggagaagggaatagggagtttttatttaatgtgtacagaattttagttttgcaagatgaaaaagttctggcgattggtttcgcaacaatatgagtgtaattaataccactgaactgtgttcttaaaaatgtttaaaatggcccgggcgcggtggctcactcctgtaatgccagcactttgggaggcccaggcgggcaaatcacgaggtcaggagttggagaccagcctggccaacatggtgaaatcccttctctactaaaaatacaaaaacttagctgagcgtggtggcgcgtgcctgtaatcctagatactccggaggctgaggcaggagaatcacttgagccggggaggcagaggttgcagtgagcagaggcccaatgcactccagcccgggtgacagagtgagactccgtctcaagaaaaaaaaaaaaaagtttaaaataatcagctttatgttatgtgtattttgcctcaaataaacattttttaagtgtgctgctattttcagtattacgtatttcttgccaatggctgggatcctgtattaccagagacggagcagatgtggtctggagcacacctgaaaacaggtggaggttttataaatctgccaacatgtgcgagcagaaacaagtgccctgccaattcataaccaccgcatgttgtcagatgttatgagtgcttcagagagagagaaaagcgtgcaagtaagtgctccgtgaggagtggagggacagctataatgagtccatggaggcccccagagccgaaagaatgaaccgtgcgctggacctcagggggaagactcatcacagtgctgcgatgagcaacccttcctgatgtcgcgatgtcctctttcatcacaaagcatggaatgaattttttaataacttttattatagtttcagaggtacatgttcaggtttgttatatctataaatagcgtgttgcaggtatacagatgatttcatcacccaggtaataagtatagtacccgatgagtgttttttacatcctcgccctcctcccaccctcaccctcaagtaggccccggtgtcccgttattcccttcttagtgtccgtgtgtactcagtgtttaactcccacttacaagtgagaacaacaaagcatggaatgaatttttattcgtagtagtctgagtaaagtgcagttgaaggatcttggaatcattcaggcttgcttcatattttgttaccattggatatttgagtctcattgtttcttcattataaacctggattctcagtttaaaaacactagtgttggccgggcgcagtggctcacgcctgtaatcccagcactttgggaagccaaggcgggcagatcacgaggtcaggagatcgagaccatcctggctaacacggtgaaaccccgtctctactaaaaatacaaaaagttagccgggcgtggtggcgggcgcctgtaatctcagctactcgggaggctgaggcaggagaatggtgtgaacccgggaggcggagctcgcagtgagcggagatcgcaccactgcactccagcctgggcgacagagcgagactccgtctcaaaaaaacaaaaaagaaaaaaacaacaacaactagtgttatttctgaaccatatacattcatttattgcttcattcagaaggtaaagttcaaaatgtttgttaatagccagtagagaacaaaaataactctctgctatgtatgacctaagatacactttaggtaaataaaagtgcacttttgttgcctttgttaccctcttattctgtgttcttatttcctaaagtggggcactaaaatcatggatgttgagattcaagcagcagtgatttttctctgaaaattccagaatttgtttgtatatctacagtttcttacctttctctcttttttaaaagcagtaacttttccatctgttaatctctgctcctaccataaccgtgatcacctacttactcttagtgtatttaattcagttaaaaaaacttacctttaaaaccttccgtaccctaagcactgccataaacgcaaggtgacaagacatacaccctttttggaaggcgttagaataaaaatgggcagcaaaacaagcacgtaaactaaaaatagcagaaattcaaattatgactacaaatatcattgttgtggaggcatagggaaaactgaatctaagaaggagaaatcatagacatttcccggcgatggtgactttggaactagacctagatgatgccaaggatattaacaaccagcgacaacaaagagataggaagaaacgtgaatgaagtgtgctgggaaatggcttcagggtattggtgaatattaactataaggaatatcaggcctgaaggaaagaatgatgaagaaccaatgcttacgacaaaacttaattatcataaattagcatgaaggttcagatgataggccatggatgtaatgtaattatgcatcctgaacagctggtatcctgtgtgacccctgtaatattttggaatgattgaggtatctggaaggaatacagtgacatgcacatattatgggattgcagttggagttgggggctggtgttatcctaagaggtatcagagagtctatgaagctctgcctgtcctatttcttggatcttcattgccaaggagtgggtaaagctcacctggtacatatacccccaattcttgatttggggactccagaaaagtcatagctactgaaaagcctcctggtaaaacgaggaatagcaacaccaaagggattgagattttatggtaaaccccaaataatctagcagagccaaggtttttgtctgggagaaagaaaaggggaccaggttgctgaagacctcaggggtgcttttctgggactcagggcttttctccaggaaatgggggagtagggagtaggatgaggagggtggcgtagagaacatgagcttccccaaggaaactctggcagctgtcacaatgtgcagagaagagaaattagaggtagggagactgcccttggcataataattgaagtaaggatgtgttctgtggacagaaatgctggccatgaaacagcaatgcagacagaccaggttccaaagtgggagtgtgggccccaagggtctgatgtgtctctactggggactgatcatctcttggggacctatcttcagctatcttttgggaaatagaatctgtgagttcttaagtatttaacataaaatcttctaaaaactgtcctttctttttcatatacttgcgtcctcaccccacccatcaacattattagattttattaggaagtgaaagctcagacatcgagtcatttaccaaatacatttgtatacattatcagtagaatcgggcctaggatcaaagataaacagaagatgttccaaatgcatgaaagagaaaagcttcatctttacctttttatttccaaataagcagtacattgggatgtgctgctctgtaattgtgtcattgtatacttctcaagcgaagagatatttctatggagagatttaagacagtcaggaggagtacccatccccaccacccactgaaagagagggtttctgtgacaccttgctctgtccaagctagcacatggccttagtgtagacagagtagttcctggagagcaggtgcaatagtatcagtttctttgtactgtgagtatcaagatgcaatcctgggaaacaaacattgagtaaattaaataattgttggatgctgtgtagtatcctagaattgcagtgccagaaaggatgtgaacttcaagtacaaatttctcatctcacatatgaatcctttcaacagtatctagtttctttagaaaaaaaaaaagagagagagagatgccaggtgcggtggctcacatctgtaatcccagcactttgggaggccaaggtgggcggatcacgaggtcaagagatcaagaccatcctggccaacatggttaaatcccgtccctactacaaatacaaaaattagctggcatggtggtgcgcacctgtggttccagctacttgagaggctgaggcagaagaattgcttgaacccgggaggcggaggttgcagtgagccgagattgcgccactgtactccagcctggcgacggagtgagactctgtctcaaaaaaaaaaaaaaaaaaaaaaaaaaaaagagagagagagagagaaatcttaggttttatagtatttgcatagcttgattaaaaaacgttcctgtaggagacaacaatctgctactggttagcttctgctcatttttttaggtctatacattgctaatacaaaatctaagtcttattattcagtgttagtgtaggaatgtgcaaaatcagtttggaatcagttatgttatcagtggcaaggtatgtaatgtctatatgatatgaagcatttagttcgctttaccaacagctacagaaaattacaattaaaattctgtatgggacaaaacaagtatttttaaactgagagttgatgaggttagttctagcatatgtgccaggcgtggagcaaggagaaggactcagcggctggaagagctgtcacttagattaacccaagagactatctagcttgtctgattttacatcgaaaagctttcagttctgtgtactttatacaagaaatttacattttaatctagggctgcaaaaacattttcagaaagttctaccattctaagtggggcataacttttttcactcaggaaattgttatttaaaatgctaactccaaaaataaatctgtctggaacttaagataaaaagattttataataagaacaagttatgacataacttatttatttctgataaaaatgaagaaagttagtttaatatctatttagcttactttaaaatctgtgttcatcaatacactaatattacacttgcattgtgatagaaaacagcattcaccctgagagattttacaagtggaaggcatgcagcctttgaagattctataactgaagaatgtaagataaaaatgaaaggaaattcacatataaaagtgcaaacaggctgggtgcaattgttcacacctgtaatcccagcacttttggagactaacttgggaggatcacttgagctcaggagttcgagaccagcctgggcaacataatgagactttgtctctacaagtaattaaaaaaataatagttgggtatggtggcatacccttgtgttcctagcgacttgggaggccaaggcaggaggatcatgtgagcccaggcactcaaggctgcagtgggctgtgatcatgctgctgcactccagcctgggtgacagagcgagaccccatttcaaaaacaaaaaataaataaaagatgcaaacagtagaaaggtatgaaactcacttaacctataaagttttatgcatttagtagagtcttttcttagaaaaattgcccatcaaaatgaatttctaaatgagtcatattttacacagttttccattatataatcagacacattctgattagtagaaatcagcataaaaattaaacatttcaaaatgtaacagactcaaagtcatatttcaaagaaaatgattagttactatgctttgaaaaaatcaaattgctcataaatggtatttgatagaaatatatcttacagaaattttactgtatatttgactttcatggctaaactgtagaactagcccaataatgtcaacactagctgagtacaactaatgctgaacctagccaaaaacaaaatatttgctcatttagctggactagtaacatgttaccacatacttggcatttctataatacagggttttaatagggctgattaataattaaaacatttctaatagatgtgcaagaatttagtattaactggatttttgaactgatgtaaagatcttctggttaatgttgatgtcaattttatacatacacatatgattactgaatgtatatattatatgcatattatacatacatgtccacatatattctttaaatatgtaattacgtatacagaagggtaattgaaatatctacaatagaacggatcaacctaggaatagctcacgaatgtatcaaaaacaaagtacttttattcaatgttggagacatatagcttattgcatcttttaagcatttttctttgttttttaacaggttgtttggtatcaagtcagtaattcaaacggactgttcaagtacttggaagatcatagtgaacccggacctgtcgtggtaccaccacgccaaccctatcctcctgctggtgatgtactacactctggccactctgatccgcatctggctgcaagagccccttgtaaggacaaaaacattttcatgatcttgtctgcaaagtaacctagaatctccacgtgaaatgattcactcctgttctctactgactaatcgatactctattccaacacaactctagtgttctgggtatgatgttttaattctgcaaagagtattaagtgaatataaatactatcagatcaaagactagcttccctttactaccacaaactgctggtaagaatggcaggcagtgagaagaacagaagactcatttttgctgatcacttactgtaatatgccatgtcatacattatctcatttaataaactaaacaactctgatcaatagaataggtattatacccatttacagatgaggaaaatgaggttagagatgtcagtttttctaaaatcacacatttactggatggtacaaatcagattctaatccacatttgacaacaaagctcagttctcagagacacacacccctgttatcaagaggactggtgtttcccaaatctcctccagcgctcttagcctgtgaagatggagtgatagcccagctcttggtggtgcctgttgcctcctgagtatccccttgtgagggatggggattcgaatattcttccagcacaactgagggtgtttattccctatgaaaatatgaacaaggacacagcatttctgaggggaggactgaagcctgggtggcttctcttctctcttttctccttcagtgacagaaaatatcagcctgcttttctttcccctaaatgactgtcaggagcccggttgcaaggttgcttattgacacatgaaggagacaagctgtgtagacagggtggccgcaccttttcaggccccacctgcggggaaccctacagctggggacagttctcatgagcatggcccagcctgagtctctgcattccagtccccctcctccgaatcacttctagcctgaggccctgcagaagttccctactttctctgtctgtctttgtacccacagaccattcccacatgttcatcagtcagccagtcaatgagtatttatggaaggccaactggatctgaaactaacctaggggccagcatagagcaatgacttcagtaggcagggccccacttagagagctgtacattctaaaagagaaaaatggtccaagagaagcaaacaggttgtaaatcagatagtgactgtaaaactgcaggaggcgcatggctccggtcatccctgacagaagcgccacctgcagaaatgaggatggtgctgtcttcctcctatgtgctacctcccccccatctcagtggctaacagccatctgtgggattagggtctcagaggccatccttgttagcagggttctcatggatcatctttcttttaggccactgatgacagttgtatagtaacaaaatgatttatgggtggtaaggaatcccagtcatgttgtgttatatttttcttcagttctcttctaaaatttgactgtgccagtagaatcattaaaattgtgtccaattcctccacaaacatgcatatgtatatgtatatattcacaaataaaaacatgtacataaaaaattaaatatacatatatatttttttgagatggagtttcactcttgttgcccaggctggagtgcaatggcatgatctcgggtcaccacaacctctgcctcctgggttcaagcaattctcctgcctcagcctcctgagtagctgggattacaggtgcccgacaccacgcctggctaatttttttgtatttttagtagagacggggtttcgccatgttggccaggctggtctggaactcctgagctcaggtaattcactcgccttggcctcccagagtgctgggattacaggcatgagccaccacgatgggaactatttctgaacaaactcttatacattatggaaattactttaaggctttctagttattaagatttcccagcccatttgctttctctgggatatcccatgtcatctcttggataatgcagtagcttgatgagggctccgttataactttgggtccatgcgatattctgcttccactgccatgtgctgtctggcaagcaaaggtagcagagagagagccgggaagaccttctaggctataggccacacagcaacagcaatgttataaatcacgaggtctgcaggggtatgtagagaagtgggcttcaaactatcatcaacatttcatgtgggctctatttcaaatgggctgggacggaaggcctgttgcattgagtcaatgagaaaaagaagctgattatatcatagttccaggtgacctggtgcatttaatgaaaaataccggccaccaaatgtgagtgctgaagtagacatctatgaaacatgtttgaaaaagagagagagaaaagtcagtgtcgagacttcagtgtaatatgtggcccccacctggcaaatgtaacgcccctcccagggagttagggtgccctgcttaggagttctactctggtgcactgggacccagacaatgagactaagtccactccactccagtatcagtgatgcctgactgcccttttcactaggacacttttgttgggaaaacatgctaaggcaccgaagcgcttctgttcctcgtattcctctctatcacctttcctagaccagttgtctaatttaggcaaatgtctcatgtgcatagatacgctcttgcttagtgctgtgtgagctctagatgattctgccttcaatacatccagtcttaattgaagattgccggcagctggcttacacggttaaccgcgcacctttgtgaaggctcttggctaagagccatgtgcatctctgcttttgagtgcagttgagaatgcacgtggaaaagctgtggatatttaacaatggagcatattctgtaatgcatggggcttagtagaatcaggggacatttaatactggtgtacttacaattacagggtggtatttttgtcattttttaaagtgtcttgataaaatcctgtatattgtaaacattcactttgaaaagtcatcatactgagccaaaatgaaaagctctgtcttggccacccaggctgtctagggaactgcctcaggaagcaagactgatcctgtttctgtgtttcaggtgcaggatgaggggaccaaagaagaggacaaagccctggcttgtagccccatccaaataacagcggggaggaggcggagcctgtggtacgcaacccattaccccactgatgagagaaaagtaagccatgatgaaagggatttccgttccctaatttttctgtttttgtattttactgttgaatatgagccttataatatcatatatatcatatcatattcaggttgcttgtagtttatagaaacagtgatttaggagagttagtaccagagagggaaaactatttccaaagaaaatacccagatcccgtcaagaacatcattttatatttccgtgctttctactgaaatctcctaatcttaaaaagaatgttcctattaaaaaataattttgtaattaaaacaaacaaaagtagcaaagcaatctgttagcactggagggtgaaaatttcagtgctgaactatattgcagaaaataattttactctgtcgggtatttggttgatttgggtatttggcagacaattacttgaaaataaatgaagtgagctcatcactttgaggcaaacaacggacaataattgttaccagtgataaaatttaagcatttgagtaaaaattagaatttttgaaaattcatatctactgagggcttaaaaactttccaatatttgtggacttttctgatgagatgaggtgatattgacaaatgtgctttttactcatggcatactgaaacttgtcagtatttggtagagttcgatacctgtaactcactgaaacagcagtttccgactcaccaacacctgacatgacagcacgtggataaatgatccagtcggggtgcatgatatgccaatgggttttaatgtagcagagtatgtatgaaaagttcactgatatggttgcagattctgcactacaactgacattcaagactacactggttgagtctgatcgagtagcaaagactgtccacagttatttagacagattattaaaataccttttttttttttttttggcaacagagtctcgctctgtcacccaggctggagtgcagtggtgtgatcttggctcactgcaacctctgcctcctgggttcaagcgattctcctgaatcagcctcccaagtagctgggactacaggcatgtgccaccacgcctggctaatttttttgaatttttagtagagatgtggttttgccatgttgccctggctggtcttgaactcctgagcttaggcaatccgcctgcctcggtcttccaaagtgctagggttacaggcataagtcactgcgcccggcactaaaatacttctttttgaccaaattgcatacctatgtgaagccagattttctttatctacttcaaccggaacaccacatcacaacagattgaatacggaagcagatgtgaaaatccggttgtcttttattaagctagacattaaatagatatgcaaaattataaaacaatgacactctcttcactatttgttttaaaaaataactatttaaattatttatactaacacacaatgggtttttttaaatttttaatgaataaatacataagtaaataagtattttaagactacctggtctaatttctcgtatggtagataattgatagatagaacccacataaattaagtctctttgggaccctcagtgatttttaagaatgcaaatgagtactgacctaaaattgtggtagaaccacttgctgtgctaattattatttgggggaagcccaaatcacctggtagtaatgtattactagttaaaaagtagagtcatataataatcattttgttgtagacagtatgcaaatcttaaaataatctctaaccacattacaaatcaatttttcttttcttttctttctttttttttttttttttttttgagacggagtctcgctctgtcgcccaggctggagtgcagtggcgggatctcggctcactgcaagctccgcctcccgggttcacgccattctcctgcctcagcctcccaagtatctgggactacaagcacccaccacgacgcccggctaattttttgtatttttagtagagatggggtttcactgtgttagccaggatggtctcgatcccctggcctcgtgatctgcctgccttggactctcaaagtgctgggattacaggcgtgagctaccgcgccgagcccaatttttctttattatgaaaattctatttcttgaaacataaatacattcagaattctgcagatgtctcaaacgggtacaaaactaagcgcttattcttgtagaacataacccttgaaaaacatggtaacatttatagacttgcttatctgctgtataactaaacattaacatcaagagctgtgaaatagttgtcataaacagcagcatccagctcatttatttgtccttttatattttgcatggcaatattaatatactagcaatcagcaagttaaagagaatgggcttgtgcacagtaaaactttatagatacataaacagtaaaatgctttcagcttccttactaacatgctttcccgcattgctttttgcagcttttatccatgacccaggatgactacaaaccatctgatgttagtatacccttagaattatcatttatgcatgtgtaagtgatgtaaaggcaacaaatggaagtagctcctttgagtctattttaatgatctattaaaatttccataagcttttccatttttgggcataaattatatctggtagattgctgttaaatgaaattgagtataatcatacaaaatatatttaaattttaagaagctttgtgggctttttaaaaagtgttttgttctgtagctatgcctaattcgtaagtaggaagttttgcatgcccatgggcgcacatacacctgtgtattggtgggtgttatgtttatctcaaaaattgtaaagccaaagagacagaaggatgaaacaagcaattgtacttagtggtgtagtaaggacatagcaacctgcagtcaggcagagatccccagagggtgatgccttagctgagatccaagggatgtttgcattagtcctgtgcagagccacatagggcataggcaggacaatgttggaccacagcccaagaaaggtctagagtcccatatagatggagggatggctgagaggtggacagtagcaaaggctgaggctggaaagatcagaccaaatcttgaaggcctccttcagccatttacaagagtttgctcttcatactgaggacagcaggtgcgaagcatggtttcaggcaaagtgcaacaagatcagatgcacattttcctgcgatcactctgtggagactagagttggagagggaatgtacaagattccccttactaaaatatttgggcaattggctaagttattcagcttgtaatcaactcctcactgttcagttagggtggaggaagggaagtgggggtatgtctgcattgaaaacccagagctgctgtaacagttgtccctttctctgcactcccggcagggcctgctggtgactgtgaacggcaaccccgtggattaccacaccatccacccaagcctgcccatggagaacggccctggcaaagccgacctctactccacccctcagtaccggtgggagccctctgatgaatcctcaggtaggagccagccctgcactcagggtcgcatttcttcctcatttagaagcttggcctctctctttttgttgttgttgcttattttatttttttaaaaactgtatccatgtcagtgtcattaacctcacttctttaagttctgcctgcattttgccccagcatattgctagttgtgttctatccttgtatacaaagtaagtgacataattgaggcaaacttttaaaataaaaggtgaaaatagtattttaaacatgtcaacttaggtatagcatctatacatatgttggtctttcttttagttgatattgtaattatggtcagtggttttcctggttaatatatgaattttttttttttttttttgagacagagtctcgctctgtctcccaggctggagtgcaatggcacgatctcagctcactgcaacctttgcctcccgggttcacgccattctcctgcctcagcctccctagtagttgggactacaggtgcccaccaccacgcctggctaattttttgtattttagtagagactgggtttcactgttttgcccagactggtctcaaactcctgagctcaggcaatccacctgccttggcctaccaaactgctaggactacaggggtgggccaccgcacccggctgagtgttttttaagagtccttttttttgtccattttttaaaaaacgaggttgtcttaacttttgcaaggctttttgtctcccttttctttcagttgtttatgttgaaggagaccactattactaaagatgacaaattggtgacttggggctgagtttcactctcagatttgatttttggtctgcgcagcatttaaaacaaattcaaatagccatcatttaaaaagctgcacctctgacctagaaatggacacttctggaatcccttgaagactgtgaaggtctggcaacactagtccctcacctctacaaaacagcagttagatggacctctattgtcattgcccctgcaagggaccaattgcctgtcaccaatccataaagacagaattacaaagcgactataaaactagagtggatttgcatctctatttgtatgtaattacagccagagttcttagaccttgtcgtgcctttagtgagtggccacagctctccaatttgcatctgtggtacatcacacatactccaagggccttttcgcataactctttatcaggtttattctcatgtctgttcttcataattctgtatcagtacttcctggagttgccccacagggcttcttaatacttaactgtacaactggttagtcatattatctgacattccgcagtaaggttaaatcaaggtcagccaccacccccaccccaccctcacacccaacccatgatgacacctgagagctgcatagcttcaaactctactgtttcgttccctgtttctgcttcctgcatgtatgtgttttagtttgcagctcaggcttaaactggaaagttcaaggaaacacagtgctttccagtgtgctcttcagagcatgagcaccagaagcaaacacacagggcccaagagtcagcatctgtggcttctgacgtttgagctgttggggtcacagcctagacaaccttctacttacccattactttcatgtggacaagtaaattgaattttgcgtgctgacacggacaacccagacatactgaaatcataaactgggctttcaaaagtgaaacaaaagctggaaagattttaaaaattaaatctatatacacaaaaagtgttaaccagagaagcagcatggcagtaactctaaaatccatcagatttggtgttttcacccctgtctatgatcccagggactttttgtataaactgcaggctcatccagtcctactgcaggaagaatgagagccagtgggcttctgccaaggacacaccatcgtctcattgcagagcccatgtggagtagtatgcacagtcactgatttttcagtcatttatacctctttatgctgctaagaaactttctcctgtaacccacctatacatagcccatttgatttgaacaagaaaggcagaaagggcagtctacttagtggcttagaacagcacttagtatgacacactttctctggaccaggaacctggccatcactaggctggttcctctggctcaaggttgctcatgagattgcagtcaagctgctatctcagctgaaggcttgtcggagagggggagaatctgctcccaggctcactgtgtagctattggctggcctcaggctcttgctgacatctggctggcagagccatcagttctcacacctggggctccccatagggctgtttacagcatggtagctggcttgtctgaggacaagcaggtgagagaataagagagagcactcaagatgaaaaccacagtctttttaaacagaatcttgaaagtgacccttcatcccctctagagtgccctatttgtgttagaagaagcttgtcacaggtcccacccacactcgaggagagggcccacacaacagcatgaacaccaggaggtgggggctctgatgacaggtttagaggcttcattccgtatcttcttacatggaaattttcctttctcaattatcacatgctagatcccattacactgaccatgcagaacttactgattctgtttgaattttaagggctttatgaatgggaaacaatttctgaaatcttaaataaaaggctataccaaaaccatacatgtgctgcattgcttggaacatttatacaaatgtcacatgtttgcataaatagttaaataaagtattcgtccatctagaaaagcgagaggaggaagaggaagagaaagaagaatttgaagaagaaaggagccgtgaggaaaaaagaagtatcaaagttcatgccatggtctccgtattccaatttattatgaaacaaagttacatctgtgccctcatagctatgatggtatgtatgatatgatgataggtataatatgatatgtataatatgatatgatggtatgtgtgccatgacggtatgtataatatgatggtacatatataatggtatataagatatgatggtatgtatgatatgacatgatagtacatatatgatggtatgtaagatatgatatgatggtatgtatgatatgatggtaggtataatatgatgatatgtataatatgatatgatggtatgtgtgctatgatggtatgtataatatgatggtacatatataatggtatataagatatgatggtatgtatgatatgacatgatagtacatatatgatggtatgtaagatatgatatgatggtatgtatgctatgacggtatgtataatatgatggtacatatataatggtatataagatatgatggtatgtatgatatgacatgatagtacatatatgatggtatgtaagatatgatatgatggtatgtatgatatgatggtgtgtacaatatctgatggtatgtatgatatgatatgacggtatgtatgatatgacagtatgtatgatatgatggtatgtatgagtggcggctgccagggtgctggagaaaggagaccacagtcccactggctctaagtgctgctatcttctcagggctagcagaagtatagggatccccctaatgccttggcagagaacggtcagctgcgttaatttttcatgggatatttatactacagattgtaaaattgtgtccttttcaattctatttatcctccttttaagtattaatacatttcttccaaattagcttgtcaagtcagactatctcttattttgccaatttgagaggacatattagtttttttaaatgacattgaaggtcttcaaggttaacataggctacttttattcgtttcagatagtgagagttatattcacatcttatcttagatttgggtgagacgtaattccttcttagctgcaataactttttttttttttttgagatggagtcttgctctgttgcccaggctggagtgaagtggcacaatctcagctcactgcaagctccacctctcgggttcacgccattctcctgcctcagcctcccgagtagctgggactacaggcgcctgccaccacgcccggctaattttttttttttttatttttagtagagacggggtttcaccgtgttagccaggatggtctcgatctcctggcctcatgatccgcccgcctcggcctcccaaagtcctgggattacaggcatgagtcaccaagcccggccagcagcaataatgttttaccaatatgagcatcaagcaaccgtggttccctagagcaccttccaattgtgagctctcagtttatgtgtgtttctactcaccatctgcaacatcacaccttcaaaacagacccttggcccatagatagaagataaaagaagctataatctctccttttcccaaaaacaaattttcttaggaaatttgatttatttttgagaaacctaatattcttgtttaaaatacaactcttccaaattctgtggtcaacagtgagatcctatggacacctttgatgataaaaataaaaatattctttaactcaagggacacagaacctaggcacggtttccccaggcactcagtccaggtgcttctcagatgaacctgtgtatgctcaacttcagtttccagtaaggaacacagccacatgtgagaggagactgggaaaaagaaagcaccacaaaattgaagaggctaatttggggattgccagctctattcttcaaataaaattagttctgtgttctttggttactttttgacattttctgtacatcaactgctactttaaactgcagcaaatctctcattctgagctcacaggagtataccatttttttttctctctaagccagataagtttggtcttttctttaaagcaatagagctgaataaaataaaataaaataaaataaaataaaataaaataaaataaaataaaataaaataataaaataaaataaaataaaataaaataaaataaaatatttgaatacacattttgctacttaactgaaaaaagtctattgtaaaaacaacacaatccttcattaaaaatgtgcccttgtccggtaccattctgctgtgttaatggagctacaatgttaaagctttaaaacctcctgccttccaagccaccactccacggcttggggtctccatcactccaccacaactctctactctccctggtttgaatattatgaccttttctttttagatagtttttaccttaccagggcgggggggactgagcattgtattgaccatggtcgtgtttccttttctgtcctccggaggcctggagcatcacctatcacagctggctgaccttcgtgctgctgatctggtcgtgcactctttggatgattcgcaacagaagaaaatatgccatgatcagctctcccttcatggtggtttatggaaacctattgttgatattacagtatatatggagttttgaacttcctgaaattaaaaaagttccaggatttttagaaaagaaagagccaggagaacttgcttccaaagtaagtgaatagaatacaataaaacaaaacaatgacacaaaaccacaatcatcatcataatcgtatccaagagaaaccttataaaaacaggttccaaatattcactgctttgtaaaaatgaacaaacatgagactgtaagaaacagtttgcggtgcttagaggcctctataatttaaacatgaacatatattacaccatgatttagcttttacttaggaatgacaatgttttccactcaaagaaaacttgtataaatgtttttaagtataaatcctactagagtaaaaattaggtgtgaaaataggaaaatacagtgcaaaatgtgttaagggattataggactgtctttgattatcattttataaaacatgcttagtgcattagtgtcacagataagtattgattattcatgacgtttttctccaattctttcctaaagaacatttttagcagcaaaaatgaagtatgacacttgctgtttttcttctactgattatatgatatgttcttatctgagttagaatgttcatactcttctcattacttatttgctttcatgggccattttaacagttttatttcaaaagattaggtttcccaacttactgtttgttttgttaacagaatggcagactaaacacacattccctttgtgttaataatttagttttaagacagtaaaaataaacgtgtttatattgaatgggtcttggaaattagtgtctttggaggagatggtcatttcatgaattacatgaaattcacctttcctgggagcaagtgcccgctttaagggttgccacacaccccatatccaaggcaagcaggtgtaaatggggtagagtagactagggcaaagtttggtcttcgtaacagatttttgggtgaagagctactggggtaaatgaaacacaatccaacaggtgaattctagtgacagaggtgagaatataacccctgtgttcatggaccaagggaatgtcattcattgattcattcatcccaaactcctatgcctgcttctccatgctgaaaatcccacgttatactctcacttacaaggcaccttcatctaacactcttttcttttactctctctccctctttcctcttaaacacagacccacacacacatattcacacacaattggtaacttagtcttattctattttaaaaaatcaaaattattttcttttgactgtgtaaattcatcacagtctcactccgaatagcaatgaaactgctaaaattgcatgccaagtcactagttgaattgtctcctgtcgaatctaaaattaacagttctttaggaggaaaacattatttgggaaataaatttgttactcgtggaaaaaaagagttactccgggaacctaggttctgcacttatattttaatgcacccaggaactcagaaaaagtgcaaggttttgtcatagaagatagtaatacatctccaggcttataacatttctattacaataacatttgtaaagcacattttttttttttgagacggagttttgctctgtatcccaggctggagggcagtggcgcaatctcggctcactgcaagctccgcctcccgggttcacgccattctcctgcctcagcctcccgagtagctgggactacaggcgcccactaccacgcccagctaatttttttgtattttttttagcagagacgggatttcaccatgttagccaggatggtctcgatctcctgatctcatgatccacctgcctcggcctcccaaagtgctgggattacaggcgtgagccatagtgcccagccagaatggctataatttttaaaaaggcagataataaccagtgctactgaggacatggagaagttgaaatggtcacacactgctggtgggaatgtaaaatggtgcagcaactttggaaaacaaagtgccaattcctcaaaattttaaacataaaatttccataagaccagcaattccagtcctaggttcatttacccaggaggattgaaaccatctgtccacacaaaaacttgtatgtgaatgttcatagcagcattatccatcatagctaaaatatagaaatgatccaaatgcctattaactaatgaaaggataaaatgttgcatggccatacaatggagtattattgggtgtttaaaagggataaagaactgtgcatgctaccagtggatcaacctagaaaacattatgctaagtaaaaacaatccatttatgaaaggctacatattatataatttcattcatataaaatttccagattaggcaaatctatagagacaaaaagtaaattcgtggttggctagggctgagatagggagaaaaggaagcaactgtcgtggggcttcttacacagggttgatgaaaatgttgcaaaatggattgcagtgatggttgcacaactccgtgaatatactaaaaaccactgaattagacaatttaaatgggtgaattgcatggtatgtgaattatatatcaataaagctatttttaaaaacctactctgtgtgaccaggcatggtggcttatgcctgtaatcccagcattttgggaggccaaggcaggcggatcacctgatgtcaggagttcgagaccagcctggctaacatggtgaaaccccgtctctactaaaagaatacaaaaactagccgggtgtggtggtgtatgcctgtaatcccagctacttgggaggctgaggcaggagaaccacttgaatccaggaggcagaggttgcagtgagctgaaatcattccattacactccagcctggacaaccagagcaaaactccctctcaaacaaaaacaacagcaataaacctactgtgtgttaggtactgtatttcctaaacaatagagttcccctaaatcaaaaggtttttgatttcttagtccttaagaaaatgttactatgaaagcatgggcacttagaactagtgtcccttcagctttaaaagattaataataaggggttctattttctgggatgaaattttccttttcccatctacggaattcttcaaaataaggaacattgcagtcaagggagtattatgcaagaagtacatcttccttttacaattgtaatgacgtcacagtcaggagggaatcaaccacggaccagcacctcaaggaagaccacctgttgcagctgatttcctgcccaggtggaagttgttagaaaggttgggttcatcttcctcaggacttgcgtggtgcttctggcacccaacacaaacatgggagcatcctcggaaaagggacttaaaagcagtgaatctcagctgaagtcaagcaggtgacctgactctgtctccaataaaaaggtttatttattgtgctcccactggaatgcggagaaaatgttacatttgttgaatgtttttacattccaaatggttgcttaattcttgttttgctgcttctctactttcagatccttttcaccattactttttggctactgctgaggcagcacctcacagagcaaaaagctctgcaagaaaaggaagctcttttatcggaagtcaaaattggcagtcaggaaaatgaagaaaaaggtaaattagtgtatatgtgtggctggagagtttggtgctcagcaaaattacagagaaagagccccaaaatacatcagacagcttcagaataaatgaaactggaatgtaaacttggagcaataagtaacgttattacagcgtgtgacttttgaggtacacgtgagagttgcacaggagtgctaaaaatgtgccagttgggccgggcgccgtggctcgcgcctgtaatcccagcactttgggaggccgaggtgggcggatcccgaggtcaggacattgagaccatcctggctaacacggtgaaaacccgcctttactaaaaatacaaaaaactagccgggcgtagtggtgggcgcctgtagtcccagctactcaggaggctgaggaagagaacggtgtgaacctgggaggcggagctcgcagtgaaccgagacctcaccgctgcactccagcctgggcgacagagcgagtctccctctcaaaaaaaaaaaaaaaaaagtgccatttgatcctcacgaaggtgattcccaatgaaagaaaaactgaggctctgagaaattaaatgcttcctcccaggtcatacttctagtgagtactggaaacaagaagctaagtcacatctttcacatttaaaacttctctcttctttcttaacaatagtataccacaatgtaaaaacagaggatgatgatgttatcaccttgataattttagacctgctatataggtaaaataagaacagcttgctccctaattccctaggtatgccaataaatgtaaatttaatatttgtagaatggattgaagactattgtgaggttaagaagcactgtctgtgaaaaggagcctagaaatgtccacagaagctgggctggtcaccttcagattaaaccagtaaccataagaatgaatacaggcatatatatatctccatacacacacacatatatttatgtttagtttcttatttggacctaaacaatgagttgtttttcagtaacaaaagtctgtctataagattcaaatcttgcctgtatgagtttggatgtctctgttcaacatagtgattaaattaaccagttaattttggtaaaaaatggttaatttgagatcaactgttgctctgagccctcacttgattttcactcttctcactgtgaatctactagttgtttgaataaattattcaaattaaccccaataattattttgaaataattattcaagttcttcaaatataaggctgtgtaacacagagatgactcttatgtattttaaagcaacacaaaataagttttttattttgatccattaaattgttttaaacttaaattacaattactctttcaatctaatttaaattaaattatgttttgctgtaactcttaaatttttagttatttaaaagtatactttttgtttaagattgttagcattaaccacatttagtaaagtactatttggattgtctagagccatgaagcaattagaatttgaaattgatatagtcatttagatttgtgctattgttgcctatttattttttacatctcacagtacttaaagctatcactggatatcagaaagaaaaaagatcttgtatataaattagtgttaccaaatttattttcttgtaaactatattttgagaaggttatgaaaattgacttttaatctagttataaatgttgctgagtttatgagaatagtctaaaatcatccaaattatacaataacttagaaaatgcatgcctctacatcctatacctatcacatggtcaaagtgtggtctgcacagataaccagctaagtataacagcacagttttctatttgaagatgaggaacttcaagatatacaagtggaaggagagcccaaagaggaggaagaagaggaagcgaaggaagagaagcaagagagaaagaaggtagagcaagaggaagctgaagaagaagatgagcaggacatcatgaaagtcctgggcaatctggtggtggccatgttcatcaagtactggatctacgtctgcggaggcatgttcttcttcgtcagcttcgagggtaaaatcgtaatgtacaaaatcatctacatggtgctgttcctgttctgtgtggccctataccaggtaggtacacagttgaccattttaattctcacatctctcccaggagtatacatgagctacctctgcagagattttaaatcactagaatctcatgaacatggataaagtgattggcaagattcaaacatcgtatcccaagaatcctaaaatgggaaatgactgtcttcaacttgtttactatttcagaatttcagggctgggtgcagtggctcatgcctgtaatttcagcactttgggaggcaagggaggaggactgcttgaggccaggagttccaaaccaacctgggcaaaatactgaaaccttgtctctacaaaacattttcttaaattaaaaaattagccagttgtggtggcacacctgtagtcctagcttcttggtagaccaaggcaggaggatcacttgatcccaggaggtcaaggctgcagtgagctatgcttgtaccactgcactccagctgggcaacagattaagatgccatctctaaaaaaagtaaaaataaaaattttaggttgttgaaaaatcaggaaaaagttcatacataggttttccaaaaattattgatcaaaaaaaatctgtaaaattgaattacatttctatttcttccttccttccttccttccttccttccttccttccttccttccttcctttctttctttttttttttttgagacagggtcttgctctgtcccttaggctggagtgtagtggcgtgatctctgctcattgctcactgcaatctctgcctcccagtttcaaggaattctcatgcctcagcctcccaagtagctgggattccaagtgtgtgccaacacctccagctaatgtttgtatttttagtagagacggggtttcaccatgttggccaggctggtttcaaactcctggcttcaagcgatctgccctcctcggccttccagagttctgggattacaggcatgagccaccgcacctggcctgtaaaaattgaattatattttaaaatagtaatttaaaagctggataatctgaagtcgtagagtattcctaggtatacttttgcatttcaggctttagggtcagaaaaagatatatgtgtggcatgtgcctgctctttgtgtacatatatatatatgtatagtgcattgactgctttcatatttcattaattaaaagaatttcattcattaaaataagttaatatatgagatacattaaaatgagttacttctccacagactcacttttaactgatgataaaagagaacccaataatagaaacacatgaaagagtaaaatatcttgcaggtagccaacaaaacaaataaaggaactacaataaacaagagtacataatatgttaagataaaaaaatctcaaaagaaatcagtgaacttttgaatactcttaaaaattcaggatggatgttctctaatgaatatccacagcttacggtaaaacgagatgtcttttttctgtggttggttcacattttcattcatacaatattgctttcaatttcaaaatggatgtggttttctctgagcaatgataaccacaatgacagcagcacctaccctactgttccttgagcgccccctatgggccagatagcttgcaggaacccataagcaatatctatttcatcctcgtagcaaccctgcaaaataggcacttatggaaggttcagcctcttccccacacagttagcaatcatttataaaactggggttctaacccaggaccactccactgtgatagacacggaacattaaaaactagaaatgaaatagactttattttcagacacttgtaaatgtatcacttgtcttacttgaattaaaccaaatatttttgtgagttttcctaaaagtgattttttctcatttttttttttcaatgtctgatttgcaggtgcactatgaatggtggaggaaaattctaaaatatttttggatgtcagtggttatttacactatgctggtgcttatctttatatacacatatcagtttgagaacttcccaggcctgtggcaaaatatgactggactgaaaaaagaaaagtaagtgattttgagttgaaaatgatgaacaagatgaagacttgaatgcatattgttcaaagcatctttaaggaagattttagtaaagcatgatgtcatcaatgtctataagttcctcaataatagaaattaaaactgagtcgtttttgtgttctctttacttagcccttagcttagaacataataggcactccatgaattttcagaattttaatgaaatgacattttctaatgttagtttcatgtgaaacacacctaacacttagtcgtgctttctgccctccacattggagctcagttcttcagttcttaagtaagttcatgcacttataacataaagtagcagactttgctcatttatgttgctgggtgcttagattctaaggagtatttagcgccaaaaagaaataaatttctccaagtgctcatagacttgtgatgatgagatggtgttcctgtgcatgtgggagatagtgctctatccttctctaattttcttctgtaaacttctgaaattagtttggaaatccagccagcattgggttttgagctgaatatattgatgtggctgagaagggaagtcccttaaaagtctctgtcccttagaagggaaagataactgtgtaactacaccaacacagctgaagtgtctatacaataagcatttattaaatgctgtccatgtgctgacactgttttgtgcctggaatatgacagggaacaagacagacaaaatctaagccctgtagatcttatattctagcagaggagacaaacaaaactatttagtgtaaaataagtctattatactttgtgacaggtctgtgaaggaaacagacaacaggctgaggcagtgagtaagggggaactataaatgagtgactggcacgggctttgctgaggagctggtttaaactacagttgaagcattagaagaagcttgtcttaggaaaagtgtgtgagttggagtctggggtgtggaaggacatttcaggcagagggaacagcacatgcaaaggtcctgaggcaagtcagagtttggcacagttcataagaggaactgaagacagggggtgagtggacagcgaagagtggggagaattcaggcaggcagctgggatgtgcatggcttgtaggtagcattatttgtattttattcttggtggaattttccaatctttaaagatcccttgactagctgagaaaaagcgatgtgtgggagtagaaacaaggagactagttagtaggcagcagcagcggtcctgtgagaaatgatgggagcttcccctagatttggtggaggcagagacggataacaggagtgggcaattcaagaggtgctttaggatgctgaaggaaatgtggatgaatgagatatgaaagaaaagaacacaggaggcgtctgacttctcagtttgcgcagggtagacagttgtaccatttattggttcagggatactagagtggggagagggatgtggaggacagctttgccaagaaaaataggaaaatcaagaatactgttttggaagcactaatataaaataactgtgaaacaaccaatttccagtagcaatttgggcacgagaatcttacaggaggagcctgcgctgtagatgcactttgagtccttggtgtaaggatgatgtgtaaatccacagaagaggatttccctagggggaaagcacagctggaagagagatcaaaacagagtcctggggaaatttcagcctctagaggtccaatagaaaagggggagatcatggaggaacaagaaaccaagagagtgtgatggtgtcaagaccacacttgcttcaaggaggaccagaggtttaattaaataaagctgaagaaatagtcctggaatttgggaatgtcaaggtttattattgaccattgttaaagtaggttagctggcttggtggaaacgaaagccatattggaccatatgggagagagggattcaataaacgatagacctgacaggagtgtaagactgtgatgtagtttatcacaaagagtttgtgacttcattgcgtaagagaggttcctgctttttattttgttttgttttgcaggcttgaggatcttggcttaaagcagtttactgtggctgaactattcactcgcatattcatcccaacctcctttctgctggtgtgcattttacacctgcactacttccatgaccggttccttgaactcacagacctcaagtccattcccagcaaagaagacaacaccatctacaggtgagccactggaagaaacacagacctcttattagcaggaaggcagctcttcaaccctaccttaggttggccaccttgcgagaagccagtaatctaaaagtttcagccttgaattttccatgagtatcagcttgtgagaaaaagaggaaaacatgtggaagattctgtgacacgttctgaaacaatgggtagtgacttatgactggttaatgtaaagtgatcttgatcgtcttgtgagatattcagagtagctgtggagacttaaatattttagagttgatatgtgtatttgtgtctaggctggttatatgtttttagaacatttagggaatctggctaattcagaggatttttccattatgccaaccacaagtacagaagtcttgtgagagcatagcaaaagatgatgggcagttttcccttccactttggaaataaagaactttggctgaaaaaacagaatctgcaattgactagtaactacaatcatatttaagaggacaacatgatgacaatatcttcttttagcagcttacggctgttttatcctcatcaataaatatacattgtttgcaaataacagatgggatattacttttcctgcccgtatttattcaaaccacaatgggttatcacaaatccttcactgtgttccatcacggggagatcacaagcattcttttagtgaacgctgacaatggttttcctttctgcctcatgtttagcctatgattcagatattggaaaaatacttgttaagcagctaagggagcaaagggctgtattgagaggagcacagaggccacggatgaaaattctccttaattatttgactttaagggaaaaaatgcaggtatcaatagaagatgaagtaggagttcatgatatgcatttcgtaaaatgccaaacttccagcgttctgctgtgtaggaactagagttatggatagacccaaaacatttatttaatgatgagaaacattttataatccttgtttatgaccagcagattcacttttcttattgtgttgtgtttcgcctatcattctgatacttcagatgactcgtaacccatggaaccaagaggtatcaatcagtcatgacttgttttgctatctagccaccaggaaaatcaggctctgctaaaacctctctgctcccaaggccccagcagggaggagggcatggatggggtcagtggtttaccatctccatatctgtactcctgctaccttcagtgatgatcaagcattaggaaaaataaagtagttattagaagtttggggaaccctagaagatatcagtcatagacaaacttgatgggagggaaaatcaccccaagtttaaaagtttacaaagagaatgcctgcacataaaagtgagaattgtcaataatcagaaaaaggatttttttaatcattattttgacattgtttgtgatctgtgtggataaaactagtatttgatatttaattctgaccatgtaacatgtttaaatttactataagccctcaccattcttttcaagggccctattcaataattacaaagtattttagttagcagagccaatttatatgtttgtgaaggagttgtaattattaagcattgctagtgaaatcttttttaaaaaaaaatcttttttttcttccaaatgccatttcttctcttgcatattcatttttttttctcactaaaagtgcctccagcatgcaggaacctttttcttgccatttttcttaatgtggatgtgtctgagtcttctgtcacgcaatcaaacagagatataattcaccatttatccagaaaagtagaaacatgcaggaccacagttttgcagaagacaatttggttcaccagcctagagactcccaaggtttggacctagcgtatgtgaaaactgaattaaggtcccacagaattccctttaagcgtgtatagcagtgtttagcctatgcaggttctggggaaagactgcagcccacgtcaagatgtaggttctatgtttcctcagctgccgcttcacagcccttaccctgcaccccatggcagagaagaaagatctaaatgatctgtaccgatatgagtcctgacttgccttccttgcagctgtggcttagccctaagcactcccttaacggtgaattttccaagtaaatgtaaagggtgaggaaagagtgtgtaatgccagttctctgaagagtttaaggacataggatttcatttttcgttctatgaaaattttataatatatattatataatataataatatatataatataagaatataatatttaatataatatatattatttaatataatatatatactatataatatattatataattatttatatataattataatatattatataattatttatatataattataatatattataattatttatatataattataatatattataattatttatatataattataatatattatataattatttatatataattataattatattatataattgtttacatataataatataatatatcatataatatataatcatatatattatgatatatataattatatgatatataatatgatgtacattgatatatattaatatataatatataattataacattttacatataatatataaaatgttcaaagcttaatatataatatatataatgttcaaagtttaaatatatatatatatttttagcaactcttcctcatgggagtattttccttgctcataattttcacctcacagtattttttgtccttggagtcctaatacaatggctacattaaaatcaaaatgatgaagaaaaaggaatattttgagagttaggattgactgtcaggctttgctttctctgctcctgcctcctaaacagttgctttacaagaaatggcccacagatcaggaataaccgattcgctcgttaagctgatttccacactgttgtctctggagatatgcaactcttattttcctgttgtgtcacttgttggtgtatatgtgcttatgcacacagatgtaatgtaggcacatgtcacttgtgtatgaagcagaatttattatgtttagacttacagaatttacaaagttagccttatgaaaatgtaataatataggaagaaattattattcctaaggaggcaatctcaggaatattatttcacctatatattgatagaatttcatattataagaattataacgtataacattgtttattatataatatataattagcaatgatttacaaaggactatttaaatattcattactggtttttttttttatttgaaacggagtctcgctctgttgcccaagctggagtgcagtggtgccatctcggctcactgcaacctccacctcctgggttcaagtgattcttctgcctcaggctcccaagtagctgggactacaggcatgtgccaccatgcctggctaatttttctatttttaatagagacgggggtttcaccatattggccaggctggtatcgaactcttgacctcatgatccacctgcctcgacttcccaaagtgctgggattacaggcgtgagccaccacacccggccatattcattacttttatagctctttaatttatgcaggtttgttttagaaagtattattatgcatagagaaatgaaatgactttttttaaactatagttttagcaaaaccttagaaaacaacatgttgaatatggccgctgagtaggatcctttttttttttaattctggggtagcagcaaaaattaattttttaaattatattttatttcataaaatgtaccttgaggccaggcactgtgtctcacacctgtaatcgcagcactttgggaggctgaggagggtggatcacctgcagtcaggagtttgagaccaactaagccaacatagtaaaaccccatctctactaaaaatacaaaaattagccaggtatgatggcatacacctgtaatcccagccacttgggaggctaaggcaggagaatcacttgaacccaggaggcggaggctgccatgagctaagatacgtcactgcactccagcctgggtgacagagcaagactctgaaaaaaaaaaaaaaaaggtaccttaaaaaatttaaacattacaaatttgtaataaagtgtgtgagatggagagggatgagaagaagggagaggcttgttatcttttagcatttttcctgaacattgtctgatttaatgttgctactgaatcttgctgtctagactcttcttcaaggcatgaagcctgtgagggtggctacacttgatgctaggaagcttaagggagtccactttgttcgtctctgtctaacagtctcctctctttctctccaacctgtctcctcattgcatccctgtgcttccgtctgccacctcgtagccatgccaaagtcaatggtcgcgtatatctaataataaataggtgggtacttcaatgttttctctcttatttttgttcgaagctatttcttgctgtgttaaactcttaactgctttatacatgaaaatcgtgttgtcagatagtggacactggtcttcaggtatgctcatggatgtattttgcaaaccaaaccatttggtatctgtaccgactggtgccgtcaagtggatgtggaggctgttgagggtcttcagctggtgctcagcctttggccttggttcaaacttacgtcccattcattctgttctttggtagaattagtgcaaggcttgcctgagaactcccctccctcttgaacacataactgagagctcagctcaagaaccacctcctccacaaaccctcccataaatgccaacattcctgctaagagtaatccgccttccctctgaacctccgtagcactccatcactgatgctgtcccgacacttgccttccggtcctctgtctgatctcctgcctgcttgtcttatctgccttgctagagtaggggcataaccttctcagatctggactccctctatgattcaccaagatgtccccatgtcacctaaccccagcgccttacccatgaagtgatatttgatagctatttcctaaatgaaaagaaagtagtcacaatatatggttttaaaaacatcactttcttcaaatatatctctacttgaaagatcaacatattattgaagagggatattttacatcaccagatttcatatgtttgcacagcacaaaaggcactgagatggcactgagatatggactttccttcagatgcatatcacctagctagggagataaaacatataatgtccacacaaaataaaaagcaagttttgataaatgtcgtgcaataggttatcctccagagttatcctttgggatctaacttactaaaactattttactttactaagtaggtgaattaaaatattcactcttgtaattgcatgtcattagtaataaagctagtaatttagtaagagaaatatatcttgcaataaatccaattaacaaaataattcttcaaaagatttgttggttttctaccccgttcgcttttcttataggtaaaatcctaaggcagacaaccaaattacaaaccctaagaggcagaacttctaaccaagtatgaaaagcagagtcacttgtggattgctgagggaggaggaatgaacgaggcctgtcaggttttttgggggctggtttttgacaacctgaaaaagaaacatcaacaacaggtttttcagctgataggaagagaagtaagaaacagactctagctagaaatcctgagcaataatctaaatcccatccctccaaacataaggaactcctcactctctttttctctgtgtttcttatgaagcatttagcatttgctttgtaaagagaaagctgagacccataagagggcaagagttggtttgatgggctcccttggcagcaactcgtatgacttttgatcccgaaggacgagacttatatcatgaatgggagcttatgccccttatcccaagccacaaggccagctaattctctcaggacttcttagaagtatcaaagttcaaagtcaccccaaatgaccaaaaacttgcaatatcccatctttaccttctttccagtgaaatctcctatttttgtgtgaatataaacatgttaagagcagccagaggccgggtgtggtggctcacgcctgtaatcccagcaccttgggaagccgaggcaggtggatcatgaggtcaggagatcgagaccatcctggctaacacggtgaaaccctgtctctactaaatatacaaaaaattagctgggtgtggtggcgggcgcctgtagtcccagctactcgggaggctaagggaggagaatggcgtgaacctgggaggcagagcttgcagtgagccgggatggtgccactgcactccagcctgggcgacagagcgactccctctcaaaaaaaaaaaaaaaaagagcagccagagctgtgcctcaaaggaaacgttatcaaacaagcctgtccctcattttataatgtgtgcttctgaaatgctgtatgcagtgttgagtagggctgattatccattagaatgacagggtgaatcctttaataaagtatataagcttgctttctctcattatttctttatgttcagtgttttataaggagaataaaatgtttataaatgttagttctgggctgaaagaggggcatacctacaattcaacttaagagttgattaaaatttagacatgactttacaagttgtaaggtagggtagtgtattgaggacagtaggccactttgataacattttaaaaatatagataattgtggttaagttgcaactgacctagtaaacagtatacattttaccaacacacataattaagatgtaatattcaattcacaaaccaagtgcctatatgtgaatacaatcttctgagagtgcttttgagttctagataataatttatcttaaacagtaaaattattttactttaaatgttacttatattaaacactacacaggtgcaagtcacctttctgctaatagtctaatgataacagtgtcagtgcagtttatattaccacatattccaaattagaatcataaaaacaaatgacattcagactaaggagattttacaatgctagaatttccattttctttaatggaaagtagtttactatgcagcttttcaaagtcaggttcttgtacagaattaaccctctttgagcgtccctgtcaagtaatttgtttcttctgtttcaaataaggatgtatctccagtgcataaaatttcttcacccaagattcagtgaattatagtgcaccccaggcacagtactacattttgtaagggtgatgagtagagcaggactggattctgtcttcaaggggaaagtccccagaacccatacttagaataaaatgacagagtcacaaatggagaaacacacacattgggagttgcacaaagctgtggaagtgtagagtgagtgaagacacaaacaaatacttgtcatctgctccgttagaacatgaaaggagagagccattttgcttaatggtcagtgagaaggttagagctcagagcctgaataagagcaaggaaacaaagttatcagtaatgttaaagaaaaccctaagagaagaaatgcacttcctgtggagaaagacatccaaagcagcctgattgaaggcagtggaggagggggcttctccgggaatcctgttcatcatcatgcgtattatttggagtcccaaagtcaaaatcctgcatatgaccactaggtaatttgcacctgatattcagtaaagaattataagtcttataagttccttagcctgaagcctgatgttcagtaaagaattacaagtcttataagttctttagcctgaagtttccaggagtatttttactagagtgggtttttaaattttgtttttggaaaatcaagatccattttctttttatttgctaggaaggaaaaaaaaagctgaattaaaatacacaggctttcccggagagtccatacagctgtttcttctagcaaccgcagctgggtctgcctcgaaagcttgcatttgtgcagaaccacctctgccgctcccactcctcagggaatgcagtagttgagattacacacagaaagcccagtaaacagaaccctgagaccattgggaaacagattcccgatgaagaaatgtttgctccttttttttcttctgaatggccttctataaaatagccaagttctgttaaagaaggcgctgatgacagaatcatagtctaagtttaataccttccgtatcatccatcattgtgcaggctcttacaaaagcatgtttctaattctgctttttctttacaatgaatttatgatgcagattatcaaaccataatatatgaaaatctaccattagaagatggctccttattttaaaatgtttcctgtgtaattaaccactgtgttaactgcttaacagaaaccaccttaatttttacaacctcctataaataggcactactgtttcagctaaccgagacttaaaagataggttacatagctttcccatctcacctagctagcaagttttctggtgaagacttgaacccaagtcttttaacgttcttctctatggcctctaaaaacaatgttaccataaaaatgagaaaaagagagagagaaaagtaaaaggattcacacaagtgtctttttgaaacagtatactttattcatgcatttaaaatatttttatctatgttttatgcacacagttttttacaatacaaggtacaattctctgaaatttctcaagatagttaataaacccctagactagtaaatgacagcctgatacataatttctttttttttttctttttttgtcatccattacaagctcatgaggttagactgctccagagagggtctggagtttgtggctctaaggtcagagggaatgagcagtgttggatgcagagatgcccttctcatttgtccgcagctgcatcttgtcccattacaagtttctagaaatcagccttgtggacctacttccaaaaggcttactccagtgtcttcctctgattctttcattgaacgatctctcctcaatgcaccctgcctgtggcatggcagtttgggggcatcgttgcttaaggacatctgctgtgtagctgtagtagcagctgtggaaacagcctcccctctttgagtttcactctgttaatagcagtaattgttagaaagtagttttcttgtcgtatgagattgcagcagtgtcaatgtagacctttaagattcactctgaggtggtcccacctcacactgcaaccaccgaattccttgtcttaataaaggtatcttttcatttataaaatgcatccctgaagagaacaaatacatactgacgactgtgcagcagccgatcacttccacatttaataacatttcacatggagagtcctgacaaagcaggaacagcaaatgtgttccctgagatttggtgtgtggcactggtatagaagatatgggttgcaattttaagagtagctaacttctccaaagtcgagaggatgaattgactagcttaggaaaataaggaagtagtatgtcagcctaactccttccaccaatgtaaaactcgcttcagattctctctcttcattaaattaacaatctgtttctggcatactatcatttacctgctggacatcctgtgcaagggaattgtttgaatgataatctaaaagcgtagggacaatgtggattccttacgacagttacccaaaatgataggcatgtttacaaatatcaaatcaacaagttgaaagtaaacctgcattttatctaatcaaacttcctcatttggtagaaaattaattaactttcacaaagttaaatagtttactcagaacctacaattatccagatagaataatattatttattgtccatcttgtttgaaccctgctaaaaatttctggattaactatgataaatagagaagactatcagtatgtctactaggctttttcttaatgtagactttattgcccagaagttctttaaaacattaatttgagtatgaataaaaagatatgcttttaaaaaaaactgtaggagaaggatgggacttgttatggtccactaagaaataaactgtaacatcccaggctgctgagtgggctcaccggaagctctctctccctgtattctttctctggttcaggatctcacacagtcttcccacggttgccaatcgacagttcgcatcagtaactctcaggtggggacatgatgcagacgtctcactcctgaaaacacttagcttccatggcacatgctttagatggcagagtgggattcgtctacacaaaggttgactgaaagcacacattctttcaagaaatttttaaaaacttaccaaaaatgtgaatgacttgattcttgcaagatggtttgttgcgttactaaaaaagcatgatataatttgcctcagcagtctcagtatgctctctcctttacaaacctgcaatcctgtccactctcagatcagttgccatgcctagggttcagagcaaagcacgctattgatgccaccctggaatgcatttggcattagggcgttactgcaacaggcatacaggaatgcaatagtggatgatatgtagcatgatatgtgatctctgacattccttataattcttctgttctcatctcctttttttcctttctatttcaattactatgagcagcatcaagaaaaaattaccaatccaccaaaatgagtaagtccccctgtgaagccatgaaatgcttgctctacatgatgccatttcatgcttctacaccctaaactctgaccattttctcctctgggaaaaatgtcaagtttaggtgttgatagctctcattaccaactaatcactagaacccgaattaaaaaagctaacaaaacctaaccaagtttacagtttgtttttagaaagaacttaaaacaaacaaaccaaccaaaaagaaagtgacaaaacgctaacaccccaccttgtgaggtctttgtacatgcactgatttcatttgtgtttatcctccttttacttgcccctcagtcaaatctctcccaacaccctttcctcttctgactcagctgctctctgccaacagactggcccacccggaaggaagcctcccggacctcaccatgatgcatctgactgccagcctggagaagccggaggtgaggaagttggctgagcctggggaggagaagcttgagggctactctgaaaaagcccagaagggtgatcttgggaaagacagcgaggagtcagaggaggacggagaggaagaggaggaatccgaggaggaggaagaaacatcaggtaatcagcccactaccagcagctggtcagagaacgctggctgtcagactgagtgaaggaaacattgacttgctccaaaagaatatatatttgacccagtccatgacataaaaattggagtggtttttgtttgattgctatagttataatattactgttccaattgctccaacaatttctttttaattctgactgagtagagaccagacgactggttatcagtgactgaccctcaagtagtgctcctgtctagacactggtggggcatggtgttgaccacgtcctcagtcagagcctctctgtttctaccagatgcaggtacaacctggctgtgcagaatctcaaaggctctagacatcgcccttacaaatgcattctcaagaaaccattctgagacttttccaggaagccaataattaagaatatatttctagctctgatctgatgcctaaggacatgggaactggaggagaaagtcagcaattggataattataatttcaagcaaactcctagagatgtttttgtcaatattgttgttacaggagtttcaatctttattatttgggctcttcttttctacttcccttcctagacttgaaataatgttttaatagagcatgatgaacattgagcagcctcagtgatcaggacatgttatctgacagagaatataaagtctatgtagcagtttccagaaagactgggacaaaccagagagcatcatctctggggtgaggttctggggctatgatcttaagatgctgcacttgtctttgctggtcaactgtccttaacaaaagtagaaaacaaaaaaagtagcaagaagaccccttccaaaggtttgtgccccttaaacctggtgttctttccccactcatctcagaacacagaggagaggactggaaacgttctctccatatctgagcattgtgaattcctcagtgtgaaggggagaccccagctctgtgaggccaaggacttaagtctaggattttatgacactacttcaagatggattttgagctttgctaataggtcctgcccaaaattgctcagccacttttctctcaatccctcatgtctgtggcagctacacgtctaaatcatgctcatttattacctacacctttttattgactaccatctgagtcactctctaaatacagtagtcctgccttagccttgggggacatgttctaagactcccagtagatgctaaaacctcagataacacagaaccctgtatacactatgcatgaatttctttttccttcttcacaattacacagatagaagagttgttcttaccttagatcttagcaacctcagcatacatttttttctttcgttattaataaaattgagaattgttaaccattcacttaaaggaagcattttatggcttctctctggcatattcaaattgccagcatcactactctttcacttggagccattagaaagtaaaataagagtgacttgaacacagcactgcaatactgcagcggtcactctgagaactgagacagctattaattgactgaccactgggcagggagtgtagacagcatggccctgctggacaaagggattcacattccaaggggaaggacagagcgggacagcatgagatttcatccttctactcagaacagtgtgtaacttaagacttctgaatcatttctggaattttccatttaatatttttggactgtggttgactgcaggtaactgaaatcttgggaagcatagccatggataaaagagaactactgtaagcatacttcacaataactagaaccttacttagctttcagaaccaggcacagtaactgttgcatatacccaagccagttaaagaagctacttaaagagatacttaggacttgtaatctgccaagacagacttgtaagcttttgtttacaaacaagacaggctgatattacaaaacagtcctgctgtgactttcagtcaataaagtgagccagcatagtccttctagatagaagcatgactcctgttttagcacaaggtagaaataataaaataagtaatttgattaaaaattatcatttgaatgaatctgaccatgtttcagaaaaccacgggctgagtcattctgatgcttagagttcacttcttgttctgacaaggagcaagctcttcctgcccatgcagggctctgactggttcactttttcatggaaaccagagagctttaccactcaccagttaagccttgtcgaaggagacaggccatttataaaagtgccgttgtggcaagaaagatgtcttttagaaggagttaagattatttaacattcctagaatattagaaaattatagtttggtcttaagagtaaataagattaagggggctgggggcatgggcgctcatgcctgtactcccagcactttgggaggctgaggctggtggatcatttgaggccaagagttcaagaccagcctggccaacatgacgagatcctatttctactgaaaatacaaaaattagctgggcatggtggtatgtgcctgtagtcccagctactcaaggagaatcgcttgaactcaagaggcagaggttgcagtgagccgagattgtgccactgcactctagcctgggctacagagcaagactctgtcagaaaaaggaaggaaggaaggaaggaagggagggagggtgggagggaaaaagaaaaggaagaaagaaagaaaagtaaataatgttgatcatgccactgcacttcagcctgagctacagagcaagactctgtcagaaagagagagagagaaagcaagcaagcaagcgagtggaaggaaggaaggaaggaagataatgtcaaaatccttctttacactaatttaatcaaaaggtggacaaaagccacattgtccctccaagtctgagagtatgatatctgtgtcatcatgacttgggattcttacatcatccttattccagattttggttttcttagaattcatccactgtaattattttgcagcctctcattccaacctgaaagttacaagatatgctttaaatgataatatttttaaaaatgttatgctcttgtctgtacttcctattttgcagacttaaggaacaaatggcacctggtgattgaccgcctcactgtgctcttcttaaaattcctggagtattttcacaagctgcaggtgttcatgtggtggattttggagttgcacatcatcaaaatcgtttcctcttacattatctgggtttctgtgaaagaggcaagtgaacatttgtcctatcatcaggctgaacagaaccacagtaggtcatcattttccttttccagctgtccatgatttttttaatgtgatccgcattacatcggagtatcaagactccaagactaagtacttacacttacagaaatccgagggtcagcagcactgagaaaaaggaaagaggctcgtggctgagtttctcgttggcttggtcatattacaaaggctacttattttcatcgaatccttagggaagagtgtgagagcaggctgcccttctgcccctgcctatgggaatctatctccctaaattctccaaggaaaacagtagcattccagtttacattaccaaggagaaagctcaggttccaaaatctaataaaatctttagtagagttcaccttgtttactactggatttcttgagatacaatacaaagtcttcagccatgcacctgtactgcacttctgtttccttgattgtaaagaagagagtcgtcatccagccaacagattatttaatgttcactgcagagaaattagctttctttccttttattcaacaaatagtgtttgcatacttctatatgcctggattatttctgagttggttacaattcaagaattctttgccctctaaaaattaatcaagggagtactgcctataatctttaaaaagttacatatataacagtaaaatatcacaactacaacactacaaacctaaaacttttcacaaataggtagctaagagatgaaccttaatttgagctccatagtctaaactagaacttctcccccatttcatacaaaccatatgaaatgggcagggaatcattgccaagtgggaatgaaaacagaagccattctatctgcgagattcgtggggaaatggcagcggctccaatgttaagtcactgggcgtatacgttaaatggagcccaaatctagcctagtatttatattcattgagagccaacatttaagcattttaactgtagaggtgaattgaacagttcagataaaaatttcagggttagggtattaaagagaaatggaaaagaacaagagaaggcatttgacaaaaaatgcacagagaccatttctgaacaaatccagtctgaggtacaggtgacttctgattcatgagaagctgcgtggcagggtgtgaaggtgtgttcagacagtgtggtgatgggagtgggcattgggggagcggaaattcatgggagtcggacgcagagaatctgctgtcataaatccatcctgttgtacaatccatccatcagaaaagggttaaaggatgcaatttcttatagatcctaaacaaaaggcagacataactttttcattatccttaatgagtccccagacataaacttgttaacagaccatcaagtaaacagaatatctagttaccttgttacactcttgggaaaacagccttccatagagtatcaccactcccttctctgtgattcacacattgtgcagactttcagaattttcattcctaatttcatctctctcacctttaactttaaaacaagtgagagactcctgaagcatagaaatcctgctctttctgctgctagcatctgccaaatcccattgctgtaaaattgtttcagccactcgtgttgtgcgtgatgtcaccccacctgcatggggggtttccggccctgaagctttggtctctgggttcttgacagtgtgtgcattgctggctctttctaatgtaattggcacactaagcaatcaatttggtgatgacatccaatcaaaagacttctcttcagaccctcatggtccctttagaatgcatcctacagggaaactttcctccgtgtccctgaacacagcgcactttctgatcattcctaagaaatacaaaatcctacagtgacttaagtgagcaaaatctcacttcagtagttaaaattgtgcacccacagagaatcatcgagactcgggtccctccccaggtagaagctcctcctttcttatctgatcctttctttctcacccacatctccttaaaatccacctcgcagaggctctttagtccttttttaaaaaaatccactgtacagaggctctttattccttcttttgttttattctttcctgggctggagctcagactcacaggctcagggcaaggccccctgggatggggatgttgtgacttggcctgtgccatcccatgatggcctcacgctctgggctggcaactggcgggtaaacctgcccttgccctcctggaggctccacggtggggcatcccacagccactcttggccggcactgacacccagcccctggttgccagcaccttctcctcctggactcctctgtggagtcctgctgcccttccagacagccttccccgcagccttggagcagctctgggtgctctgtgcctccccatcaggaccaggggccaccctcacacaggccctgctctgcttgtacacatggagcccagcaaagagactctgcaccctgtaaccagagctcttcatctcttctggccccatgggtaccagtgcccaagctccagggttcacgcatcgggctccgagtcattagctcctcactcgggctgcgcgcagaggacgttctcctccctgcatccccacctgccccatcatcttggcactgggggcttgggggacaggcaggatgcagcccctctccacaaagaaagctcttcaggagctgtggcagctctgggttccagacatccttacccaaggcctcagtaagggtgcttgttttcacaacttttgggttcatctctcctgcaaatattaaaccttttcaaagttagcatcatgaagcatctgaaaaagaagaagttgctggaaaagaaacagagaaacctttattttccatcagcatcttattcaggagtgacactgctttggaataatctagatttaaatatatatatagtatacataaacattttctcctccttttgaaatacacagctactttctaattccgaaggctattggacagctctgtgaggtcagtgagtcttgagcaagagccacactttctgttagcacctcagctcctccctggggggcctggccaattggagaaggaagggaaggggaggggagggaaggggaggggaggggaggggagggaatggaaggtgggaggaaggaaggaaggaaacttttgcagacctgaggtttctccttcttgtctgtctcatcattgttattattttcactctcactaagcattcattgagcctttattaaggactcacaataaagtgaatgcgtacatggtgctaggtgctagtgtagtagcttgaaagacacacttcttgtctgagctcacagcctgatgggaatggctgccaaataaaactaaaagtgataataactgctgtgctagaggtgtccacagtgagcacttgctgcacagggaggagtatctcttgcaggcggttgcagcctggaggtgatagttgcaactggggttctctgggagagggaagccagggatgggtaagtgcagggcccaggaggctttggttctcagaggccccttcccttgaggcagggccctcaggccccacaaggttatattcagataggatgacaacctgtgtacagggcttttttgggaaagcactattgcataaaactgtttctcaaaatccttgatagtaagaatcacctggacagttgttatgtacgtggaccagcatctatttccctaaaattctaattcatcaggtgttggttgtggcccaggtatttgtcatagtcattgtcctcctcctcctccttctcctcctacttctccttccccttcccctcctttctgcttccccttctctctccccttttctccttcctcttcttcttccttatccctcctcctcctcctgttcctccttctttcttcttctttccttccacgagattcttaccatcaggaaaatgatgagatcatgatctctttagataacagaactgtgagagggcaaggcgcactgaggtttgcactgggcttgatatttgtatggaatgaagtatcatacttcattcactgagccccagtttttctatttgtaaaatgataaaaataaaaatattcaccgcacagaggctctttagtcctcctctgatttgacttctctaggatgctgaggacaggggatcctttccttgtcattgaagctctcctttctcttgttttggacatcagctcaccttcccggcccctccccacagtttcatcaggcccttcctgtctcattgctggactcatcccgcccttcccaccagcttcctcagcatgttcctcagtctctgtccacagcgtgtttctgttctggactctcatgggtgagctcacgagctcacaagcacaggactcctgcacttgctgcgagtcccaaaatctgtgtcaactcactactctctttgaactccaggcccctgtttccacctgacagctgggcctgaccccacttcttgagtggccccaaagctctttcaggtgtcctactcactccctctgcctccattgccctttagattactcttacagattcccagctttgcccaatcctttctccttgcaatacgtattccacaatgcggccagaatagtcttcccacagggcagatatgatcatgagagacttctacctgaaaccttgcagcagctgcctggcatcctcaccgtaacgtggtataagacccccgggatccagcccacaccacttcacctttgccattcctggacactctaagacgctggatgggttttaaagtcccctgacaggtttcagatcacacttctctcacaatgaatcacttgcttctccaaggatgggcagcccatgctctcccaagtctggaaggaccttggacctgctatttcttctgcctgtctaactcctgtttattcgtcaggtctcagtccccttacgctgtcaccaagtgcctgtgtgcctccatctgtccctcccacatgcctcctgcgggcagggaatcctcaggggatgtgtcaccttgaacctagttaagacttaatgaaagttaccacctttacttccctttctccatcactcagaaaattaaaagttctgaataaattaattgtgctgtctttactaaaggccttagatacataataacagacataactgagttaatttcacagcatctttaatagggtttgctttttaatatccaaattgacgagacacttgttgatgactatggaggaagagtcaattcgctaatctatctgttttgttaaaaggtaacatgtttatgagtgagttatggtttgcagggcctttccatgtacagtatttctttcatcttcaattaattctataaggcatctcttcctactttaatatttcagcacttaattctcagagagcttccttgcattggacagtgacaaatagttgagcagaagagtaacaggtaacaaatagcagaattaaatacagtcatgtagtctccacattttcttcttttataattttttaaacttttttttttttttgagacgtagtgtcactctgtcacccaggctggagtgcagtggcacgatctcggccactgtagctgggattacaggagcctgccaccacgcccggctaattttttgtatttttagtagagacggggtttcaccatcttggccgggccggtcttgaactcctgacctcgtgatccacccaccttggcctcccaaagtgctaggattacaggcgtgagccacctcacccggcctcttcttttatagttttataagccaagtaggtaactatgtcttttagagcccacaatgcttagcccacaatgcttggtacatgtttagttgtatcaaatgagagcatgctattatttctacctgagaatattaaacatttctaggatattactttaacataaaaatatgcagaataaatgagcgtttcccatgcctgaagaagatggtggtccttctatactgtccaatggactattaactataaagaattgctagaaatgtgggaacatctggcctgatcaacgaactcgcatgcagcccaaagtcaacaggttcaagctgagttcataaccttgctgctctgaccagcttccctatcagcgttgctgtctcagtaatggcactgttatccactcaggctcccaagtggaaacctgggaatcactccttgaactttctgtcttacccaccggcccaccaagccaatcagtcatcaagtccagctaattttgcctcccatgttgaatccgcgcctcctccccatcttccctgggctattgccgcggcacgtgagtgggtcacccaaaagtcgtgtccagtccccacaatgggccctccattcatcagttacatttatctcaataggaagcaaatcttacctccaaattcccagtgtaatgcccttccacagctctcagttttctgaagaatgggctcccgtgccatagcatggtgtaaaaaggatccatcaaaacttggctgtagctgcatctccagcctcacctcctgttgcacttcacactttcaactctgaactttccagtcgtttgttgttgcctgtccccaccatgctagctcatgctttcctgccttcattcatgcctcctttacctaaagaatccacctctcatctttcttggcttggcttagttcaggcactgtctcttcttgaaagtgcttcctgacctccacattggaccaaggacccttctgggcgctctcacaggagcctgcccacattgatagcttagccagtgctacatgatattgatgtcacctgatgatatgtctgtctgccatacaagacataatgcccttgaggggtgagaccataactcacctactttagtaccccagcacctagggcaattccttgcgcatgctaggaatccagtctgcttttgccgaactgagtaaatcaagtcatcctgttttgtggctgtcctgtttgttatgccgtgttacgtatttttgtccccatttctggttttacgttttcaggtgtctctgttcaactatgtatttttgatttcttgggcttttgctctgccgtacgccaagctgcgccgtctggcttcaagtgtctgcacagtctggacgtgtgtgatcatcgtctgcaaaatgttgtaccagctccaaaccattaagcctgagaacttctctgttaactgttccttggtgagcctcggtgatgggggaatattcctgactgccctttagcaaagcaaggcagatacttggggaacccccatccccaagcacatttggcctgacctggcttgtaagtcacctctccctggctggtcgtgctctgggcctgtgttaagcctcgtctcatactgaggtctcccctgaaatgggcctgtccctcccatcctaccactatcattttgctcaaggctgaagaagaaataacctgagctctcctaatctgtggagctatttttttttactccattttctcttctttttagccaaatgaaaatcaaacaaacatcccctttaatgagttgaacaagtctctgctctacagcgctcctatcgatcctacagagtgggtcggcctgcggaagtcttcgcctctgctagtctacctgagggtaatggctttgtcgtgcttagtttgggcctccactccgttatataatagttcaggattcttttccatgagacgcttaacatcacatttgatagtaaccatatcttctcatgtgggatttggcatcacctttgcaacaaactctaagtgttaaaatcagtattgtggcatgttaaagagaaaatgatcaaacggtctgagattgcttgaataaagtatgacaaatacattcattggaacattatacaatcatgttaagaccattacaagattaaggtcgatgggtgcattagaattgaagcatgtctaaaatatagtaagatttttaaaaagcaaatttcaaaacactgtgcatagtatgatctcttctagacacaaagaaaaatattaagtaaagtataccaaatgctcaatagtggttatttctgagaagcggatatagccttacaagacattttcgctgtgtaaattctgtttatctatagtttttaataaagagaatctactacatctagaagtaataaaataaaacatatatttagaaaaggaaacgagtacaaatagtcatacaaacataatgaaaacaacatgcttcagatttttcacattttatttttgtggattatctgagcagtcctaatcatgttacactggcaatgcatttaagggtacagcctctacactcagcacctgggatttttaaatgtattaagcagcccattttctttgtggaccttctagatttttcatcacatggtagatatcttttgtaccagtacccaccataaatagctgttatgaggataaagcaaattggtatttgaaaagggtgatcgaattgtgtctggaacctatggttccataaatgttaactattttcattatcttgaataatagttatatcatcactattattattttactgttgtcagcatgcttttcaatctattgctgtctgtagccagatttcaggagtgttcaaaagcttccccctaagcagcttcccgttcatttagctcagtgcgtcccaggatgtctctgtactgtttttgcacttctggctgcaaacaaggctgaactgccctccttggataactggaaattgcttccttggtgtgagatgtgtagttgtgagaagtaggaatgagcagcagcatcttatgtttggagattctagatcctatgactttggaagttagcctgattttctaatatagataatgccacaataaataagacagagaaaacgaatattgagctcaaaactgcttaagagaggtgagcttttataaaacattgtccttgtagctgtgcagaatgtggggattgcttgaaattaccaaatcataaagcctctggctgacacatttgtgtttccttgctttgtagaataacctcctgatgctggctatcctggcctttgaagtcaccatttaccgccatcaggaatactatcgaggtcgaaataacctgacggcccctgtgtctagaactatctttcatgacattacaagactacatctagatgatggacttattaattgtgccaaatatttcattaattacttcttttacaagtttggtctggaggtgagtttccttgctgatatgttttatttctcttttccatgaaaattcaaagaactgcttctggccaattggccactggaactttgtgatacatctgcaggcatgatagctgtccccttgagaagaacagaaagtatttgtactgatggttaactggcttgactgaaagttttccaagtttgggtgctgaacacccccctccacagcagtgccttggcctctctggatctccagagccatctaaatgcatggccatcagttgccgtgttaacaggtttcttattaagaataaagtattaatcttctgcctgggcacggtggctcacgcctgtaatcccagcactttgggaggccaaggcaggcagatcttctgaggtcaggactttgagaccagcctgggcaacatggtggaaccccatctcttctaaaaatacaaaaattatccaggcgtggtggtgcacgcctgtaatcacagctacttgagaggctgaggcaggagaattgcctgaacccaggaggcagaggttgcagtgagccaagtttgcaccactgcactctagcctgggtgacagggcaagattccatctcaaaataaataaataataaagtattaatcttctttctttttgtgcattctgaaaccataagctgcagccaaaatgaactgttttaacctaaaacgattgtgatagtgcctgtgccttcatagaatgaagtaggaatggtgatgtttcatgaggagatcaaaatggctgttctctttattgtctgaagtggttatgataacagctacttagtcagtttttccctgggagtaatctgtacagtatttctgtcttcacgctgagacactcaaaagagcaagcatttgtgaatctgtgcagacagacttgccctgagggacatgggtctccgccatctacacagacctgacacctatcaccagtcccctttcccatatgcctgattttttttttttgcctcttttcatctttacacagacctgtttcctaatgtcagttaacgtcattggccagcgaatggatttctatgccatgatccacgcctgctggctgatcgctgtcttatatagacgcagaaggaaagccatcgcagagatctggcccaagtactgctgcttcctggcatgcatcatcaccttccagtatttcatctgcattggcatcccacctgctccttgccgaggtgagcctgcccttcccttgagccgtctacttttagaagaagccattactgagcggacggctgggagaagagtggtgaagaagagtattgattgtgctgttcgccacttccctccctgcagattacccgtggagattcaagggtgccagcttcaatgacaacatcataaagtggctgtacttcccagatttcattgtgcggcccaaccctgtgtttctcgtctgtaagtgtttccactgcagggccacagagtgctggtatccgggtttactgttaatcattgttcacgtgctatgcattagtgccttttgtcttccactagacttcgtaatcatgtaaaggcttgtcttatgcattaatatcacaagtcattaatggcttctactcaccctattacatttgcaaaattaataaatcagtgttggaaatgccatattcacttgcataatttcacttcccccaacacacacacacaaacacacacacacacacacacacacatttacacagccacctttcaaaagacagaccagagaggaaggcttttgtgttttctgacttggtggtttctggctcccagtgcagataaataaaccctgaacatgggacagtggatgctgggagatgcttcccagattttagttgctctagaattgggctgcagccccaaggccttcccatggcagctggtgatccaaaggtcagagcagctcctccaagaccagagtgctgggttttacagaaaatgcaaatgactgccctgcctaaacaagtttaggtttaattttaaaagcaaggaagcagcttgtgttcaggcttccaggcaggcttggcctcagccctttgtgggcagttgctgggaggacagctctctcaggctgcgctgtgctgtccagcacagtccaccacctccacctgctctcaccacacttgcagtgtggcttctgctttggggacagtctttggttacaaatgcaaaggaggatggaaaggataaagaaaaatgaatgtctgcatccaccacacataaaaagataaagatggggaaattgctcaagtggcctccttaaaactggtgggaggtaaaaaaaattagccaggcatggtggcgggcacttgtattcccagctacttgggaggctgaggcaggagaatggtgtgaacccaggaggtggggcttgcagtgagccaagatcgcaccactgcactccagcctgggcgacagagcgagactctgtctcacacacacacacacaaaaatgttaccctctaagagactcatgaagactagtaagtagcacctaatatttctctcaccgatgtgcaaacaaaattcagagactccccacgtaagctcctggagtgtctgtggtcactctatgccctgcaaggtggagaaggtgtgacttggccccgacattggactccaggatgaattttactatgaactttgggaacacaactcacttaggagctggggaatggctgttgctgtgtgatgactgtgtgttgcattatgtaaatcagaagaggatgaggcggcttaatgatctcacctctgtcttgttagatgacttcatgctgcttctgtgtgcctccttacaacggcagatttttgaggatgagaacaaggctgcagtgcgaatcatggcaggtgacaatgtcgagatctgcatgaaccttgatgcggcctccttcagccaacataaccctgtgccagattttattcactgcaggtaacaagagcttcacatttgctaaaagccactttgatgtgtgcatttccattacattgctcctctatactttctctgctatacttgggaaacagatctgctgaattgtatacactgaagttaataaatgctggacaatgtggttcagcagcctggaggctgagcctctgaattatagcactgcacctgcttttgtcaatgtaaaccgcctctttatggcctcagttctcctcctcttcttcataccaaaactgacttgtgccagtaataccagctctccagtggagggtcctcctgctcatctcttatccctcctctgcatccccatagctcatcctcatctttcctccctcttcctcatcccccatctttcttccttatctttcatccctcatcctcatccccatagctcatcctcatccccatagctcatcctcatccccatccctcctcctcatcttctgtctctcctactcatcctccatttttcatcttcatccccatagctcattcttatccccacccttcctcctcaccctccagccttcttcctcatcttcatcacttattctcatcccccatctctcattcttatccccatccctcctcatcaccctccattcctcttctcatcctccatccctcccactcatccttaatccctcatccccattcttactcctcatccatcctccatccctcatattcatccccatagcacatcctcatccccctttcctccctctcatcctcatcctccacccctcctcctcatcctctatccctcattcgtatccacatagcttatccatattctccatccctcaactttatccccaaccctcatccttatccccatttctcctccccatcctccattcctcctcctcatctttcatccttcaaccacatccccatagctcattttatccccattcctccttatcctccatttcttcttctcatcctgcattcctccttctcatctccatagctcatcttcattcccattcctcctcttcatccctgcttctcctcctccatccctcatccgtatccccattcctcctttttatcctgcatccttcctcctcatctccatccctcattctcatccttcatccttaatccccattcctcatccttatccccattcctcctcctcattctccatcccccctcctaatctttcatctctcctcctaatgtttcatccttcatccacatccccatagctcatctttatccccatccctcctcatcctccatttctccttctcatcctgcatccctcctcctcatcctcatagctcatcctcatccccacccctcctcctcatcctccatctatccttctcctccatccctcctcctcatctttcatcctttatctgcatccctatagctcattcttatccctcatttctcctactcatcctcatccttccttcctcctcatcctccatttctccttctcatcctgcatccctcctcctcatcctcatagcttttcttcatcaccacccctcctcctcatcttccatccatccttctcctcttccatccgtcctcctcatctttcatcctttatctacatccccatagctcattcttattccccatttctactactcatccccatccttcctcttcatcctccatttctccttctcatcctgcatccctcctcttcatctccatccctcattctcatcctttatccctcatcttcatagcttatccttgtctcccatccctcctccttatcccctttgcctctgcctcatcctcatccctccttctcttccatttctttctcatcctccatccctcctcctcatcctccatctttcctcctcatcccctatctctcctcttcatcctccatcctttatccttatccccatccctcctcttcatcctgcatccctcctccttatccccatccctcctcctcattctccatccctcctcctcatcctccatctttcctcctcatcccctagctctcctcttcatcctccatccctcatccttatcccccatccctcctcctcaccctctatccctcatccttattccccatcctgcctcctcatcctccattcgtcttcctcatctcccatctctcctcctcatcccttggtcctcatcctcacttcttgtattcactgggcactgaggaggggtggctccctagattccaccctgtgcctgtgctcttcctgagcagtgtctcccctgtggccatgcaagggctccctagcagcttttctgtcctccaccattctgcccagcctcatgacagctgatctgggccatgtttccctcacagtatttgtgcttaaaccgtgctcgacctctcaccatgcattcaccatttctgcattccctgggtttccgtattgagatttttgtcacccaaggcccacttcatggagggcaggcccactgtgcctctgcagtcagatcttcagtctttcaatgcctgtaacattccactcagctgcccactatagtcagctgtctgaggaagctgctgtgacttttcatacccccttattagctgtatatcatgggactaatttcctaacctctgatcctcactgattagtgtctgccctattgagccatatgaggttgcagtgagaagctcatgcagtcacagcacacatgccatccatgtggagataggtcactgatagtacccaagccagccgaccccacacatggagtctctctccagcttccgatcttccagagattcctgtttacatggtgtggatcatcttctgcctggtgttggtatctgaagaacccatcttatccccacttctaaagtgttgccttagggtgaagatcatgtctaacttgcttttgtatttgtccccatcctcctacttacagttcttggcatataccaatgcatataccaatacagatagctgtcagccacctgctactccctttgcgccaggctctgttccaagctttgcacacatggagcccttttaccccagcccaaggaggtcatgcggttatccctgttgtagagatgaggaaactgcagcaacgagatgagacataggcaacagcagaactgggattggaactcaagcaatccagctcccaaatctgaatgtttatgcgcttaagtgcctcttggtagcataagaggctcaatatgaactgagtaaatcaggaagtgaatttgctttaaaacaatatgctatacagacttgaccattctatttgtgaattaagtaccagactaggcactgatctaaggtaagacttccatttttacctcttctctgggatgctaagaaaacaatcagtccagcccaatatttactattgcaaagggaacataagtattttcaatgtattcatgaaaaacctaaatcataactcaaatggaaagcttttgtgtgccattgatttttaaagctgatttttgttttagttatttcaaatttttgttctgtttctcaatgaggactgccagaaaagtgaccccactcaggaattgacctgtcaaatgccacagcagtaagtaggaagccagcgcacatgcttgctggtcagaagcacagccatgctcccctcttcctctccaacaggggtcagctccgcagcaccctgggatctctggaaagtggccagagccctgatagttaggtggccccttagccacagtacctgtcaccagggttcagtctctctattcagaaatccttaaggctccgctttgaagcgtatttatcaatgttttccatgttatcttcacaagcttagttttatgaattctggacccaaagtgggttcagtgccaaggtgtgaaggccagagctggtaaagcaggaattgactgctgtaggcaaggaaggaaaggtatggaaagaataagctgcactcacaggcacacacactcaaaatgctagcagcccaattccactgaattcaaaccacacacacttcagaaggcccctaggctcatgcaaatcactacctttatttgtgatgatctagggttacagggagatactgacatttcattcactctccattatgaagtcaaggaagggttttatgtattttagaaaaaaagttataaaaatgtttaagtgttttactttaaaaagaataaagggtaaaagtttacttatctgaaaaatgtaccaaggcacaacttaaactcatccccctaataatgctagatagctcaagtgtagtgcatattttattaagcaattacttattaacatcctacagaacaagaacccattaatcaaagaattaatccagaattggttctcctatgtttcttcccaaatgcgccaaaagaaaccaccaaagcaaaactcccaaaaccaaaagttctaatcaagaaatgcagttgggacttggcctgtaggtgtgactcctgtcagatgacattgacccgcaggctagagctgctgcttgttgcaagactgacaccggaacgctggcctcaccttccatgaggaaagcagcagggatgggtggcccccaaaagggaatcctgactcatcctgaggacctccagaaacagagtattggaaagaacaaaaaagccccaccatggctttggatagttggtcagaatcacctcccatctgtagggaaagatttccacctctaataaaagctttgtgttcaacataaatttgtttaacttctagttcatccattcttaacttttctttcactagccagaaggcatccgtatcttagaatttcttttgccatacaattattcatgcctcccatagaaacagaaaggagaattttgaatactcaagtggtaggcagaaaatgttgttgtttgtgagaaatttggcctgaataaggtgacgagaagcatacacggtttccaaaactcatctattggtctattactaactatttgagggtttcctagatagcaggattaaatgaaagctcacagtctgatttgcaaggtgcagcagagagcatgaatttcttcccttgttaaagactttcctgattttgcttttgtttgttttgttgttgttgtctttttgtcactggctttgttttccagatcttacttagacatgtccaaagtgatcatcttcagctacctcttctggtttgtgctcaccatcatcttcatcactgggaccaccaggatcagcatcttttgcatggggtacctggtggcctgtttctacttcctgctctttgggggcgatttgctgttgaaacccatcaagagcatcctgcgctactgggactggctgatcgcatacaacgtttttgtgattacgatgaaaaatatcctgtcagtaagtggttgccactgcataacacatttgcggttttcgtgtaagagtaaacagtccactcagtggttattaaaagcccagtgcttgtcatgttgctctcttaaaagccccaataagatgctgcaaattcagaattcaaaaaccatttatttctctctgtcttgccacgttaaacagagtcctttttcctcattttcaccatttcaaggccacatggctaaaggatatgtgttcataggaataaattctaaaatgtcttttactaattaaaattctgtctcttctgaggaacaatttgtcatcactcctggtatgagttatgaagtggccctgttaagagctgaatttgagccactgaatcttttcaaaagctgtattatgttggcaaaaagcaacgctcttatctagaaagaactgtagaagtgtgagataaaatgagcatgtttctctatgatactgggtggagtagggaatgaggtggaatgggctattataggcaagaatgttttatgtactcagaagatgtgggtagatagaagagaaaatgcagccttctgtctggctgtctctgagtatagacattcagatcaggacacagctagagcaatgtacggttgagggaccctccccccccacaacccgcaccaggccccgacgaagcttggctgctctgctcttaagtagctatgtttcagaacacaactcttcccctaacatgacatgcaactcacactgcccactagtaattccagagtcacatcaacctatcaggacacaacgacaccatttcagtgatttagtgctgcgggaaattaagcaacaacctctcctgagctgaaggagttaatagctctctggctggcgctcacttaaggtttatccctgtgcctgcgtctcagtctcccaggctgtaactgctgttgcactgagagagcagtgaggaaatctcttctgcttcttccttcctagctacttagggatgagctctccaggcaattcagttgtgatatctccttgattttcgggggggcacgtgtatcactgtgtctagaagtcttggaaagccaagtttatgtagccatgaataggtatttggataatttattttgtctgaagtccattgaaaggttaattttctaggtgatggtgaaagtgacttattggtcacttttacccctctgacatcaatttacatttggagtagcattgagagttgttgaagagagcatgagacaggacaacagaactctggttcattctaaagccagtctgatggtgaggaatctgttgccagaggctgatttcacagccatgcttgggaaatgtatggattcaaagttcattcattcattcattcattccgtaaacctgtactgtagacctgttttttactgagcactatttgatgtattgaagaactagagataaacagttgtcaggttttgccctcaaggaattcacattctaaaaaggaagttagacctacttataaataattatgatgcaatgggttaatgataattattacaacatttttgagaaacaaaaggatgcctaatatcttgcttagataagctgggaacaggcttcctggaggtgatgccatttgaacgcatcagagactcataaatagattgaagggtctgcagggagacaaagggggaaggcattcttagcctggaaaacaggaacaaaagcaggacatgatggtgtaggactggaatattcccagggctggggaatccataacgagtaactgctgctgttggagcaaatcctgatgatattctccttcctcacatgttcccaggaaatgcacacaatgtatctgtcacatttatgtatttgcttgcaatgattcatacttgtttaaacattttccaactcaggatttaaacttaactataacaaaaaattcattgttatgagacaaccacctgccaatctacaaaaaatactcctttaccgagagaattggtcaaacaagactcaaaacacatactctgttttgttctaagaactacaccctgcagcttaggtctgggatgacctccagggaagagcataggttatatgtgtctggcttgtaagaaaataactctaccaaagtccaagttctagggttcagtgcacacccattcattatcacagagttgggatttatttctatgatcgtccaagatttcttcttgataaactggtgcttccaagtacagaaaacattacatgaaagacctttcctttcctcgttaggtttaatttttcccaggaatttacattgctcctgaagcactaccacaaggtgactgaatttttaggtacaattggcatctcctggaatccttatcactgagaccttgtgaattcttgcacatgttgggatcataaaacaccacttttttttctggctgcagagcttcaggattatccccctcttttgtttttcagataggagcatgtggatacattggaacattggtgcacaatagttgttggttgatccaggctttcagcctggcctgcacagtcaaaggctatcaaatgcgtaagtatgaaaagcaagtgtgaaggcagaaaggcagaagagggaggatagttgtattgttctagttttaaaagtgggccaaagcacataaagatataaaagtggggtcagttttctccagatggaggctgtagaactgtagtacattgtgaatctattgtctataacatgagatgccttatgctaagcctctttgatcatcttcttgaaacttctgaaatgctgaggacttggagtcagggtctggagattggatgtagtgctgtagtaactccccggactttttgagtcaagattaggaaggattctagaagcccactcaaacctgctgttgctccacttaatgtcttggggcatcaagtaactctgacttcaggctcctcctgtcctcaggaagctcagagagcttcaagcctagggaaacagtagggaggagcatgaggatttctagagttagactcctgccaagacaaaggcagaagtgtcattgccaccaccctgcctcttgcaccagaaccaaggacgacatcacacgtggcctaccatggcacccagaatgggtgctacttggacacagtgctctctctatttatttattattatttatttatctatttttaaaaaaatatttcaagacagggtctctgttacccaggctgaactacagtggcacaatcatagctcactgtaaccttgaactcctaggctccagcaatcctcccacttctgcctcctgagtagctgggaccacagtagctgcctcctgagtagctgcaccactatgcctggctaattttttaattttttgtagagatgttgcccaggttggtcttgaactcctggcctcaagcaatcctcctgcctcagtctctcaaagtgctgggattacaagcatgaaccaccacacccagtcttttttaaaaagattaattttttttttattatgtgatttctatttcaggctatattttgccgaagcctcactgggacgttgtttttcacttaagataaggcatactattgatactccttctaataagccatgctgtgctcattattctgctggttacccctgggtatagcccattcccagaatgggtgttttcttttgtataagagcatttccactggcactgggacattatttctctgtggcctttgttggaggtccctttcttcctaagagagagaaatactcaagaggcctcccacgtaaaaagggccctcctgagccttgtagtgtgaagagttcaatgcatggtcagccttatgaatcagtgttgatattggattggaagtgtgtgatctccttgtaaataaatcaactcataagtaagtcagagcatcagaatgctgcttttatgcctatatttcccaagcctgaccatacctcagattttataaaattacaatgaaaatggatgttaattttaatgtgtgtttttctactgttactatagctgctgctaattcaccctgtacacttcccagtggggaagcaggaatcatttgggacagcatatgttttgccttcctcctgctgcaaagaagagttttcatgagttattattttctacatgttgtggctgatataaaagcttcccagattctggcatcaaggtgggtcaggccatgaaatcaggtggtttctcccaggaaacttgcctgaaataatattgcactatcatttctgtctgagcttgcttctagaacccacaagaagttaagaaatcccttccagcaaaaccaatccaagaagaatttagcacaaggcctgtaaaatagaatagtaacaggaaagcctatgtaaccatcagacttctcaaggaatgggggtgccatggaaggccagaggttcactggtcaattgaagcccttgcagaatccaccacttctctagaagtggctcagtctggtctcagacaaaacagcaacatatgccacgttggtctggagtttagtccatcttacacctacctccccctactaacctgcttttcttctctgagccactgacacaatttgcattactacctgttttttcccctaggctccattcttcttccagtttttgcccctgctcttgtaagtttaggaaaaaagactggggagaggtaataaagtgaagtgccctgaggtgggggtgggtgtcgatgactagctctgtggcccccagctgctgtgtatgttcctctcagaaactcagaccttgcctaggtcccatcagatgcttggtgtgaataagctgatggatactgggttctattacatgaaattagcaatatctatcatttgactcgaagttcagactaatatatctgtgtttacctacagtttcgctagagtctgttctctttccctgccatgataaacacaatgtttatttccaaggtccatttatatgatggcagttgtcagcctctgttacctaacttggagtcaaatagaaagaggccctagtcggggacctgcagttagtcagaagagccttgtggcacacccagccctcattccgtggatgacaatgactttatgtaccgcactgctccggaattcattgttataatcattttctaatacccaggacattattttcagagcagaatacaatgtttcattccaatagtaaccttacttacttgtatataaacagctggtatttttgcaggtaaatgcatcttgtttgcctttcccaaaacatttggtctgtagaggtccttatataacctatctgatgacttccgcttgaaaacaatcttcctcaggctgctaaggcaatgtgctctcctaatttccctttttcctttgtggttcaggcttctaggtcttttttgcaacctctttctttgcccatctctcaaacgagaatgttccccggtgtctttttcccaaagttgtcacaatgatttagaaatcatgcccatcatgttatagtaagaatgatgacagtggttcagagtacagttcatgcctattgaagaaaagccgtgagttgatcaataagcaatgaactcataatagtgtgttcaaagaattcacattcattcattcattttttcactgccaactctgttacaaagaggtgatgttcacctctgccctcacagagctcacagagtagcaggaaagtggcacatgagcaagcaattctactacagtacacctggtatcgtctcagtccatttgggcggacataacaaaaataccataaagtaggtggtctataaacagtatacactcaattcttacagttccacaggctggaaagtccaacatcaaggttcgagcagattcagtgtcggccgagggcccacttcctcatagatggccatcttcccactgcatcctattttggtggaaggggcaagagaccccccttgggcttcttttataaagatagtaatcccattcatgagggctctgctttcccactcaatctactccaaaaggccttacctcctgtccgtcaccttgggagtcaggatttccacatgtgaattgtaggggatgcagacattcagacgacagcaggtgtgatggtaggagacactccgggagccatgaggtcacatcaagggaatataaccagctgcaggggcgtgaaccaggtggccttccattcccagtgcaggctgaaggatgaagaggagttagtcagaggagaaggcaggggaagcagcccagtgaaactacggagggaagtagccatcagaagctcacagtgactgcagcgctgagattggaagatgaggacagtgagtggtgagtgataagctccaggccaggagaggccaggtcctcagggggctatcagcccagatatgtctttagaaatactcccacagtcttaggaaggccttgcagtgtttaaacaagcaagtaatatgacgtgtttgcatttcaggaagctcactctgtttgtggtatggagaatagatgggtataggcagcgctgtaggcagagagacagctaagcagctgctatgataatccagggtagagatagcagctagaccaggataggatcactgagaaagatattccagaggcaaaataggcacagctggaaaactgcttggaaggaagggagacagtgatagaaagggaagcatagagggtgatgtgcccaggattctggcttagccaaacggtggtgccagtcccaaatataggaactcaaacagggagggaagactgaccgcagttgtggagttgtaggtctcatgggcacatgaaactcagccagttgggaattccagtgggcagctgcatggacaggcctggagaagtgaggagatggagtgccatcatcacacagatagtattgaaggaggtgagttgcagctgctgagagggggtgtgagaaatgagaagagaaccttggagaacattcaggtttgagagatggcaaagaaagaggttgtaaaaaagaccgagcagcctgagccacaaagaaaaaaggaaaactaggagagcacgttgccttaggagcctgaggaagattctttccaagtggaagtccatcacataggttatataaggacaaaaataacaactgaacattgaaatcggtgaccttgacagtggggtcaaagccagacagcaacaagcagaggtgggagttgtaaaggcttagagacatgaccgcaagacatctgactgtgaagggggagtgatgtaagtacctacataggaaaatgtgggatgtggtcgtgtgtcggttttctttttcgtttttttaaggttagcaagacttgagcatatttgcatgttaatggacagaattcggtactgatggaaagattggaaatgcaagaagagaggaagaagcaggaatttcgtgtcccccaggctatgggtggggaagggacctggagcacaaggcaggcctagtcagacaaagggtacctcttccactgtccctgcagggcaagacgcctgtgggagggatggtgcaggaaactgagcaacttactgccttaagatttgtgttccctctgggaagcaggaagctaggtcatttactaggagtgaaaaaccactccacagacttcaagacttgagaaaagcgtagcagagtttgaaacagccactgtagagaagcacaagactttccaaggaggcgggggctctgcagagaaccatctgcccaagcaggtgttttttccagcagctgccaacagcccctctcaggacagggcgggcacactgtcaggttcctgcagatttgggatttgtgaagcatgtaacagtgtgacagagttgagaatgtgaagaaggttgaggagatttatggagacactgaggttgacctgagaagtgagaaagaacagaagggagtggaaggacaggaagaagagaatcagggacaagagactagatgtcccacagatggagcaggaactggccttcacatagtccctgaaggaatccccagtttctgctaattgagtagaaaatgaatctgactgtaccctttttgcaaatttctcctcttggtataattacaataaggtcaggtgagaatgctttactgaagtctaacgttcagtgggacaggtttgaagaggctcgtgggtgtcaatgtcttggagaatacaaaacactttctctttactgatcttcactactgggcttgtgagcagccccttcactcccagggggaaggctgtgccctgttcacccaatgggaaaaggcttctagaaggggccttgttgactcctgctcccagccaggaaactacaagcagctgccattaagagatgttatgttttctaacccttagtaataattttcaggaaaaggggaacaacaatggcaagaatattgacttgttcatgtttccactttccctttagaggagctgaacttttccaggccacaattgtaaaagctgtaaaggcaagaattgaggaagagaagaagtccatggaccagctgaagcgacagtaaggatgctattgatgctcatcctccttccgtcttctgattgtgtgaccacattcagctggtgctccactgttggggagcctcaaacccctgaaaaatatatatgtatggactttcacaacttcctatttatttattcttgtgcgggggcagttgctcatgccactagactgaaagtgaaagcagtttaacagaaagatcgctccagcatggtggaggtgggcgctatcttgcagaggaccagggatcaattgctagctgagtgacttactttagaaccttgaacaggtcatttaagtcctctaaatttgagttttctgtttttaaattagggctcacaattctgccttcctgggtttttgtaaagattaaactagctaatgaatgacacaaggtcttgctcagtgccaagtacttgatataagcattcattacatctaagggagtaaatgtggagtcagctttggaagcatagttttagataatatcatccagtctctttggaaagaaactgatgaccctggtattagatgacttaagagtcaacactaactagaggcagcactagaaatataagccagagttctttatatcccatctaaggtttttcccaccatcccattctggatgggccaaggggtagactgactccactccggagacttgggaattccatggaaaataatcttcttagagtgaaatttccagcaatgatggaacctctgaggactgtttggggaccaggtttaaaaggtgatggccatggaattataagcctagatactttccccaagcaaatggagacaccatttgccccctgggaaagttctgtaagtttgctaaggcagttttatctcattcagaccttatttcccagctttttttcccaagcagaaatatttcttagtataaattagattattccacagcattattattttcataaagacataagttatatataaaaattataatgtaaatgcaatatggtacaactgtttttattggtgtttctagttatccaaatcaggtctagaagaataacaaatttggactcatgtttagaatatgttcctaatttcccataagtgaggtctattactgtaattctctttgctaaatctttccatttgtttaagaatccaaaacttgggagaataaaggacttgtatttcataatatgccatgttcaaattggctatgatacaagatgtgagtggacatcaagtatagcttacctaactttagcataatcattattgatcatattattaagactggcatctatgcagtgccaaataacatgggaatacacacacacacacacacacacacacacacaaatatgtatataaaagaaaggagatccttgttgctaatgagcaaccattttacaattcacaagtattccaaagtagtttgtccacgaatttagctatatacgtaacagcataagtccaaagtactgaccacatgagaacaatgaatatgttcttggcattactaatgttattttactttataggatggatcgcatcaaggccaggcaacagaaatataaaaagggtaaggagaggatgctgagcttgacccaggagccaggggaaggccaggacatgcaaaaactctctgaagaggatgatgaaagtatgtcaagacattttcctcttattcaagttttaacattgaataatagcatgatattgagcagggctgtaaaataacattacttcttattctgccaagattatcgatacacttttttgattcagcgagctttattttcccattgtgaatggatatattcattagtttcataaagtatgtatttgataaatcaattagtttacaagtatccactcttcagcaagatagctttaacaaatacataacctagcttttgttccacagacatctgtttctgcagtagattggcaggattttgtttaatttgtttcttttttggttttgttttgttttgtttttgagacggagtctcgctctgtcccccaggctggagtgcagtggcgagatctcggctcactgcaagctccgcctcccgggttcacgccattctcctgcctcagcctcccgagtagctgggactacaggtgcccgccaccacgcccggctaattttttttgtatttttagtagagacagggtttcaccatgttagcacggatggtctcgatctcctgacctcgtgatccgcccacctcggcctcccaaagtgctgggattacaggcgtgagccaccgagcccagcccgcttaatttgtttctttaagggatatatttccgatatacagtatactgctatcttttatttctataaattttatatggaaatgaaatatgtatgtgtattttatgtggcacctgaccattggtacctaaaatatcattcaatcgttgcctgctcaaatgaaacttaccatgaaatatatattgattatatctaattatggatttattatatcaaattaaagtttaaaggatcttttatagaggcttgcatgcttctctatgtgaatggaagggagaaataatgcatgatattttcccagtgcatagtatctattcatgaccaggaaatttatattttccagccatgcattaaaataatcacaagaaaaaattctgcttattgtaatttatgtactttaacaaattatttgccagtaaatgattctgtaaaatttgggggatgcttcctttctgttaatacaatggaatattcaatgtgagatgtatttttgacagataatcctttcttttttatatgtctttgtatgccctcagtcactaagaagaaagtgaagatgtagcatactgttaaaagaacaattagtatttatcttgtgaaattgactgttaatacatgtatatttttcagattcagtatagttcctttacctgacctctgatatacttttgcaatttacctagatttgacaattgagttgttaaagcgtggttttcaaaatttgttttctcactttatacgaattaatatgtggacgtattttattttaggagaagcagacaaacagaaagccaagggcaaaaaaaagcagtggtggcggccttgggttgatcatgcttccagtaggttttctcgatccccttacaacctcatcgactctaacccttatatccttgaccagaattcaggcgttcccgtgacccatgtgttccatgcatggtttgatccttgtgacttgatagggggtcggagtgtaggaaaattttaatgtcagtgggtctttgagcccggggtccaattcttccagagacatcagcacagacgttctgacattcttgtgctggctgtagaaagccaaacacgtggcttatagactctagggcataatttatgggctcagaaagggaagaagaattgaatattatattgcccaattctgaggtcgagagccctattcacatacatattttatggctaaatacccttactaaaaatgagcttgggctccaccttggactctgatttaaggatgatcattctattcaaagggtcagtgaccctttctctgtaaggcactaggcatggatgccagtgagcctcccctcccctcattcccacagctttgattttatttgcatttaaggatttttggcaatttattaaatagaaagatgagggataacttaaaatgcactcactttcttactacgcctcctccccaatttcaaaaaggcactctaaattccaatgcccacatgtggcacagccttcaagccacctgatgctcagagacgaccaatgaacagcaaaaaccagaaaactatttttaaaagcagatcctgatagccacatagaatgcagtgtgtttccctcctgatcataaagatgaatgaggaattctggaactcagtggctatatttgctctgcttagcaaagaaaatatcactataggtcgatgggattatagtggaatgccccattccaatccagtcctctttaaatttcatagaatattgaataattattattttgcaagttacgtataatgtcgtcttcagtctttacatgatgtctccatacttgcagctaatctaactggacaaggaatatcactgagacaaataacatcacacaattgtaggagtgaatctactaggaggatatttagaatcactaggaaatcaaataaagtagaacttcttcccatacctaattattggtttcacatagatctgacgttggcctctctctcccaagacataattttctaaatcggcaagctagtttttaataaagcaatatttgaaatttgcttggtatatctggatgtaatcaaatttaatcccaaatattgaatttcaacattacaacaaaaaaagaaaaacacaagattagaaagagttttatttaattttctccccaagtccaaagacaaaagattccagtcggagtccagtgtgactcttctatttactgttcagggtatgacagtcacgctaacaatctggtaaatgcagtgcacaaatgcctatttctatcaagtcacaagtaaactgtgcttttctttatgtttttaaagggcctctgctaatttagagagacctatccatttcaaaattgtgtcatattgaatgttttttcacctcacctggggtaaattcccaccgcggtcattgtggttgcctttcctttcctcatgtaaaaatcgcatttgcaaaggaattggatatggtctgtgataactatcttacaagttgtaataatataaagaacttcctgtgaatgttgttgactttagattttctggttcatttcaccctcattatatcaagttattgaagattgatgttaaactacatgtgccttgttacaaaaccttatgatgcaataatgcagaaatgtgtgtaattcatagtttggaatcatattcagactgtggtgttaaattttttgctgcaaaatgtatttctttttacaagtgaatgaagaatgaaagggaaagaatgtgtgctgtattgttgtgtctatgatgagttccagaatttatctttagatctggaagtactttgttggaagcccttaatttgatcttttgagtaactgggctttcaaacagctatttcttagagaagccaagtgtaagaattagtgtagttggatacacatgtgtaaatctattgacaatacaaaaatgttgctatgttcttgatgttattagtaagcagtgaagattttagcatggtctgtatagggacagatttcctacttccatacctatgtacacacacaagattgcattattgctgttcaatgataccttccattccaataccttatgtttcaatattggttcagtactgcctaaattaataccaagcttcatcttattgataaatatctgaaacagaaggccaagttctgaggataaaagtagtggaatttaaaaagttaatttccaacttagtaatttagcagtaacatcaacatccatgatatgtatgtggacacaggctggagtcaggttcgccatctgagctaacaaacacgtgtgtaagagcttttctactcactaatttaacagatggcatgaatgaaaatgtgctctgtcattttcctagtttcatttcaataacattttataaggaaataagagacttttttacattttcttttttcttatgtgataattccactagctcacataaatattggtggtttctaatggtaaaatcaatgttaccactgcttgagatgaaaaccttttgaacttgtccatatgaataaaagttatcgaaggtatgattgaatacaatttaagctaatgttgattttggaacctataatgagggtaaaattctcgatcttataatagtctgtgttttcccaaacgaccacgtgatgtagagtccacatcactttcctgcaaatctctcggcttatgtgaaggcattactttaatggtcttcttcactatcaaatgtaatgctgtaactttggtttgttcttgcttattctcacttgtgttgtattgcatttatttcccaaggcctggacccagtactctgggcctggttctttcttcaaaatgaaaataacgaatgacagtgcttctgttcaaggatataaggcccaattcacccactgtgtatcttcatgaatggaggcttcagatttttctgaaatcgtgggcaaaattacttaacttttggccatgtgaagtgatattcaagcaattaattttaaacaagccaaggttttccattaccttacaatgtataggcccaaaagacaacttaagatcaaaatatgtcatccaaaagatgcctgagcatttgaaaacctgaatataatttgaaaatatgttttcctgcgatgatgggacattgcttgtagcatcagaaatgtatatgttgggcctcttttctctggtagactttaaataatgatcaaactgataaagatttaatttattaaatttccttaaatctctgtacgttgtagttttctctgctcccaactcttgacacaggcattatgttcttgcagggaaagtatcagacaaggcaaagacaatccatactgtttgtgctttgtgtcttgtggtcagtagagtgctcctcaaatttcagaaagctgctggggagttccttgttgaccagaagcctagcagttgtaaaccctatggaccctgtctgccattctcagtctgtcttagggctacgacacgtggaagcagccagagcgctgttgttggtggtgtttttgttgttactgtcattgttgttgttgtgttgtgttgttttcaatgttacctgcccatttcatcctcatggcagtgtgtgcgtgtttttttgttttttttttttcaaatgtcttgccatgtatgttttgtcccttgtgttacatgtggagaagtcaggtctgcacagtgtaaagtgaaggaggagattggtgacactgaccttggtcctgaatcgtcctgattggcttatctgcaacggtttgggcccattcagacaaagcctaatcctccacctcactttggccttgtctgaagaccaaaattgctgaattttgaaatgatagtgttcagttattttggtcatctagataacaaaactggctgctgcagagttgatctgcttcatctatgtaaattttacaatgaagaagggagaacataccagatccaccctgtagtggccagttctcttacatggcaaagacaaggcctcatactctgtagacccaatatgccaacaccgcgtagcattagccgaagatgagttctcttcatcttgtgtgttttcctctctgccaacatctttcgttgtggttctcttatggacaatttgtgtatctttaggggacatttcattaataagcccccaatttccttatatgtctttcaagaaatgagtgaatattttgttttgcttagtggtcaggagtggagattattatttgtttgaaacggatagtgaagaggaggaagaggaagaattaaagaaggaagatgaagaacctccacgaaggtcagcattccaggtaattatggggaaaatcatttctttgctagttggaagagcttttcttattgacggaccttcattgcaggcctagacacctcctgtaatattcatatgtcatagctccccgaagcttctgatttacatctgcaattctttatttctaattaaattgtaatgatgcctgctcccagcaacaccgtaattagtatcaagcaagaaccatgtacagcccaggttttcattcactggcactgaaacagttcctgatactataaacaaaaaataaagcttcgttgggtgaactcaatgtttttcttgcaagcaaagtgaaaaagacttctctggcattgcattggattgcttgaatggacttacattcaatgtaaggcgataatgaaaacaaaatccttgctttgttgtggagcaaatgatcatttaaatgttgcttcagagtttgaaaaccgtttcatatgtattgctaaagatttgagaatatattgaactagtaataaaaatatgtggcacagttctggttttttcagcttagctacctttctgttttagaacctgctgtcccattctcagctatagctcaccagcctaatgtagcatattgagtgaatgtgaatcaatgcttgttaaagatgaggctttgtcattagagtcatgtatgggatgaaaattggtctgtgtttcttttatcaattaactacacactagggctgttatttcccatttgttttcctacgaggcacatagagtgatgtccatcaagccacatgatatgcccgtgataaggccttcgtcagttttttggccaggacttctcaagtgggtggggcccatccatgcttgtttcccagtgacatagaaaaactgaattctccatagagacaccttggtctgatgctttctttcttcccccattgcttcttgtgtctgtttcttcatgaccgggtttttgtgcatgtttgcagctggcttatcaaatactaatgacttaactcatttatttttattcgaaagagttttcttctaaccaccactcatcgtgcagccaaggagagaacatgaacatcttcactatgttggatggattacatgcaatgattgactattttctttattcctaacttacaagcagagcacattttattctagcttcagtgactggcatcttttaacctagttggtgtaactgtagagacaaattcatgctgacatcatatattaaattactagtttttggttttttctactaattactcttgctttgtccttctttgtagagagctattgggaagtttgcatcagccattttagccttgccaaagtctgtcattaaacttcccaaaactattcttcagtatttaatcagagctgcaaaggtatttgatgttttactgatgtgtagtgtgtgactctctgctctgtagaaatgtagagaaatataccttcattgccctatctctgcattttctcggttctatagatggtaccatgaaggaattacaggaacgtaaaatattagaaaaagttttccaaaacaagttcttagaagccgaagttcttattatttgactcttgctcttaagtggacaccagtaactatcgaaaaatagaaagagaaaatgcagatacagatatacttgctgtccttctcatggtgttgcctaagtcacatctcattttaaaagggtcacatctggttgcatgaatcagttctgatgagtaaaaagggtgataatttttctcagaaagctggtaaaattctggataagctaataaaagatgtcttttactccgtctctcattcgggtccctttcagtctccgtcttccagtttctgcactcggtacagccagcttcttcctgggctgatccacccagtgcagtctgcgggctcctcaatcccacagatccatgctagggcttttgagtacactgtcaaaaattatttgttgattaacctaatgcacagttgaagttattcagctacctatgctgtagtcgcttcgttacggaaaaacattaataatgaattcctattcttacattttatagaaagccctttctcctgaactcagtcaggggcagccactaaaatgctttgctctgtatgtccctcacctgttaagcgagtagttcgatagtgacatagaccagtgcttctcacattttaccctggggtcttatttaaatgcaggttctgattcagcaggtcctatgggacctcacagtgtgcatttccctcaaactctcatgtgaagcacaaccgtggctgggccttgagtagcaccatccacacctccaggttccttctgcttttaaaatgccaggatcctgttttttagtgtagtatttaccatttctgcttctcccaaattcttttccttttattttctatgactaccatatgactttctcaattcatattttagaatttatttaaatgaaatataacaatgtaattatcctccatcttagtttcttttcaaaaaaattatcttacagacaacataaagaaggtgctagaccacacctgaatcaaaggacagatgatgaaacttcaccaatttcagttaaggatctccactttgataaagctctccctgtcttaaagaataagtgtattttcacataagttgttagtaaaacaaatcctatattcccctgatatatatggtaaaatttaagataaagtcaggaacgcatgctactggtagtagctctttggagagctcaaaggtctttcatgtaaatttccatgtatttttctactcctggttcatggagcttgtgtctgattttccagagaggcgcatccagctggctgacaggtgcaggtgcaaagtaagaattgggaagttctggctgggcgctgtggctcacgcctgtaatcccagcactttgggaggccgaggcgggcagatcacgaggtcaggagatcgagaccatcctggctaacacagtgaaaccccgtctctactaaaaatacaaaaaattagccgggcgtggtggcaggcgcctgtagtcccagctactcgggaggctgaggcaggagaatggcaggaactgggaggcggagcttgcagtgagcggagatggcgccactgctctccagcctgcatgacagagcaagactccatctcaaaaaaaaaaaaaaaaaaattgggaagtttggtaagagccttccatttcttgactcagtaaggattgggacgtttccccctcctcttcattgtcaacgtttttctgaccctcttaataattcctggaactgtaaaatgtttctatttcaaaacatcaaagttaagataatttacctacaaataaggaattaccctatgactccctcctctctccgttttccccagtttgcatacctcaattctcatggcagtgaggcagcactgacatgcttcttctttaggggtcctttgttgagccaggagtgcccttttataaaccaaaatgttaatggcacccaccctttctacaagacttcttcgattccacccttcacatcccttttcctctccccttttcctcccagtttcctttttcttcagagaaaaagaattcctccaacttgtgcgcctcatattcacaaatcctcaattacttttttgttttctattttcgggattcgtgcatcatctaaaagcaatattgtgataacacttttttaaaggaaatgtcaccatatgttgctcttaaacctgaaaatttcttatgttcagtaatcagattattttaaagcaatcaatattgtgcagaggcaagttgcttattaatgtactataactcaaagatattcttgatagaattcccaattaacacccaattaacatagccaataaacatctactaaaaattcctttattcagtcctcctgaaaattccagttcgtcttcccattatttaaaatatgcttttggcataaaatagaataattttttgcctcctggaatttgttattcagaaataatacagatgttgcatttgttttaatttctcgtgaaattcagatttctaccagtgagaaaaaaagaaacagtttttctattatagtaacctatgacccttccatttccatatatggaaaagttgagtctctctttactttctactgacttcacaatgccactgatttgcttatgctgtgtttttcaaagatttcagaaatctgaaaatactatagaataagatgaacagatctgggtttaaagagctcccagaaaacatttatttaactttatcatcataatgaaaaacccagcttccctgagacccaggtgtgtttgtggtgcatgagaggcatgcctgcttggcttcttgttgctatatggctgactttttctatcaaggttttctttttgttctttctgcatgatttgggagactcttggtatgggggctcttcacaattgctctttcctggttctcagttataatatattaatgtaactattttcagctcttgactgaaaatgacaaaaggcaaccaaaagccccacagtttttctttaatgctattctggaataactccttaaccttaatatcacattttttttcctcgcaaagtactaatcattctccaaatccctttctcaagtcattggtaatagctattattcagaagggagagtatcaaatgcacaaaactattttcccaaagtaaataagactactaaagatgttattttgcttttgactcaaagtttacttgtgatgggagaaagtactgatactgaatgagacttccagcttatacctattgtggacagtgcaaaagcatcagtaataagtatcacaaattgtggtgagatgtagggacttgggagaaatgatggtttatttggtgtacccaaagtttatctcatgatatctgtgataccagatgaaatatattactacaacatctgttgtctttttctaaaaaaaaaaattgaatctcatgataataaaaatagcccgggatgtttagtttgtgttgggaggaaaaaatatttcaaaagtcaggaagcttggtgtaggtcccttttatttcaaattattaaaaggccagaaaataattgaactttctcccttcagtttgtttatcaagcctggattactgatcctaaaacagcactccgacaaagacacaaagagaaaaaaaggtctgcaagagaagaacggaaacgaaggcggaaaggatccaaggagggtgagtggtgggtggggtggctgtggtgggtgtggcaggtttcaggctgtgctccccagccttgtctgcaaaggacagaaacttctgagggattaagatttttaaattctaaagaatgccaacagttttaatttgtcctaattggtcatttctgacacttggaataaattaaagcacaaagttaggagatatatatatatatatatatatatatatatatatatatataatcttttaagtaggaaaaaaggagagttgcaaatgaaacccaaaaaaagtagaagaaaacttatttcttacatggatattaagtaataaaaaaaaagaaatactacaggacatgacctgatcaagttaaaaattgttcttagaaaaagctaaggccaggcgcggtggctcatgcctgtaatcctagcactttgggaggccaaggcgagtggatcacgaggtcaggagatcgagaccatcctggctaacgcggtgaaaccccgtgtctactaaaaatacaaaaaattagcccggcgtggtagcggacgcctgtagtcccagctactcgggaggctgaggcaggagaacggcgtgaacccgggaggcggagcttgcagtgagccaagatcgcaccactgcactccagcctgggcgacagagggagaccccgtctaaaaaataaataaatagccaataagaaagatgaaactttggcaatttaatcaagaaaaaagggaaagcacacttaaacaacactcagaaacaagcaaacaaaaggaacatatattcagcgttataccaagatatttgaaaacatgatataaacacatctctaagggtaaaaatatttcaaactataataaaaaaatcaaaagcgaagttgaagtgcaggtgattcactcaggagcaatattttattgtatatatcagactaaagatgagtattctgtgtatgttaagaactgctagaaatcaagaaaagaaaaattcaattcaatcaatgagagcgtgtgaaaaaacaattcacagaccagaaaacaaaaatgaccaaaaggtgctcagtctcactataatacaagaaatacaaatgaaatattctgacatactgttttcttaacccattggattgacaggaacctaaacattggataatgtcactgcttgggagctagtaggaagataagtacttacatataccatgagttgtattgtgaagtagtaggtctactttgaagagttgtgtgtcattacctgctaaaagctcaagtgttacatatcatagtacagatcagtcccacgcctaggtgtttggcttattctatagcagtacttgcacatgtgcacaaacacacatgtctaagagcattcatcagatgctatttgttaataacaaaaaatttcgaaacatcctaaatgcccatatgaagaagagttaaatacattatgttactaatatattatggaatgttattcagttctttcaaaatgagattgatagctttgagctggtatggagaacaattcctgacacattattaagtgaaaaacaacagactgcaaatggcacgcacattatgaaatcatgaaacaaatgaagtcagagtagtacctcaagacagtattttgcatttttaatgggtgcatataataacttatgaatgcaagagaaagatcaggaggaatattcactcattagtaacagtcgttacttcttgagaaagtggagattaagtggcatgattaaagataagcctcatctgttgtattttgtttcttttcttttttttttttttttgagacagagtctcgctgtgtcacacaggctggagtgcagtggggtgatctcggctcactgcaacctcagcctcccgggttcaagcgattctcgtgcctcagcctcctgagcagctgagactataggcgcacaccaccacgcctagcaatgtttgtatttttagtagagacggagtttcaccatgttggcaggttggtcttgaactcctgacctcaagtgatccgtccaccttggtctcccaaagtgctgggattacaggcgtgagccactgtgcccggcctgtattttgtttctttacaaaggaaatgtatccatagatggcttgtgaaatataaaaggcattaaaaaataaaaaggaaaaggtaatttctaatggaactctaattacaaagtctcttctttttgacctttcttctcccgatacatcctagtaactttatcttactttattgctttaagaagacaaaattaatacacaattgctggaacaggtcaaacagtaaagaggtacacgtataatctgccccaacccagtcacctcaaaatcctgtcctctaaggttacaaatcctaacagtatgttgtgttcactttcacttcatttctcatgtgcacacacgtatgcaggtggtttcctttattggtttttgttttttttttttttttttttgagacagagtcttgctctgtcgcccaggctggagtgcagtggcgccatctcagctcactgcaagctctgcctgccgggttcacaccattcttctgcctcagcctcccacgtagctgggactacaggcgcccgccaccatgcccagctaattttttgtacttttagtagagacgaggtttcaccatgttagccaggatggtctcgatcttctgacctcatgatccgcccgcctcggcctcccaaagtgctgggattacaggcgtgagtcactgcgctggcctattttttttttcaataagttcatgctttacaaattactctttcattttcattaccaatgtcatgaacatttctccaattaagtatttataaaatcatatcattcttttttaatagcttcaaaatattccatagtgcagatatgcataatttattcaatcctctcacctttaatggacataaggttgcttccggatttttgccacaatgaacagtgccataatagatatcactgcacaaacatttatacgtcataatatatatgagtgtgtttaaatgcttagcaaaggttaggaagaacatgcattttccacagaacagattcgcaaaagtgggatgacttatttagagtgtgcctgtttttactttaatagatatttttcggaaaggttttagtactttgccctcctccatgtgagggacaagagtgtccaatttcctttggcctcacgcacaggattttactcctgtttttatcatttttctttctaaggatgacaaatggcttttattttcatttgaatgtagttgaattcttaactaattaaactgagcatttttatttcacattttgttggcgattttttcttttcaagtctaggatttaaacacttttagcattttcctgcatcgttctgtcgggttgtttgttcttatcaattcatgctatttatatgtcaggcttcttatccctttttttcttttttcttttttttttttgttattactgttttaattgtctggcttccctctggactgggagctcagtgaggattctgaccagtaacttacacaaaaggcgctctgcacctcacctggtccaggaggggtttaggacttgggccaccaaactctagggcctgtccctcagggacaactgcagctgctcctaggctatgccagcctgtgccagagaccagctgtgagggtgtgggcaaagacaggaaaagcagaggccagtggagggagtggggacagggccaagggagctcttgggcttgattcacaaggcctgaatcactctgtatgtgtgtgtgtgtgtgtgcgtgtaatgggagtggggctaggaaaatcggtgccttccagaaggagtgtcttgttccctgccatggaaccttcaggagctgctgctcccagccacaggaagtagatcatataaatatggaataaatacatgaccagtgagagaggcaaaatgttggaaagcacaccccagaccaactgggtctctactaccccaggtagtaccccaagctcaggccatcaatcaccccaggagaagggatcccgacccccaccaggacccagtgagaagcagacagcacgaatgctgaaggagcaccaaggggacaggtgagggaagggagagactggagtaccgggacaaccaaagccatcttatgcaagaacaagtttctattcccaaaccaccctcatccccatcaatgctcagctcccttcctgcccccatgccttccctctgctcaacacagagctggaggcaggagggcgactcagtttgccagacatgctgctgcagatccccaggccccagggaggctagcaagggacacaaaccctttgatgttgccactccttctcaaggaatgctcctgccctcccaacaccccccaagaaacacccagaccgtggaagcacagagcaaacagcttcatgttctgggggcctatctggagcttctgtccagggcctctgtctgcagccctcaacctacatcagtcgggcagcaggcgacccagctccgccacatccagccggttggtggccatgatgtgcttcagctgctgccggtagcgtgccaagtcctgcataaggtggggcatccgggtattatccagcaccccatggggccgcaggtggtccacatcctcataggacaccttgcccagtgaggtcagcagcgggaaatcgatggtctggcgatgtcccagaatgcacaggatgccgttcaggtacacctggtccttgctgaattaacttggcagcgaggtgtctgtctggccgcgcttggcgcgcgcgcagtactcccagcgcacgtcggcgtcccgcacgtagcgcgccaggtcctggaagagctggcggaaggacagacgcacagcgtggcggctggtgtagcagagcagagcagcgcagcgcgccacaggaacggctgcttgcggagcagcacgctgtgcagggtggccaggccctcctcgtggggttcgccggccgtagcccgtaccgcagccggccctccgcgttgtgccacggctggcgcgcgttgttaccgccccgcaggtagtgggtgcctgcggggaaggcgaagggaggcagcgctgggcggggcgttcggggacccacctgctccacctggccggggctctggccgcgacgcttccattctcatgctcccgaacacaggctcgcacacaagctcttccagccccaggcagcgtgaagcccctcctccggtggactcgcacccaaggatccacagttgctcacatatatgaatcctctcccacccatccccccaccaccctacacccacgcacccacacacgtgcacgaactctcccgaactgacattgcccccagccctcctggacacaagaatacatataccaccctgcccaacatcctgggtgcccatattattctgaacagtcacgctgatgccttcggtaaaaaccacctcttgcccagagcaacaggattctcgatgaagagggacagacagatagaaatagtggttagtgccctgcaccctcctgcccagcctggccagtcgcctcctaaaccaggcgccgtgtgtcctcaagccaagtccattcccaggatctggccttccatccaccctggagggcccgcgtggtggttggcctggtgggaccctgagcgttctccctctggcctgtcagggcctcaccagccctgccgccactgtggagagaagtcggagaggaagtggagagagaaaaatatacccgaaaggaccaagagatgaaggcgagcccagagcgtgggcaggcatgttctggcctacctctgtgagccagagggcggaggcggctgctcaggaagggaaagccccgacctcaggagggacaggggagaaacaaaagggggagttagtggggcccctccttcccacgactcccagctcccaggcccctttcatgcctacccatccacccggatacccacaccctgacctatttcatgccacagcatgccctccaaccagtactggcgggctctggtcaggttgaccgccaatgtgggccggctgttctccaccatcatcaccgcctgggacagcaggtcttcactcagctgcaccacaacctcttcgacgcagccctccttctgctgtatttacccacaatggaccatatctggcacttggtgagcagctgcctgccggtggcagcctcaaagtgttcgtaggttccaaacttctccagaacagcctcaatgatgccaactgcctgatggatgaactgtccagaggcctcgcagtacttcagcacagccataggcatgggctcctggtactcgaactgtggattgtaggtgtaatgcgactgaaagaacttgtctccctcacggtccacgttggttggccgcagggccaccaacatgcaggggctcttgctggcactatggcctgcatcgctttgagtcttagtaatgtgaggcagggaggctgcaggccgcagggtgcgcccacctgggttccatcgccgtccaggtggaggctgtcccagggtgccacgcccccgccggccagtactatttacagagtaggtgctctcactgcgacgcatgtggccgccgtggcccaggtgcatctgtgagaacgactgctgctcaggctggggctgcagtgctggggggactgccagagccacgggcaaggccagggactgagaccaggggtacagtggtggcccatctcggtctgagtgcttcagcctatgacgcagggacagcagactggtaggtgggctggtgggtgcctgatcatacgcctgagaccccgagtccagcaccattctgtcttgggggtcacatccagctgggtcactccaactccccacactgtcgacttctggggacacagaagggtatgtggagaccagcatgagtgggtgtgaccagaggaccagcaggccctgtactccgcattgcctttggtgggcccaggctctgctaccaggggtctgattggctgcagcatgcattgcctccagcagacttcacccaagtatgctgggccaggagaaagcacttttgttttcgtttttgttttttgagacagggtcttgctctgtcacccaaggtggagtgcagtgcaatgatcatagctcattgcagcctccaactcctggcctcaagtgatcctcccacctcagcctcccaaagtgctggaattaaacgcatgagccaccatgtccagcggaaagcaagagttttaaacacccacctagatggtggttactggaatcctctaagcctgagctcctgaaggcaaggactgagccccttattcatgattctaatctctgtgctcagcactcacttaatctgggaggtggtacagtgcagccacagctgcctgggctgattaggtaggtgagaaggcctcaggggctgccttctgcctatggcatcttctcagtgccacccctgcccacccacctggctttacccacatcctcttgcccatttttcctcagtcaatttgaatgtctgagggccccatgcttatgccagtaccccccagaataccctctctcctctgagccatctgttgaaatccaaattggaatctgcttttggggagcagagggaagcttcagcaaatccaagccaatctctgccttgtcccctatctgagggatctttcgagtggtcatccaaggccagtgacagggcgctcaccccaactctgttccaggactcagtccaatcccgtctccccccagagactgcctggagaggctccagctgccgagctcccttgtctggtcagcaactcccttccagcatttctcctctctcctacatcatcaatctcttcctctctactggagtctttccatcagcataaacacatgctgttatttctccatcttaaaaaacaaaacaaaaccctcactagtacccaccctcctccagctacagccccactacatctccctccatctgctcctattgcagcacatacctcgagtcatctatacccagtctccagttccttctttcccgttctctcttaaatccactccaattagccttttattcccagctctccatccaaattgatctgatcaaggtcaccaatgaccagcaatgaccttcatattgatcagcacccaatacagttaatcactgcctcctggaggccaggcgcggtggctcacgcctgtaatcccagcactttgggaggctaaggtgggcggatcacctgaggtcgggagtttgagacaagcctgaccaacatgcagaaaccccatctctactaaaaatacaaaattaactgggtgtggtggtccatgcctgtaatcccagctacttgggaggctgaggtaggagaatcgcttgaatccggaaggcagaggttgtggtgagccaagatcatgccattgcactccagcctgggcaacaagagcaaaactctgtctcaaaaaaaaaaaaaaaaaaaaaaaaaaatcactgcatcctggacacatgctgtccacttggttttccaaacacactcgaacttagttctccagttctcatgccttgctggtcattcttaccttcctgacctcttaacactgtaatattccaggacttgtctatggaaacttcttcatttatgttcacccgctaggtgttctcatccactctcgtggttttaaatacgttagctcagacttcttccataaactttagaccagtgtgccaatttcagtgcaatttgagattatcccttttttgtatgtttcagatattttttccaacccaagacttatattttgatttagttatggtatatgtggtctaagcaatttttattttttttcttgtgtcaaatgggtctaaatttccccttgcagtttccaggtttccatcttgcttttaagaaagtctcttggctgggcacggtggctcaccctgtaatcccagaactttgggaggccgaagggggcagattacgagatcaggagttcgagaccagcttggccaatatggtgaaaccctgtctctactaaaaatacaaaaaattatctggacatggtggcacgcacctgtaatcccagctacttgggaggcttaagtaggagaatcacttgaacttgggaggtggaggttgcagtgagctgagaccgcaccactgcactctagcctgggtgacagagtgagactttgcctcaggaaaaaaaaaaaaaagtctctcctcccaaatatgatgcagatgtttcccagattttctattaattttacttacatcttaatttttttttttttttttgagatggagtcttgctctgttgccaggcttgagtgaagttgcacaaaatcagctcattgcaacctccgtctcccgagttcaagcaattctgcctcagcctcctgagtagctcggattacaggcacataccaccacacttggctaattttttgtattttcgtagagaccgggtttcaccatgttggccaggatggtctagatctcctgatcttgtgatcctcccacctcggtctcccaaaatgctgggattacaggcatgagccaccgcacctggctacgtcttaaatttttattctatgaagtggagatctaatttgttcacttttagatggatagacaattacgttattccagtttattaagatgattcatccttttcctactggatttaaatgcctcatttgtcagtgttaggctctctttcttctcgggtgtgttttcagactctgtattttgatcttcccttgtattgtctcgctttgagtcaatgccacatactgttgagtctagtaactatagagttcgttttaatttttagtgaggcaaactcctctcactacctttttttttcagaattgtgtttgctgttctcagacatttgtccttccggaatgtttggatcagaacaaaaatttgttctttggtcatcttgaaaatagctccttgctctgtgtcataaagattatttattgtgcacaggcagcactcttaacctaccaatcaaagacagcaataacttaaagatactcttttaatgaatctttactcagcactttcttggtacgaggcgtcatgtcttccagatagatgaagcacatggatcccattcttctgaagtgccagctgttgtcatatgtgccttatgtatactgtagtaactaactcgatccttgcaacagcacagggtcattttattatccctgctctacagaggagcaaataaggtcccagagaatgaagcaacttgccggaggtcacacagccattcagtgagtagtgggtctgaaattcctactagacttctttgttctaaagcctttcattgtaactggtaggcaagataagtatagggaaaaaattcctaatgatatcaaaactgcaaagttccattttaaaaagtagagataaattaatgtgggacctgagggagaaaggatttcttgtagccaagtatgtcttcagggaatgctccatgaagaagggagtatttgtacacagcctgacattctagcagaagaaagcaagcccatgcataaaaaataaagagcaggtcagcttagctggtcaagaccggatgtggagcagcagtagtaaagaggatggcagaaaataagtttgagaagattcttggagtcagatcatgaataaccttagatagggtaaccagataaaatgcaggaaactgagccaggagctgtggcttatgcctgtaatctcagcaacttgggacgctgtggtagaaggatcacctgagcccaggagtttgagaccagcccgagcaacatctctaaaaagattttttcttaatatagtcaggtgtggtgttgcacacttgtcctagctacttgggaggctgaggagggaggatcacttgggccctggaggtcaaggctgcagtgagctatgatcacaccattgcactccaacctgggcaacagagcaagacctgactctaatatatatatatatatatatatatatatatatatatatatatatatatatatatacatacacatacacatacacacacacacacacacacacacacacacacacacacacagaatatatataggacatatatatgagatatatatattatatatatatatatacacacagagagagagaatatacatatgatatatgtattctctctttatattacctgggctccatatatatatatatacacacacacacatatattcatatatacatatatatatcctctctctatatatgaagcccagtttgagtttttaacataacaaataatgtttagcttaagtataatctggacatatttcatggaacatacttatactttaaaaatatgaagatttaagatacctacctcaaacttcacgtcattatttgaaaattctcaagatgtacttcctcagagcaacagtatgacaacatcctctatcagatgacagcatcaacaccaaattataaatgttctagcctcatccctgggtctattttgtgtctcctaacctgattttttcattttactttctcatctacctgttatccttctatatttcatatgtaaccctaaaccaccttatatcctttttgtaaaaaggtttatttggaatcaatcactggtacccaaataaataaaattaaaacctcaaaaaaaatgaagatttcttaaagaactaaacatagaactacccttcaatccagcagtcccactactacatatatattcaaagggaagaaaatcattatattaaaaaggtacctgcactcacatgtttattgtagcactattcacaatagcataaatatgtaatcaacctaagtgtccgttgatgaacggaggactggataaataaaatgatatatatgtatatgtcatggaatactactgtgccataaaaatgaatgaaatcatgtcttctgcagcaacatggatggaactggaggccattatcctaactgaatgcagaaagtcaaatatctcatgttctcacttatcagtgggagctaagcaatgggtgcacatgggcatacggagggcagtcatagacactggagattatcaaatgcgggagagttggggacagggggattgagggttgaaaaattacctgttgggtacaatgtttgccatttggtgatgagtacaccagaatcccagactttaccatgacacaatatgtgcttgtaaggaatctgcacttatctctcctaaatatatttttaaatgttcttaaatttaaaatttcttgtttatcttacattcaaatttaactggttatcttgcactttcatttgctagatctgacctttttagccttaaataagaggctatgaaatgaaatgaaatcctataatgtcattttaagatatgacaaccattttctataaagaacctcatagcaaatttatttatttatttatttatttatttatttatttatttatttattttagacaaggtctcactcttttgcccaggctggagcgcagtggcacaatcacggctcccaggttcaagcaatcctcccaccctcagcctcccaaatagctgggactacaggtgcgcaccaccacacccagctaatattttgattttctatatgttgcccaggctggtctcaaactcctgggctcaagctatcctctctcctcaacctcccaaagtgctgggactacaggcatgagccactgcacccagcattgatagtaaatattttaaggtttactattcatgaagtctctgttgcaactcaaatctgccattatagggcaaaagcagctatagataatatacagacaaatgggcatgactgttaatttcacataattttcacatgcaccaaatactattctcctttagatttttcaactattagaaatataaaagccattctgaactcacaggccatttggcaacagtcagcccacgagtactggccggtacccaccagcgaatgtagtttacacatccttgatttacataatttttatgctggcatggagtaaaataatctaagagctatgaattctaacaacctttccccaaggaactcttgaaatagaatgtcctagagttaattacaaaattccttttaatctagaagagtaacattggcatttaatttaccctagatggaatttaactcatctttattgaacacacttggcaggtcctgtggaatgggaagaccgggaggatgaaccaatcaaaaagaaatccgatggaccaggtaacaaaataaagacaaatatgagctgtgggaactttgaaaatgatacctgcccagatcgtatataatggaaggctgcctgaaaaattgtgaatcgaacactgttttctggactatgagtaaataatcagtatcccttggaatctcatctccactgaaattgcaaaatgactcttaaaagtaggtctggactttatgcagttggataaaatgttgaattagtgtcagtttgtaaattcctttatgcaagcacctatgaaagaggcttttagggagcaaattcttaatgtcccatggaagccgtcagaatgaaggcacacacaaaaaatactggcaattatttttaaaaaacacagagaggaggaggtaaatgagagagaagtaggactggcaaaattagtgatactctagaaggttagggccaaactcttcattttaggaggggaaaaccaagctcagtgagttggtgacttgttctggattccacagataagtaagagagtcagggatagaacccttgtcttctaactgccagtccagccacagtgccatttgggctcctcatagtatgtgatttggaggaaggtatctttatgcaggaagaaaaaaaggccaaagcctccaaatgaaatgaactcgatgctctctagccctctctaatcatgccatttcttcgtctgctttggagcgcctatgcggttatctcttcgtctgctttggagcgcctttgtggttatctatcagcaggccaggcgtcaggctctttatgtccccacacaaatgcttccaagcctcccctctgctggcacgaaaggagacttacggaaggccacctaatgccctccaccgtgccagtcctcaaacccagtcttccaattctaggtcattggacacacatatatgtggacctggacactcttattgctgcaaagcctcacaccgtaacagctgccaacacttcagatcacatgtcttgtttctcaggcactttttcgagagtttggagtatattaacttgtttaactctctcaaaacagggaactgaggcagagagagattaaccgacttaacctcttagttgtattaaccaagcctatagaaccactaaagagtagagttgggatttgaacccaaggagtctgaatccagagtgtgtgctcttaaccactgtgccctactgcccctgtggttaaagtcgagtcctcactttccctgttggtgagtcgtcacccaggttcacaaagcgcctgtgattcacgtctccagtgcggtggctgcagccttacaatcaggcccactgtagcaaaaccacgccgtaataatgttcaccttcatcatttctaagaaaacaattgtgggtatgagaaaatacatgtcgaaaatataaggagctcctaaagttcattgatgggtgtaactccaagcctttcatcctccagagccaagcttcccctttatgtctacacagagcagctagaggctctatctgaatgattgtgagaaatacataccttgcttgagattttataaaggatgtgaggaggggcggagagggaaacataggtgctcgtggcatctcctgttcagcggccacagcgactcacttcattcagcttcaagcagcggccgttctcttcctgtgcctccttgctcagcaaaagatacccgctcttttccttgcttcttaaatgtacctcatggaagactgttaggtgtgacatggttttgaggtttgggtgtcaccagggtagtgacagcacaggtgggaaattgtcacacagaacatcagatgtcactatatacacatattatataaggaagctagagaaaatgtcatgaagaaaatcagaaagaaaatatagttcctattcagtaaatggaagtggaccatcataaagctctcatcctcatcgtccttcccttgagtgggttgaggaggaggaggaagaagaggggttggtttttctgtattaggggtggcagaggcagcagaggtggaggagagaaggtggaaggggaaacagaagaggcaggcacatttggagtaacttttactgaaaacaatccacgcgtagagtggatccacgctgtccaaacccatgttcaagggtcagctgcacagggagccgccctgctttctgtttccactaaagattacaagttctatcctgatttggtctgccactgcgtgtgtgcaaagccccacaaaagcttcctgcatggcagctctcctccgtgcgtcatgagtatctgagtcacatgccttattagatgcacgggccaagagccaggtccagctttggtaaaacatcgctgggctacacaaaagtaaaatcaatggtattttgttcctttaacatcttgttgcctttcttcctcctagataatatcatcaagaggatatttaatattttgaaatttacctgggtcctatttctggcaacagtggacagtttcactacttggcttaactccatttcaagggagcatattgatatatctacagttctgagaattgaacgatgcatgctgaccagagaaattaagaaggtaacactgctggtgtaattctttttgctccttcccacattaagaagacattaaaagtcaatgtccaaaactccaggtaggataagacaaagccctttctttccaggcagttgtggcataacccctttgcttttctgtatatttaaatctattccacactaagaattaaaataattaaatgtcatgcacatgcacctacacacacacacgtcacagaatggcaactttattcatcctatccctcccctcaccacagtttgcaggtgtacagactttgccttgttctatatccctatatctaatagagaattatagttttagtctagaaagtgtagaaagtggtgtttgttttctcccacctgatcactgaagtctggaaagtttgatctaaaacttttttataataaaaagtaggacatacgcagaataacaaaatatatggtttaaagactgtattttaaaataatagttcatatcttgaaaggttactatgatttggcaaaattatctacctataagaagacatttacttagatctacctagtaatgttggaaaccacttatgaaatgagtcgacatcaatccccacttgcctagcatggtcctaatccttatccaggcatgcatgggtatgaaaagctgtctgtgttgagaaatgccaggtggctatacaggtagatgcctccataagaactgtggcaatgtctcattctcctcagggcaatgttccaactcgggagagcatccacatgtactatcagaaccacatcatgaacctttccagagagtcgggactggacaccattgacgagcatcccggagctgcttcaggtgcacagacagcccacaggatggatagtttagattcacatgacagtatctccaggtatttcactttctaacaatgggtttacttttgacaaaggtaaatgaggtggatgtcatcaaatataagaaatgaatgtgtgaggtgaaagttcatcaaaaccatgcatggacccccaccctcttccagctgtcgccatctgtacaacaaactataaggaacattgtcctcacctagaaggaaccaaataaaagcagatatcaataagacactattagctatacctgtgtgacccaaaggcacagtatagagatttccaggctggaggcaaggaagaatgatccctcccaaccccaaagttattatttgtgggacatctttagtgcctttcaagatagccgatccacagtgtcttctacattagggtcttctacttctgttgctatccttgatctttcccttcagaattgttaccttaagttttatgataaaaattcccaaaaagtattctgttagcttccatcttctctgagtttactattgtatgcattgtttcacaacaggattgtcagatgacacagtactaatgggttcgccaggggccagcactaagcactgtacctgggttacctcattttatcctctaagaccctacgagatgcatgctattattatccctgttttgcaaagacagaattcggttacagggagattaagaaacatacccaaagtcacacagctaggatgtatataaaagcggacccgcaatccaaaatcatgtggtttagctcagaacccaagctctcaaccaccctagtatgctgtctctcattgcctcttcctgcaccgcagaccaacttactgcctgtcccagaaaagcctcagaattctttgcatcacagtgttctagatagctgataacaattgtacagagctagattctaaattaaagcagaagtccctgtcttaggaggaaaaatcgccttgttagggtgaagcgctagaccaaatgaattacaccttatagccaccttcatgggtaaagaattgtatcactgagaacattcatgttttatgtttttcattaaacatgttgagtatcagctattctgtgccaagccctgggctctattctgggagaggcatataaagataagagtaatcccctaaatggtttgagcctaggaagaactgagataaggccattccctcctaaaatgcttgccctggggaggacagtagagactggtgtctctgactgctggtcagaaactcctggatggctttagagtcacactttagagcgaggcactaatgacctggaaaagtatttgtccttcacaaatgctggatatatttccagatgaaataggagacggagctgagaccattttattgatatcaaacccaaaatagacaactggatgttggaattacaaactgagtgaggaatgtgggtaaaaaaaaaaccaaaaagttttgccctaaagtgctaattaactgttgctgcattcctgtatttgagcctctctaattatgccaattattttgctacccaataattattattgaggcagatccatatttattggtatgaaaagatctttgtgatatatatacacagtaaaatatatacatatatttagtaaaaatccaagttttaaaataagatgtatgctaagcctaatttaaaatatatatattcatgcctagattgatttagaagtaatattcgtgcagataacactgtgcatgggtgtatccctgcctgctcccctaaaataggtattgattcttttaaagtcttttgagggataataaaagagactatatttttcttttaattggttaataatctttgcttatttatgagttccaaagacacagatatttcatctattattgtatatttttatggaaagaagaaacatttaggacagaaactcgttatgatttcaaggtcaaacatgtatttcctaattgagatttggtttaaagttttaattcatagaataaaatgactgattattggaaaactgtgtcatcataaaactttctttttcagtgtctttctacccaagaatatgcacatttctcaattattaatttctgaaaccattagtaatatcaaagttacaaagagaacatttaatatcatatccttccactggtgagtgttaccagagcgtcactgtgtcttcctgaaaacctcccacaatcaacattttgaaaggggagcttctgtcttcttctttgacagattccattcagacaaaaagtcattctttattttgaattttatttttactttttgaaagctattataactgttctatttagaagcttccagatgtattaaattcattcttattgcaacaatcgtctccctatctattgatcattgtatttaaactgaatcattctctctttaatttaattcaatatacttaattcattttaacgctaaaacttaaaatccgtgtctagctccatgttacctaagctcttaagtagtccagctaggtcctcccttaatcctagagggaccctgcatgggcaagtctgtgaaagcctgcaggtttgtgcagcagggtgggtggggagccaagacttgtctgaatgtggtgagcactcgagatgctgactggtgctgcttcctagttacagggtgaacgaagggatattggggaatctaaacatttctaaatctacccgctgtaggaactattcatgatcaaacaaccctttttcaaaaaccaagagaatgataggatgaaagaaatgctgagattctctacacgtaaatgtcccaaatgatgtttcttttatttgtttgttcatttatttttgtgtaacattcacacgcatcccactgctctcagctttggactgtactgctctgtatatatccaatatggactgggtcggatccaaactatgtctttattacttttaaattctaaaataaaaggctcagacagctctagtgaacttaaccaaaagtcatgatcatattcaactggaatcgtttcctcctgcgcggtgaagaatacgatcacgtacatgcgtagtattgagtttgaatattgcacctttgcatctttcttcgagaaaatatgctgccccatcatgtgatttgtaaaatttttcaaatgcctttttttaacctcccttcttgcttcattttgtaatacagagatttttttttgttacctgaatccccaagtgtggcaagcgaaatgggtaatgaatagaattgcctttcttcattaatttgtgatgacattaacagtaattggtgacattttttaatgaacctcttttgaaatttcatgaagccatatagtctcccacagggaaaaatcatacaaagatacaatttttttcatacaatctcaagggttttataggcctcctgagtatcacacatgagcctggcttgaaaaaagatgctctagaaccaaactctgaatcagtggcctcagagaatattcaaaggtgaattgaaaataaatttttcataaaataaacataggtgaatcccatctttatgacttttaactacataacaatgaacagtatgccccatgaagaaattaaatattataaatcacaattaaggaggaaaaacaactggttaaaataaactcaagtaactgcctttaaatctgacctaagattgcaaataggaaaccacactcatgataaaaaattgtgagttaagagatatttaaattcatcgattgctttttgacaaagactgtcaaaatatccccccagttttaaaatggtcagtcagtaaatacaataactagtaggaaaccagcacctttagaattaggttttaatgtatttttattttgtttttcaacctaaagaaaggggagacagaatagggcctatcttgttgccagtaaaggagttacctcacttgcccttttctgcagtgagctgtatttctaatttccaaatcatcatttgtctacactgtagtctccagggagccatgctgattgctggaaaggtagtaaccctccctagaagaggttctgcagtggaagtcattgggaagggtctggtggccaggaggctgccactccccagtgaggtcatgctcacccagtgtggccagtgcccttcatggcccctgctccgaggccagtggcatgaattttacctttaagcagacagtagacagagtctgggtgggatcctaacaagtggatttgtagtccctttgacttacgagaatagtcacggtttctttcaaatccagatgtaaaatggcaaaaattttttaatggttgctttatataatcagataacacagaaaacattaattaacattctgaggggcattcccaggtaggaggtggttaatattttaaatatgtcctctgaggggttgctgtgtgttcctgtggtgctggcagtgggggggcccgtcaggcaggtgatggcagccgtccccttgggcctactgtcggggcctatttttatacatttcctccccttcctattcacttttaaactgtcctggattgtgtgatgtattagttgccctaccgggaacccaactgtgtgggattatgtgggttctgagaactccatccaagagttaacaagataaacagggcttttgaattagaaccatcggttcccatgaagaaaacctgagcaaagctgcaggagactgcacaggctatggggttgcatctctgcaaatattaaatgaaatacagaaatgcgaagtcccctcatctcagaaacataaaattggggccccagaaaggggcactgattcatctaaaacccaacagccagttaatgtcagcatcccagtcctcactgtgttcgtccaatgcttttctaatttatcttgtcattgtctcctcattttgtccaggccatggtgacattgtgacatctaaaagagttagggcaaaacaaaacaaaacagcctcaatgtccttattagagagtattttggttgctcacaggcttatcgccctcactggctgcccctgtcttggtcacatagctgtaacatgcacagcagcatggccggccccactggagcagttatggcttgtgctccagcacatgggacctgaaaaactcttttaacaggttccatgagtgaataactcaaattcgctcctcccaggcttgcagtggtcattgcatcctgaaagtcttccatctctgcctcaggatccttggccaacagtgtatggctgtgcaggccaggcacctagtactctcctagtgagttcacttgatgacagagttcagcctaccacgttcagcctggaaatcaggcaacctatatctctaaagatctgtttctgttccctgggtcagccagcccatgagcacacaagttggaagataagtattccagttgctttctgtagaggatctttgggctgtctgtccctctttggggttgagccatgtgtgggaactgaaactatgcgtgtgtcacacctctgtgtgcctcctctcatgagcatcctcacccagcagcatcctaggcctggatctgccatcttccctcgccagtcactgctcctttgggtaccaggagatgagggctttaggcagtgggttctcttcatcatggcatccaacaagccctaaaacatgatccagaagaaaaattaggcaaaatgaaaagttaacagacaaaatgactctgccattgctcaagttcctttgttctttcctttacagccttttattttatttctgatgttggtttatatccactgcatattaaaccagcatcccgactacatgcagagcatctcatttggcttaactgaatatcactccaaaaatggggtgcaaaattcagtttgttgtcattcctgagtttcccctctctaattctgaagaccgtgttaaaaagaaaaaaaagattgaaatattttatgtaaattctacatgagcagttatttctgttcaagcaagttggttaataaatgctcttaactcaggactgcaagctccaaataaagcatattttctttcatttaaaagaaaccctctgttacgaagttataattacataaattatacattgtgagaaaaatattgggacttgtcatttttctgtttcttagtcccacccagagagtgccattttgtaatgtgtcactagccaatatgttttttaaaatccagtactcgtgtgtttcaaggtcctgcacacaggtccatccccatccctgagccccgctgcggtggccttccttgtcggtggtgttggtgtcatgtgtggtttgctgcatggcagtgtgttggtcagttgatccgtgtgtaacctgtgtacaacttggtgttttaacactgtgtttctgtaactgtttgcgctgctagctgctacactgaagcaaccatgctgttctcaaggcagtccacccttgatgatttagatggacaagaaattcctaaaacaagcgagcgtgctcggcctaggctccgtaaaatgctcagcatggatatgtcctcctcatcagctgacagtggcagtttagcatcaaggtgcttaacttgtgcatgctttgttctgtcattttaatcacctcttccccccctttatgtcactgcaaatataagttcttgtgatgtatgtttttatttcatttttattttaagaatctgcatgactaaccgaagcataatcaccactgccctctgtgagatgtaattgttctcaggacagcattatattaaactaaccgctctttagtttttgtctgttaggagtttctttaaaaatccttatcacaaacattctcctccatgttttcagtatttcaaactttccattttcagagacataagcatgtttcctccataatttagagcttctgagggcactactcaaagggggaactctgtttgcaaaggtagaaaacttcttctcttgatgtaatcaaaagatgcatgcagtaggaaaaaaatctaaaaatctatcataggtagtcatttttagtgaatattaaataagtctgcatgttatctgcctaattgacataaaagtcagaatatagtttaccattggtttttaaaaagaatattatgcagcagaatgcatcatctttgtagcctataacttttattttggggaaaatatactgtggcttaagttctcccaaatcctaccctaaaacagtattcatttagaaataaaattatttgcatacaacccgaaaactctttttgaattgccttaggatggtgagggggcacaatgaagtcagcagctacactgtgtttctcctgacacgaaaacagcctaatccaagacaagtttcgttttgactgctcatggtggcaagtcagagggcatcttcttttcactggcagccgtgtatctcggtgcatccctgcagtatgctgacacctggcattgatgggaatgccttggccatttgacaaagtcctctggcgggcatgtgcctgccatgccagtccattttcttgacctctgaaggtaccctccaccccttggtgctacaagagatccaaaccaaagggagcatgattaggactgatgacagtcttactggccatgagacctggtgcggggttggctccagtagtctgcaagttccctgggcaatgggtcaatggcatggccctcctaggaagtatatctaattgaggtaagtcttagcaaaaatctgttttgggctggcatttcaccagcccgtacatgatgtgcgcactcaaggacacagccctggggattctgaacacctgagcgggcatcaaaagctcaggccaatctggttcttcagtcacaggatgccgtgagccgctctgccaaggttcattcattcattcattcatccatatgtctatactggtatctgtgacaagaaacatgggtacagtctatgcatttgagaatctcagtgtttatggaaccctggtggtcacacgtgccattcagataagagtacgtatttcagagtctaacatgtcaccctcccacatccaagacagattcccaatctccaggtgggttttgcccctctcccgtccgtggctggatgtgtctgaggtagagcaagccatgaatgtcactggctgccctcttgtcattggccaaccttgtctgcatggacgtgacagggaaagtttaaaggaacaaaagaaggagacaaaggatatgagagaaaagaacagaatgccaaaggcagggagtgaggatgagagtagagaagcttctggaaaaggactactcaaagaggaactggtagaagaaagtaagtaaagttgttggtaggagagaacagaagcgcaccctggggtggagtgggcagctggaagggagaagggccaaggagagcttgcgtgggaagagagtggctggagtcccacagggaaggggaagccctgggcacagtgcagggagctgggacgagggtggagattccgcagacgggatgcacagaaatgcaaaaaaggcaaaggatggaaaagcagggtggaagaataaacatgaaagaagggtggcattttttatcaagcacacagttgttcagtatagccaatatttaatcattcccattcccattccccccttatggtctgggtgggtctgttgtgtaggatggagggtagaatacctatttgctaagacttagctcttggtcaaaaccttcagagcttctgccctccagagatgcccctccttgaagcagacagagcagtgggtaagctgtgctgtgttgatatggcaacagactctggaacccgaggctgtgaatctagatactccacacttgttacgggggtgggttttgctctttgagagccacgtgactggctctggttctaaactgtgtgtgtgcactgtcaacatttgcattggagaggctgctgtttgcagtggctgcagaacaggagtgattatcctaaaagaacaaagcagatggaatgcaggggggaaaatggggcatttccttaggagttctgatgaggtctctcaggaatgggaaagaaccccaggagtgtggatgctaagacatgggctctgtgcccacgctttctcccaacagcgagcccacgcagtgtaccatgctgtactcacgccaggggaccactgagaccatcgaggaggtggaggctgagcaggaggaggaggcagggagcacggcgcctgagcccagggaggccaaggagtacgaggccactgggtacgatgtgggagccatgggtgccgaggaggccagcctcaccccagaggaagagctgacacagttctccaccttggacggggatgtggaggccccaccctcctacagcaaggctgtgagcttcgagcatctgtccttcggctcgcaggacgactctgcaggcaagaaccgtatggcagtcagcccggacgacagccgcaccgacaagctggggtccagcatcttacctcccctgacccatgagctgacggccagcgagctgctgctgaaaaagtaagggtccagtgaacagatcagacacatatccccaaatcaccacttaaacataatgccctaattctgtatacagaaaaattcatatatagaaaaaagttcatctggacacttagagcaaacagacaattccaagacttcttgcactgcaagtacaaagcaaacttcgctcctaccatgactggttctagaaccagcaaaacccagagccttgtgttgacatttctttctataataaggtctgatattaggttgtctctgaaggaaaaacaggaagccgggaacacagcaggaaggatggtgctaaatgaaaatcagtaatttggagaaattaaagaaaggcatggccgggcgcagtggctcatgcctgtaatcccagcactttgggaggctgaggcgggtggatcacctgaggttaggagttcaagaccagcctgaccaacatggcgaaactgtccctttactaaaaatacacacaaaaaaattagctgggtgtggtggcaggcacctgtaatcccaggtactcaggaggctgaagcaggagaatggcttgagttcgggaggcggaggttgcagtgagccaagatcacgccattgcactccagcctgggcaacaagagcaaaactccatctcaaaaagaagaaaaaaaatagacatattatcatgtggtttgctttaacaggatgtttcacgacgatgagcttgaagagtcagagaaattctacgtggggcagccccgatttctgctgctcttctatgccatgtacaataccctggtggcccgctcggagatggtgtgctacttcgtgatcatcctcaaccacatggtctctgcctccatgatcacgctcctgcttcccatcctcatcttcctctgggccatgttgtccgtccccaggcccagccgccggttctggatgatggccatcgtctatactgaggtaggcctggacgcagacccctgtggatggcttcaggcggctatgcaaggggaagcataccttgtgtccctgtgccctctcttgagacgggcctgccctgatcccagacagtttcacatggaacatgcagttccacagacattcttagatacacaaatcgtcagcagcaacagttacctagcactcgcaattctaaaaatcttttcacactgcacacctcacgcacggcgggtactggcatcattcccatttaacagataaggacacagcatcaatgagattaaataaatggccagagttgcccaactggtgaggggtgggtacacgtttgaagcctggttgcctaacctacgatattaatcactgagacgataacaggcttctgcagagtcgagcacaatgcctggcgccaccgggggttcagtgaatggaccctgtgttaaatcatacagtccggcactttggacatagtttgaatacatcatacatacttttcatttttaaacgtaaacgtaaagttccatacgtcgcaacacaaaattgtacaagcacccgcttagcatctgaagggtggatgtcagcccattttcatcccatgcggggtatgaggagccttctgctcactcttatgttcctgcttttctgtcctgacctattcaacatagacaggatcacgaatgcccatgaaaaccataaagggactttaaaaaaaaaagctcgatattcttggtgcctggacgaccatggtgctttgtgctctcaggtttgtgaagagactgattttcttccctgacttgtaaggaaaagttgtcactttcaacagtgctgtaattacttcttaaatgacagtgctcatgctagatgcacacccaaagcccagaagttttgtaggttgtaagtaattcagtagcaaaattaaaacaaagctatacagtaaagcatctcaaaagtatttggttgaaagtattgatagcatgcatcttatttccataaggaaaataaaggatgtgaagtcaaatatatatctattgcttgaattggccaatccaagttaatcatccctaaactttactttcattacatcacttcaagatgtaaatgactgcctgtttagggaatgggtgccagtctataacaatgtgagtacatttatcaaattccctttcttacctagggctgaagtaagaggaaataccaagaatgtggaaaagggaacaagagcttcttgtatagatttcaccttaaaaataaaatatttctggctatagtcccagcactttaagaggccaaggcaggaggatcacttgaggtcaggagttcaagacaagcctgggcaacatagcacgaccccatttctacaaaaaaataaaaaacattagccaggcatggtggcttacacctgtagtccaagctacttgggaggcagaggtgggaggattgcacccaggagtttgaggttgcagtgagctgtgattgtgccactgcactccaccgtgagcaagaggttgagacctcatctctaaaaaaataaataaaatatttctatataagttaagttgaggctctcccttttcttgtcacattgcactgaggactgaagtaagtgggaaattcttgatgttgatttactctatcatacaaaccccgtgtcagaaaccaagaaccctgctacgcaccagaatacaaagatgaatagaaagcaaatattcatttctgttttttagtggctcccagactaatgtggcacacagatatgatggaggaaagtgaaaactacatacatcctaaccgtgtgatatgctcctatagattgcgaattaaagaaatacagaaactagaaagatacgagtatgttctgttcatgtttccctaaataatatatttaatagctgcgtaattatatcaatatctaattaaataagtataatgccaacacctcaaaaaagaggaaatgactaatcaaagcggtgccctgagaagtctgactggccttgctggatctacagtgaaagacactgtgacggttagatgctgcttctgttatgaagtcaatagtctgcgagaatgataatgttactattccacataattatgtgcctgcctaccatcaaaactgtgaaatgcgggtctctttcttaattgttatattgctctttcccatatacaggtatatctattcctaaaaggagtaatgttttaaaatttctgtcatctgtgcgtaggtggcaattgtagtcaagtatttcttccaatttgggttctttccctggaataagaatgtggaggtgaacaaagataaaccgtatcaccccccaaacatcataggagtggaaaagaaggaaggttatgttctctatgacctcatccagctcctggctctgttctttcatcgatcaattttgaaggtactgcatgttaacaattaatcagttcaagttggtcatcttcctagataacctggaccgtaatcttcctagataacctggacatcaggattggtgatggggctgaggggccagtgagtggtatctactcatatgttttttttaaaaaaaaaaagagagagaaaagaaaaaggttaagttcatttagctgacattttttccaacacttgtggtgctaaataatggaacttacaataaatctgggagaatgtttccccatgtttccaacctaggttaaatgtgtaatcgtgaatccacttttgtggaacattgcttgaatgatgtgcaatattctaaggccggatacactaaattctgcttctgatttaagccagagcatcagacagccacaatgtgtgtggatcatattgtctcatctccatcccagcttctgcctcccttcttctagtagtactgctttcattgggtagcttcttgtcatgaaaccactagctgttggtgagaaaccacatattctttaaagttgcccagtaaaacccagagctgtgctttctcctgcttattgtggaggaggccactcatgatcctgctggaggaaggcctttatacagcatggccctgcctcagcctcagggactcctgtccttctgagcaacttcatgggtttttccttctcacatgctgtgaattataaactaaacttgtaaatacgccatttaattctaataaatagaaattattgcatagcatagattttatgtatgaatatacctcttgttacaaccttactttctttccctcgtcttaaccttgtcttcttatataaaatattttaaattccttttatccaggagtatctttcttagtccctagaatcctttttagaaccaggcttggcataagttaatacatacacgtacatatacatacatgcacacatagatatgtaacagtgtgtttaacttcttctgccctagctcagtgagctatttcaaactcggtttcatctgagtgtactctggtcagcctcctcactctagcttccatcactttgcaaagtacccaaaccctccatttggagggagccttagctgggtcattgggttgtggcaggtttttgaaagctatgtatctaaggaaatcagttagcaaaaattgaatttgcctaaatcttacagttcttctgttggatatgttaattacttgaatttatttagtatactgatttttgttatgaacatattaataaatgtattaaccttgttttttagtcttagaaattcactttttaaatttcagtatttaatacttgatggtataattttgatcacttcagaattctcttgcaacctttacattcttttgtatcatttaaaattattataactctttaggcacttttactatcttttcatcaatgttcaaatggcttaactgctgcaattttatatttaaaacatataataaaatcttggtgtttcatattgatcttattctttttttgaaaatttcaaatatatgaatgtatatgagatttgaggtaatggcattatgttaaaaattttaattaaatatataaaaatagtttttagaatgataaatcttttcttaagaagacaagctaccccatagcttttgaaaaaataaatctttcatataatgttgccatgaaaaccaaacaattaaaactgcagaaatttcaaaagtgcttgaaaccatcctatttcatacaaattgctgtatatttgataaataattagaagaattggcaaacaagtaaatatactactgagaaagttgtgaaataatctaaatatatgaaggttggccaaagaggaaacaactcttaaaataataggaaagaaatccatataaactgaaaaatcccattacgaaaagctaaaatgtttgttatgtttataagaatacattcattgaatatgtttaagaataacacatttacaaataaacatttaagagtcatctgtcaaatgagtgactggtggattgatcattctcggagttggttttgaccaactgatttctgacaaattggcctggagctcttgtcctccatgtacgagtcagagagaagaccaggcaatgtcttaggaagcaaatgcgtggccaaagagctcaggggagagctccgtccaacagcagcaaggtcatcagggtgactttccatccaataagtcaagtcactgtaatttcttccttagtccatctgccaaaagctatctgtctccatcttaattatcagctaaaatcttattatctatacccacccatctcttccctactgggaccctcataaagctctagacaagctttcttttcttgtgtattagtccgttttcatgctgctgataaagacatacctgagactgggcaatttacgaaagaaagagttttaatggactccccagttccacacggctggggaggcctcacaatcatggcagaaggggagcaggagcaagtcacatcttacttggatggtggcaggcaaagagaggagtgctttgttcagggaaactcccctttttataaccatcggatctcatgagacttattcactaccacgagaacagcatgggaaagacctgccgccatgactcaattacgtcccaccgggtctctcccacaacatgtgggaattcaagatgagatatggggacacagccaaaccatatcatcttgcttttctaatcttgaaggacagtttgttggatgagattttgtaagacagaataccaagggttccacctgaaacagtagcctcatttgtccctgtccctgctttctcagtgccatggcttatgggatgaagatgacatgactgaaagtggcatggccagggaggaatcagatgatgagctctccctcggtcatggcaggagggactcctccgattctctcaagtccatcaacctggccgcgtctgtggagtcagtgcatgtgaccttcccggagcagcagacagctgtccggaggaagcgctccggcagcagctccgagccatcccagagatccagcttttcttcaaacagatcccaaagaggtatctgtcgacacaatatatctaggctgtagttagctcccaggtggccttgtttttctggtgcctgtgggtctggggcaagggagtgtattgggtgctatcaagagacagacattgttatgtgaaaagaaagggctttgaaatcagagaaacccgagttcaaatcctgcctcagctgtgtgaccccattacccaaaacaccttattgtatctcaggacaagggtttcagataattgtgaaaaatggccggcacactgccttgtacctaataaacgccaggctcatgataatttatttgtgttacatgcgaaaaatctgcagggcgtgtccagagtgctatcaatcacaatgtattttttaaacatatttagatgtaattgatgagaacttttagccaaactatggttatttcctagtctagtaattaattttttcccaaacaacgagtacaatcagaaagtagatatgcctcacagctgcccctcttggaatcactaggcttttgtatctgtggggctcctgtctgaagcttttgtaattatggggctcctgtctgaagcttttataattatggggctcctgtctgaagcttttgtacttacggggctcctgtctgaagctttccatgcagtggtgtatagtcatcttcagaacctgcttttgaggcagatactggcagattatgtcatattcattttacaattagagaaactagaataggaaaacagacatggggcatcctatctggaacacctgcatcctagtaccctagttagcacaataaaaactatccttccagtttatttacttctgaaacaaagattgcatagcaatccaggaaagagccaccatggggtgttaaaccccacaggcctgcgatgggagcagagttgaggacaaatcccaaggccgtgcatactcatcctcccaaacagtcctgagctatccctccaccatgtgggctctgggttctgcttcttggatatttaggtgaacaaaccccaggctccaccacccatcttatgatctctttttatttctaggcagcacaagcacccgaaacagcagtcaaaaaggaagcagtgttttgagtattaagcaaaaaggcaaaagggaactttatatggaaaagcttcaagaacatttaatcaaagcaaaagcctttaccataaagaagtgagtccatgagaacatatggcatgtgtgctttattgtagggttttgggctttattatttcctataaaccaggagcagagcagagaagtaacttctcgtgtcacaaatgttatctgcgtaaggcagaatgaaattacccctttttgtcttgtttttaaaaatcatttttctgtaagtgtgattcattttatatccattgcatttatgcacatgctttttctatttgaacagagtaaatgggtcatttcaagggctcatggattgtattcttaggcattatcatggtgaagtccagccagactgagaggaatacagtgtcaatgctggaagggccttagacctgcactcttatcctgagaaggggatggaagtgcatggtggggaaatgctttgtccatggtcatacacctgttacccagcacactacacaggtccctccacctgctggggatggaagtggtgcatgggactgggactgccagctgggagtggagccctggacagaggctctgagagcaggagagccagtggcacctgaacgtggcgttgaactgaaggcaggtcccagagcaaagatagggcaaaggttagacagacaagcaagagccaacaggacaccacactaaggcacagagcaaagcatagataaaaggccaggggagtatgtgggagccagcatggacacaggccctaaaacaggaggagcaggggcgttgcacattcaaacgcgcatggaccaagcactccaagtctgagcgccctcatgcattccctcatttacttcccaccttggccctaggcatcaggtcttctcatcactccagttttacagatgagaaaactaaacacagaggttacatagcatgctcatggttctcgccggtggtgagcaattgaatcaggctacaaacccaacacctcgttcccagggcatcataccattctattatgcttcaagcaagaggagagggctgtggtgccatcagcagagagggctgcagtacctatcttggcagtaaatgtgtatacgctctccgttagaacaggagctgtccacagcgggactatcctgaggcagagagaggaaggtgggacctgactggaaagaggaatgcagaggagtggcatgatggcagtgtctggtcatttctgccatcctgcccttcctgaaacaagtgggttgggggtgggggtctccattttgcaggacgctggagatctatgtgcccatcaaacagttcttttacaacctcatccacccggagtatagcgccgtgactgacgtgtatgtactcatgttcctggctgacactgtggacttcatcatcattgtcttcggcttttgggcctttggggtaggttggggcaaaggccacagcacccgccctgacccatggcgatggcgcttcctgccatgaattgcctctcttgggcatgaatttgttgtctcttccccagaaacactcagcagctgcagacatcacctcttcactgtcagaggaccaggtcccggggccgtttttggtgatggtcctcattcagtttggaaccatggtggtggaccgagccctctacctcaggaagactgtactgggaaaggtcatcttccaggtcattcttgtgttcggaattcacttctggatgttcttcatcttacctggtgtgactgagaggtaaggtcttcagaagccagaggcaccaacctgcctccatgcaactgtgtttcctgaggtgatactcgcatgcattgcacagcagaactgctggccacaggcagagccttggcacagcagcaccacgggtaggaagagctaaaggtttgggtcaatagtcaacgcaaatccaaagtgtgaactgattcctcaaaaatattttaattacatattatctacatttgtagaaataaggtttctataaataacaacggtgacagccttaataacctgaacaaacctagggtatttgtgctgtgtttctctctacaccttagcagaggtggaggtaaagtggaatatggtcttgggggcatttttgagagggagagaaggcacagactaagtcatgagagaaatagatgaacaaatggaggatgcttaatggatagaagaagagatagagggagagggttggggagcagatgatagagtctccacataggagactggtgggggttaactgcagcgaggtttgaaagcacctagcaatgtctcagcttgtggtaagagaagcacgcagacccatcctgctggactctgctgctgttaatacaactagtgctgctggtcagggtggccagaagctgtcaggaaagggctggtaagatccttcaaagtggctgctgtgcttccctctgtcacctagaaccctaaggaaagggtgttgaccttcagttccccagtgtgcctggcatctccaagctctgctccctcccagccttcttctccccagcctccaacccaaagtctacttcctccttactctcgagatctctgttcagataacacttctctatagactgtctcccacctcacgcctccaggcaaaacagtgtttatgacagttggtgctcatggatgaacaaatgatctggtcatttcggcaaagaaaaacaaagtggagttttataaatgggaaatatctgctttgtcaggttatgaaagaaaaggctctgcagaaggtgaatgtggccttgtccatatgatgtagtaggaataggaatttttaataagcatatctgattttatgtacacaagcaaactataactcttcgtcactggcctggggagccacatacctaatccagtgaagctgccatcatctgctgtggctctgaaagcctcctctggaactgcactcccagactgtgacatgctagttttttaaaaaatttatttatttatttattgtttttagggacaaaatctcactccatcacccaggctagagtgcagtggcatgatcatagctcactgcaaccttgaactcctgggctcaaacaatcctcccgcctcagcctccagagcagctggggatacaggtgcacatcaccgctcctgactattttttatttttattttttgtagagatgaggtctcattatgttacccaggctggtctcagaggcctggactcaagcagtcctcctgcctgggcctcccaaagtgctaggattgcaggcatgagccactgtgcccggtcaatgatgtactattttaaacatcctcaggtatctctgaaaatcttcatgcttaacagaaaatttgatcttttgatcacacctctgagtcatttgtagccaagtcttatgaataacatatcaaacaggcaggctaatatcatttgggaagaatgaatagaaagtaataaaaaaaatggattttacgtatgtggctcataagtaaaccagttcaagtgtaattcctattgagaaaatccaaattgcttctaacagtagccagagcctaatggctgcttttgtttgagtgtttaggttctgaccgttcgatttcagtataggaattattgctttataataattataaaaattattattaaaaataaattctaattataaaattattgctttataataataaatggtgacaatgcagatatttttaaaggaaagtagaattgggatactttttcctgagtctacagtagaactaaataaaggattgttacccagaagagacacaataacccagttctccattccacaccatatattgggagattaaatatagcccaggctataataataattcagatgaacgccactgcttgtacaaatattataattttttcatgagagtgttgtgaatattgtttgtaggtatttaaaatagaatacataaaatacatttttcagtacaaaaccaaccttcacagaaactcttaatttcagagaagaaagacaccttaaaacgctttccaagcctattacctaattttgcagattaagatagatacaacccagaaagaaaagtgatctccccaaagtcattcagccagtgaatggtgatactagatcctaatcccaggccagcaaaataagtaaaaataaaagacatccggattgggttgggcatggtggctcatgcctgtaatcccagcactatgggaggctgggccaggtggatcacaaggtcaggagttagataccagaccagcctggccaatatggtgaaaccccgtcttaaaaaaaaaaaatgccttatgtggtgtcgcgcgcctatagtcccagctactcaggaggctgaggcaggagaatcgcttgaaccctggaggcagaagttgcagtgagctgagattgcgctgctgcactccagcctgggtgacaaagagtgagactccatcacacacacacacacacacacacacacacacaaaatccagattggaaagcaagaagcaaaaccatgcggcagatatgacagcctatatagaaaatccggtggaatctacaataaggctgtcagaagttataaatgaactttggaagcttgcagatacaaaaccagcatacaaaactcaattgtatttttatatgcaagtaataaatgctcaataatttgaatttttaagaatatcatttacaatgccattaaaaatatgaaaaactatcatatttagggataaatatgataaaacatgtacaagacttgtacaatgaaaatataaaaggcatggctgagagaaattaaagaaggcctaaataaatcaagaagacttaaattcatgcatcaaaatacttgtgaatttctcatgaatttgggggagatgcagtttctccccaaattgatctatagattgaccacggtgcacatcaaaattcccagcaagattttgtggtagaatttggtaagctgacaaaaattcatatggaattgcaaaagatctagaagaactaaaagaactttgaaaaagaacagtattggagcacttattcttcctgccctcaagcattattataaagctgtgatgatcaagcagtgaggtgtagcctcaagattcagacgaacagaacaatggaacagaacagagagtccagaaatagaagacccacagtcccaattcagctgatgtagggaaggtgcaaaggccatccagtgaagacagaacagtcttttcaacaaatgcaaatggtgctggaaccattagatatctccacgggggtgtgggcaagagagagacagaaagagaaggaaggaaagaaggaagcaagaaggaaggaaggggtgagagagagagaaagaaagaagggagggagggagggaaggaagaaagggagggagggaggcaggggacaaatccaaaatatggcacagagagaaatatggtgcttgtatcaaaacattcaagtatggatcttaattttaaggacagagaagattataccaaactcttaccaagtcaaaagttttctttttatttcctttttaaaatctgtactgaccatgtttaagacatttggagaatgctgcatttatccaaagtttaaagtggtcctatagctcatcattctttgaaattatattctaaaatgtttttctagtgtgaaatttaattctactattttttttcaaacttgtgctagcagtcctgaactgtacaatactatgtctcttcactattcacctggagagaagactaccatctgtactgttgaggaaatcattaaaaataaataaacatcaggtcatggagttatagatttgcagaactaggaagaattatcaaataaagacactgatgtcttgagaaatgatggcttgggaaacaaaccccataacatatagacagaactggaaccaaatccaggtgtttccagagtttgttaatccattacttatttttataatgaatagtaaaaagaaattgagagtccacctatcagaattctttctcctacatattccaaatggatcctctctctctctctctatatatatatatatatatgtgtgtgtgtgtgtttatatatatttttaatatatcatatatataatgtatataggctttttctttcaggagtctaatttggactatggtagctgcatcatctacatagtgagaaaatatttatcagtaaattcacttaataatttattttaattatggcctaaacaacagtataagacagattggaggcaccattcacaggaaatcattttaattattgaatttttttatcccaccttttgcctttgaagtgatccactatgtgtagacagttcattagaattgagttggaatgatgaaggggaaattctgttggcctgttgttttaatttgacactgccatccttttgtttcagaagagtatttcattgcttcactttctgtacttttacattttaggaaattcagccagaacctggttgcccagctttggtactttgtgaaatgtgtttacttcgggttgtctgcttaccagatccgttgtggctacccaacgcgagtcctggggaacttcctcaccaagagctacaattacgtcaacctcttcttattccaagggtaggacgctctgcaacgtcacagtcacttatgggggaagaatagcggtggaaaggcattttgattcccaactgggaagtaagggggagaggatgaattcagcagtgggaatcgttgtggaactcttacgatgttggcaaaggaacaaatatgcctctttaaacacctttctatgtttaattgccacaagcctgtccaggtgctgttctacattcatccacgtgggttagtatcctgcataattactgtgataatatttgagaatgaaaaatagggatacatgatctgtaagtatttatatacttctgggcacaaaagaacacagcatgtggagcctggactattccaaataacttgggaattccaaattatccttagaattttttgtatacagtaagttcctccattgaaaaggagcattctttctgcctaacaccaacctgaatgccatcacctgtgtgcccacgtagcaagttaactactcaaagcacatgtgctcttctatgtgacaagttcagcagtagcatctcctctctgttctctcgcaaattaaaccacggcataaaaagtgagacagtccgtggcactgctggctcctcctcagcaccagacagaagaggtgtcgagtgccttcagatgctgtgaagcgctgtgtgtggggtcgtgtttcatacagtgctagcctgtgactgggcctgatgttgcttccagggattggatttatattcacttgacagggctgaggcatcctaggggagaatttctgagtggcaatccacactgctgtgagggccctgggagaacccagattctccaggctgggagaagctctgtgtcagtcaagagacaaggaaaattcttcagagcctggaggagcccaggccaatcccttctgaaacacaactgaaccacagaggctgagccaacaccatcactgtggtactccagcaagtcctgcggctgaggggcctcacaccctggctccctacaacctctccttctccctctgcctttatccatttgccctcatttttaacctaccaggtgcaccacccctactaactcatccagcaacagagccgcagtcattcagcaccgcatggccaagggtctcgtaacatgaacaaataaatgtgaaagaagctgagtcaccttcacaccttcacacttatttaaaagggagatcccagttggttatgatcatcagagaaaaggaaaagaatgaaaaaatacaaatccatagattcgacttataatgaaaagcagttgtgttccaagttgggttttactggaagggtcacctagagaattgtttctgagtcatgaggttaaagcagttaaggaactgcttgagctcctgggtgagcagggtggtgggggccacccacgaatgtctctctgacgagatgtgtttcctgccaggtttcgcctcgtgccctttttgactgagctgagggcagtgatggactgggtgtggacggacacaactttgagcctgtccagctggatctgtgtggaggacatctatgctcacatattcatcctgaagtgttggcgggagtcggagaaggtaagaagccaggagatgtgccttattcctgtctgcttctcttagatacaggctggttataagatgaatgtgaacttctgctcacaatgaaggcatgaggcaaaaactaccacaacctataaatgtcccagtgatttccaacccactagagttgggaatttagacttactgccgtcatagtcgtcaatagcatccagatgttttcttctttcggcaacttcatattgtagttatttttaaaaaacggtatattgcttgctatatcccaacaactcttaaatggctcctttgggagcagaaaggaatgtgatgttatagagaaaagtggggctggtggtggcttggactcatgcttacttctgactcactttttgaagagggatggacaatttaacctctttgtgcaaagaaaattgaagtgcaaatatctgcttattctgccaggctgaatattaaggtttaaatatgtctagattactattatttattgcacttctcagaagtttaatatatggaagaagagtctgttgcataagagcaataggaatacccaaaaaacattagctggggtgatatgaaatgtctttctttctcgtctcaaaataccctccttgaaaaaggctcctctgtatgattcctggtgtgttctgcagctttccctgggaatttcagcgttacagtcatggggcctgttgtactgtgctctctgtttatgggtttgtgaagtgagggagatggggctggcaatatacttaaaatcatatttgcttgtcctgatttctaaggagcagaggagttgacaggatgccagaatatgagagcctctctatcgaaggaacattgagggtagcaactagggtgccaaagcgtctggaaatcctgacacacaaggaaaagtaggaagaactagggattgtttggtctaaagtagaaaaaaaataggggtatctgtgcagaaaaagtagatgtttttaacaatttgaaatgttggaaagagatgagaaattgaaattaatttgtgagacttaagaaaaacagaattaagacaggtaggcaaaagctcccgtatgtttcaatggaatatgaagaatttctaacaaccaaagctaccccaaagtacatgcaaaggatcacacacaggggacttatgaaacctctgccctaagtctacttcagaccctggaatcactcattcgacagatatatcagttgtctgttgctgctaacaaactacctccaaatacagtggtttaaaaatcaactctttaattgtggcacatacacaccatggaatactatgcagccataaaaaagaaggagatcgtgtcgtttgcagatacatggatgaaggtggaagccatcattctcagcaaactaacacagctacagaagaccaaacaccgcatgttctcactcataagcgggagccgaacaatgagaacacatggacacagggaggggaacatcacacaccagggcctgtcagggggtagggggcaaggggagggatagtattaggacaaatacctaacgcatggggggcttaaaacctagatgatgcattgataggtgcagcaaaccaccacggcacatgtatacctatgtaacaaacctacacattctgcacatgtatcctggaacttaaagtaaaataaaatcaaataaaataaagtaaaataaaataaacaatcattttatttgctcacaattatgtaggtcagcagtgtgggctgggctccactggatagtcttgcctggagtcagtcctgtggctgctatcgtctggtggcccaactgggtgttattcgatggtgtcactcagacacctgcaggttgcatctggctcttagccaggcctctctctccatgtattcgctcatccttagggagacaagcccaggcttcttcccctcgtggcagcacattccaagagaacgagagggaaacctgcaaagccctgtgaggtctaggctcagagttccaccaccagtgcttctaccacattcttctacttggagcaagtttaaaggccagcctagatccaaagtatggagtaaatgatagggttggcaaagtcatgttgcaaagggtcatgcctacaggattgagatgaatttgaagcctttatttttgcagcctactataaacattgactaagactaagcacattcttatgtgcccagaactctactaagcatgagagtagagtggtgacccaaacatacaatgcctcaccatcacggaactgatggctcagtggacagaaacaggtgttaataaaatggtgacacaagctgaatgatgagaacacatggacacatggggtggaacaacacacactggggcgggcctgtcatgggttgcggggagtgaggaggaagagcatctggaagaatggctaatggacactgggcttaatacctaggtgatgggatgatctgtgcaacaaaccaccatggcacacttttaactatgtaacaaacctgcacatcctgcacatgtacccctgaactcaaaataaaaggtgaagaaaaataaaatggtgacacaaataaattcaatatatatgacagatgctttggcagaggggcacgtgatactttgagagcctcaggaaggtagggcgtaggtctgaaacagagagctaatggaagagtgtaagttgactgggtacagggaaagcatctacatttttatcttggttcctaggtcctttgccctgacgcttgtctcctctcctccactgttacagggagttattcagtggatcttttgccatccattgaataaagatcatatctttatttgctagataaggccttgacacatctttgcactgtctgaaacatcctctccacctcctcattgcctaactccttcccaacctccagataccaatgaagacacctctgtttccatggacctgccctaacccctcaagtctagaccccatctttcactgtgggccccaacaacccttaatacttcccacattggggcttgttgtctctttttctgtctattatgagctctgtgatggcaagctcagtgtctgttcatccatatatggcctaggaatcacttaataccctgagcctagacacacagtaaatgtttgttgagcaacaactaaaaagagttgcctatttacaaacgcacatatctcagtgcctccctatgctgtcctggctacctgaaatagatccacccatcctctcttgtctctgactctctggagcttaagctactggttctttcctggtttaccttctatcctactcttctatcctcatctattcattccttccacatttttagacccagagagagaagagaaattcaagaagccaaatatgtagagtttgggatacgtgaatactgagaatagatgttgaatcttatattcgctagattgctagtgatctttgcacaatgagtttcaaaggtaggatgggtgctgacacccaactgcagggacttaggagctcactggaggcagcgtcttggagggatcaagcccaacaagggcacagagagataattagttcaaaagagaagcaagcccagaggataatttcaaaatggggagtgtttggacctctctggagacgataaggaaaagccagaagaaaatagtaaaaattctaatatcaggaagttctgatgggggtctggagattgtagagtcagaggcacaagtgagcgagtcagttgtggcaaagagccatcaccatcctgcagaaagggcaggaggaggagaggccagtaaggcgcaatctcgtgcccgcagcctgcgttctccataagatgggggagctcctctgctgagagcatgggaagacaaggccctttaggtacaagagctgccagaaggctcgggaaactgacagtgagacgccgtttcacttgggcgaacaggtcacggtgcttaggaagggggtttccaaatcacaaaagcccctgaatgatcccacccagtgtgaccatctgcacggatgcaagaccgtgtttgttggaagaagcggcagctgctctgttcttcagctcactgccttggagccaccaggtgacatttttcacactgtcatgaggtggttgcagccaccaccccgcctcccaatgagggaaggctcgttctggcctataactcgaggcatgcatgccaacaaagacttaaattacctttttattttaaagaaataagaagcctcattttaatatatcacagctacttaagtatatacttccatcctatgctaaaccaatggctacttcaggatattagcctttgaaatcatccatggcaaaacttcctgagacatttaggtaagtgggaggtgatattggggagtctgaatgaatctggccctggttagtactagtctgaaaagttactattattgatcccctgtctggaatgaagtggaataataagctgctcttaacagtaactcttcctgggtgtgattccacattgaatgtgacaggctgcaggggctttacaaacacactttatgaagcaagagcaataacctgaaaggcaaaatgttggtccgagcacacacagtgcaggccactcactcttattctgcttataccatgacttccatgcaccactttccagaacatttcaggaagctgattggaaatgcagtgcaacaggaacaccaagcaggaagcacagtgaggagctgagttaccagcggctgccatgagccatgatcacgacaccgcactctggtctgggtagcagagcaagagactatctcagggcagcagagcaagacactatctcaaaaaataaaaaagaaagagttgaatggcctaggaaaggggtaacggagcagcgcaggacaggaaggggacaatgcctttgaaaagggaggggaggctgaatgtggtggctcacgcttgtaatcccagcactttgggaggccaaggcaggtggatcacttgaagtcaggagttcaagaccagcttggccaacatggtgaaaccctgtcactactaaaaatataaaaaattagtcgggtgtggtgatgtgtgcctgtagtcccagctacttgagaggctgaggcatgagaatctctcgagcccaggtggtggaagttgcagtgagctgagactgcaccaccgcaccccagcctgggcgacagcaagactccatcaagaaaaaaaaaaaaaaaaacaggccgggcgcagtggttcacgcttgtaatcccagcactttgggaggccgaggcgggcagatcacgaggccaggagattgagaccaccctggctaacatggtgaaaccctgtctctactaaaaatacaaaaaattagccaggcatggtggcgggcacctgtagtcccagctacttgggaggctgaggcaggagaatggcgtgaacccaggaggtggagcttgcagtgagccaagatcgcgccactgcactccagcctgggcgacagagcaagactccgtctcaaaaaaaaaaaaaaaaaaaaaaaaaaaagaggaaagacagagaaagaaagagagagagagaaagaaagaaagaaagagagagagaaagaaggaaggaaggaaggaaaaaggaaggaaggaagggagggagggagggtaggaggaaggaaggaagggagaaaatttcgagaggaggggaaaattggctgcgtaatttgagatggattaagaggcctttcccctgttgtcccctggaaaggcagtgtgagggctgagcagaaggagggagaagcctctgggaatttttgagatgaacctcaaagagactggccttcaggagaggaaccaatgtggtcccacttcaggtggaacagactaaaaccgcccttggcagagatacattaatcttctttaacttgcaaaactttcatgatccagtgtgggtgctgttggagtgacaggagtggcctatgatctaaatttgcctcactgagaaaataatgaaagagcaaatctatacacttgtttgcatatctatgtgtggaagcatgtatgtgtgtatatatatttgtgaatatatatttcagattttaaaatatgggaccctagtcttcctttcaatatagaaaatcgggaagaaaatcaaaatacactgctactgctatccatatttgatgctgttgaaaatagtcaacagtatcaaatgccagtgcaaaaatatcaaaatgcactgctaccatctgaacttcatgcagtctccatagtgcagatccatagggtgcattgccttatgcacactgaatgcagagtgcactacgcactggccctggcccaccacccagtcaagcctccattctcatatttccggcaccatctttggcacttagtgtccaggcttgtaaaagccactgtagtcatgtcctgtactgactcccaggtctctctcctggtgtgtaatctatggctagtgcctatgggtaaatgttagattatttttccttactttaatctgctgaaatgaatggatccctcctgaagataaatcacattgccaagtcggggagtggggttgaccccatgttctgcatgtagcttggcctgaggggtaaccctgaaaggatggaggtcatggagcagcaacactgaagaaagaacacacatgtagatcagaagcaggttcaatgccagacagcacagctccaatttccacttgtccatagtctttaagcagggggcttagtgggtccttcatgaatctatattaaagcaaacagaagtgctcccagccttactggtgcacaggctcctgtaggagagtgagcccctgcaacacgcacctgccctctccccactccctacagccagtgcccagagggggctcttctaatcatacaaatcttaccttaggtgtcgaacaacattgtctttaacaacacgtgtcatgaattaaattaaaaatcatgttttttcaccctccaagggcagggaagggtcaactgaaaggcacagattttaaatattcaggaattgaaagtaaagtatctttctctcacataatcccttaaaaccagaaggttcattcggccggatacttgatcccttggtccaggagttcatcaccaggaaaacccacccacagtcttgaagggagaaggccgcttaagtcctgttggcccctgtggatccaccagggggtactggagcgacctcaggacagcttcacatcactacctaacttcatttcgagattgggacaaggttgctatccccatttcagagcgaacagagaagattcagggccaaatccatgttcccagcaccacaggaagagcactcgctctcccccaatcccgctgcctgcgggaaagcacctgagcctgagcctgagccttgtctgaactctctgttgcagagataccctcagccacggggccagaagaagaagaaagtggtgaagtatggcatgggaggaatgatcatcgtcctgctcatctgcattgtctggtttcctcttctcttcatgtctttgatcaaatctgtggctggggtcatcaaccagcccctggacgtctccgtcacaattaccctgggagggtatcaggtgatctctgtgcacaccccacctaccagagccttgccccacgccacattcctttatgatagctgtctgtagggtgtttagtcatgggctgccgaccctgctgtcggcatttgactgctcagcaaatacttgatgtatgaataaggtgcagaagacactgagagactagtttccctttggtcttgagcacgggaataatcactccaaaaagagatctcggatgccatgtatcatgggataaacatagcctacataaatgggctgatatcctacataaatgtttttcttttgactcaggatgcagagaagagctggggaatattgacaacactgttctctttgttttccagcctattttcacaatgagtgcccaacaaagccagttgaaagttatggaccagcagagctttaacaaatttatacaagctttttctagggacaccgtaagtaaatccctatagtagatttctgtgaagacctctcatctagggaagttcactcattgtcatttaatgctttgccatggcctgaggtggtgggaaggaggacttttcagggtttatcagttacatagagcacattcctggccactggctactttgataatctaagaagttatgtctatgttgttggacattagtggtaataaacatttaaatattgatccattttaaaaattgtttaactttttaaattgtggtatatattcatctcttgactagtaggcctactctgggaatctgtcctaagaagtaattcaaaatatgagaacgctctatctaggcactggcttatgagtgcattctctgcattagcagaactagaggcaatttgcggttcagcaaacaggagctggttgaggaaattaaggcagatgtattacatgaatttgattggcaagatactctagagtggtcataataggagaaggagcttctacttttcattttatttacgtgccatgttgtccaaagattttctaagcaacttattttgtaattaaaaaattcattacagagactataaatgacatgacaatttctcaaactaaaacataaattttaaaaaggctattatttttaaaattacaaaaaataagaaatacatcccctaaaacttaaaacaacaattatgttctggtagcagaagggtggctgatgttattctcttgtctatattccacactgttaataatataacataatcctcatcattaaaatttgtcttataaataatttttttttatttaagagagtgaataggaaggagatgcttctttcttctgtaaaattatcacctataatgcacactgtcaaaactaatctggaacaatgagcagttcttcagagagggttgggatgtcctgagcagattgttttgtctctctcatgacagagacgttcccccataggtgataaatttcctttttagtggaaaggaaaaatgacactaaattatctgtttttcctttattgtttaactggaatgattccatagctgtattgatggtagcaactgctgggattggataatgtaactggaaactgcccatacctgtgggtaaggaagccaaattagtgcaatggaacactcaagaccatccattataaaaatattcccttcaaagggagaaaccttttccatactgccagttaaaaggaagagtgactgctttctttatacagcatgatgcatataatctatttatgcatgtgcatttgtgcacatacagggtgctatgcaatttctggaaaattatgaaaaagaagacataacagtagcagaactggaaggaaactcaaattctttgtggaccatcagcccacccagtaagcagaaaatgatacacgaactcctggaccccaatagtagcttctctgttgttttttcatggagtattcagaggtagttactgtatttccatgtataatttatccctttccccagtctaaacatggagttgggggagggagggtgtggtgggatggaagaatgggaactttagattgatgtggatcttactttatcattatagccttgggaacttaccttcaatgccaaagctaacatttttatgtattaaataatgacttgcctaggaatcactaaccagactaagaacttctcagttttccttttttgtagtttttagctaactttagttttctggttttggggtttttgttgttgttgctgttttttatttttgcattccaaaatccactgtattttattagcttaatgtacaattggtgaaacaacacttaaatttcaaatgtttcttactataatgcaaaatagtattactgtgaacacctccctcatgcatcacttacagcactattataaatctaccacagggagcctctccacttaggttttcctcatgcatcttagatttcactgtccataatcttccatggaaaaggaagtgaattatgcccacctgagagagaaaggccgttcctagctctgatgcagcaagaactggccacgtgctttcacataaacactagaaatgaaggcagagcatcaagtgatttgaaagttgatttaaattaatactggtttttagaaaatctaaaattgtttcaatgcaaaaaaaattttgaatgtaactataaatctccaaaaaaatcaatatcctgctccttaaaaactgaaatccaaataaattatatattttaaagttgggttattctagataataagttgtttttaaagagaggctgacagtgagttctgtgagcaagaaagagagggtagagagaagagaggcaaggtgatgatttacaaaatgaaacagtctgggggaattttacaactttcaccaaaggctgaagtttggtctaaatgataaagaaatttcaggccgattgtggtggctcacacctgtaatcctggcactttgggagactgaggtgggcagatcacttgaggccaggagtttgagaccagcctggccaacatggcgaaactctgtctttactaaaaatacaaaaatcagctgggaggtagtagcgcatgcctgtaatcccagctactcaggaggctgaggcaggagaatcacttgaactagggaggcagaggttgcagtgagctgagatcacgccactgcactccagcctgagtgacagcaagatttcgtctcaaaaaaaaaaaaaaaaaaagaaattgcagcctctggaggcccatattatcacttgcattccaccaatactggggaagccctacctgacccccttccaacgtgtgagatgcgagggcagcttgactgtctccgaagagagagacttcctgagagtcctctctgcccagcctgagccagtggccagcacgtggcccctgctttgtttttccttgtgttggtagaaagagcatatctcagcagaagttctcacatccaaatactgcatccaaagcccaacagtttagtgatgcagttttgggaacctcaacataatacactagttgattaacttagctctttcatcacagttttgagacttagaaccctaagcaagcttatttgggcacacaagcagtaggttcatttgggtccatgagagtgacttgttagttagaattaaaaaagaagcatgacaggtacagaagaatgctttctggcatctaaaatttacaaggaaacagttaaaaaaaatacaaagtggggctgttcagaatgtaaagaactccttcaatcccattttctccttttaagtgtcccaaattccttatatccaattctgtacaaattaccaaaaatttactttctagccttttctttaaagagctactaaaaacaacaacaacaacaaaaacaacaaaaaaacagaacaattaaaattcaatttctgactgaatattctttttaacacatggagtttgtttattgccgtggagactaacatcattgggttgatataagaatattttagaacctcgtattaaaacatcaagatgggttctcttttggtcagcaggttcctcctttttctcaccttcaactctgttttaaaagtgtttgtggcctccttgggttctattaactcgattgtctaagaagctgagcattgaggtgaagtagactgaaagggtcaggattgaccgttgtggacccaatgaaaacgtggtgacattaatcaaattaagagttaaatatgttgtaaatctcttttccagacttctgaataatcactgacattaagctttttttttttcttcacagaaacttaagtctgggtgcaaaatcggaaatagcaacagataagctttcttttcctcttaaaaatattactcgaaagaatatcgctaaaatgatagcaggcaacagcacagaaagttcaaaaacaccagtgtaagtgtattttttcctactaatagagctttgttaggtatatgcagctggtacaaaatgtccatctacagattcatgtgtatgaggaatgcaacttcattctttggtaacacaaagttaatttctatttggaggccccattttgcaagattaaagaaacttaatctcagctatggagttttctgtccactgtccccagggttatgtctatgttccaaatgagggtttgggccaggcatggtggctcatgcctgtaatcccagcatgttgggaggctgagacaggtggatcccctgaggtcgggagttcaagaccagcctgaccaacatggtgaaaccctgtctctactgaaaatacaaagattagctaagcgtggtggtgcacatctgtactcccagctacttgggagcctgaggcatgagaatcacttgaattcttgaggcagaggttgcagtgagcctagatcgcagcactgcactccagcctgggcaacagagtgagactccatttcaaaaataaataaataaataataaaaaacaaatgaatgagggtttgtatggtgccaggctacagggagctcatcagtgcatggaaagtgctggcccgctggggcttccattgagacagacattattcttccaggtctgtcttcagtctgcagagtggctgtctccctcagctattgggacccattttggggcacactagaaatcatcatgctgattctcatgcgatttggaggtgtgggagctctggcaggtccacctgggttcatatggcccaacatagtatgtgcccagtggtatcgcattctccctgccctgcccccgggggtactgggctattggtgcctccaagggccctattcaggaatgggacatgggactgcactaaaatgattcaggcctcttgtcattcatgtctgccacccgatcgtgggtacccacttcactcgttcaccctcagtggaaagaggtggggctcaaggttccttcttagggagccactagtgtcaagcacattctcctcccactctctgtccacctggcccaaaaagtattgatctcatctctagatgacaaaccttgctcttatctgaccataatcaccaaaagccaggcaaagaccctgtgagacccttttctactattattcctgcccctgggtctctgaatgggggtagagtatacacggttgaggaggacaaggggtaaaaggaaatttggaaaaaaacatattatatatctcaaaatactatcctgccacttaagtactccacttccaacagatgaaagctgagatgtttagattctaatatatgaactagcaagaaaaaaatgatatggatctaaaactgctaaacaaaatagttcaggcatccaccagtgatggccccagttttgtcctccagactgccctggccccattgtaatgcatggaatatatggatcaccagggtgcaggccttagaaatgttcccagactgagatatgttttgcgactcactaaagttgaagggcccttggagactgtcagatcctctcctatcacctcccagatgataaggcatatctactcaagaatgtattgaaggcactgggcttgtgggaggcagaggtcactcgaggtccaggccaccatctctcttcacctctcactcccctctagatcaattcatgaagtctacttgtgtattagtccattctcataccgctaataaacacatacctgagactgggtaatttataaaggaaagaggttgaattgactcacagttccacatggctggggaggcctcacaatcatggtggaaggcgaaggaggagtaaaggcacatcttacatggcggtgggcaagggagcacgtgcaggggaactgccctttataaaaccatcagatttcatgagacttattcactatcacaagaacagcatgatgatggaggaaaacctgcccccatcatccaattatctgccaccagcccctcccataacatgtggggattacgggagctacaattcaagatgagatttgggtggggacacaaccaaaccatatcagcctgattataggtatgtttgaaaatctaaaaattaaaatttgaagcgtgcttaatggtatggataagaattggaggatcctagcaagaaacagtgccccttggcttcagaaacaagctgcagaattgggaaaaggcctgtggctgtttgtaagccatcaccgagcttgttgtacagacttacatgcagatacagataaagctcagtgaatttgctccatatgagagagttttgactgtaataggaacccgtaaattatgatgtctacacattgtacagatatatgaaactttcactattatttggtgatacaaggtcaacaataacaacaaaaaatcaattttaggtgggtaaaacaactaaaacgtaattgtatcttttttttcttaatgtacaggaccatagaaaagatttatccatattatgtgaaagcacctagtgattctaactcaaaacctataaagcaacttttatctggtaagaatgagaaaaatttgtttcagaattgttttcaatcctagttttattcaatttcaacagtttgtgctttggaccttcatgaaaccactttctagttatctctccctgtgtgacagactatatatgaaacccctgacagccttcactagcccaaaggagtcactcactcacctgggacccacattcttcattttctctttttcatagatatggaacttgattgacgtatattcgcaccaaatttcttatagtactgattcatcagattatagacttgtttctattagcagccagattactgacaggaaactgcctcatacattgctaaatatgtctgcccctcacaataagaacagtaaaaatatagcatgaaatgtacttgattcagcccaaggattagtagtatcactagaggcactttagtgattgaattttcgcaatataacttggatggtataaattcatgtttctggattctattaattatcaagaattgcttgacttcatggcttgaaccagaagcagatgtatagatctggacaacgcggaaaaccagtgcagttatctggcacacattaattcattctccaacatgggccactacacactaggcaataggccaggcgctggagcctgggctccgtgctgctgtgtttagctagaaagatgcagacataagtgaagagttggaaagccacacagagattggcctagtagaggcccaatggagggccctggggatgggcaaaaggccgggctccacatcacacacctttcttcctcagcagtaaataagtatctcttacaaggtatttgcaagacgcattaagaagtttgctatttccctttcagtcaggaatagttgtagaaatgtttcatctggacatgcagattgctcaacaatcagtaatttcccatgaaataattctgtccctccacaagctcttcctgaggtgactctgtgctgcaagctcctgtgtttcctccttacagctgtctcctgacttcagaaccaacattcttcctgttcctgtgtgttctgggtggttcaccttcttccttgataaggactttggctctaataggatcatgctgtgccttactcttcttcattgatccatccttccatgccatagacattttttgtcaagtaccattcttggattcctaccatctaggacaagcttttccaacctgcagcccatgggctgcatgtggcctaggacagtgttgaatgtggcccaacacaaatctgtaaactttcttaaaacattatgaaattttggtatgatctttttagctcataagctatccttggtgttagtatatttcctgggtgacccaagacaattcttcttcttccaatgtggcccagcgaacccaaaagattggacacctgtgatctaggaatttagtatgaaatgatgctgatgttgctcccaccttcacacagtttagtttatagttcaccaccatgtttctcaggggaagcaccagtatcattggcaggagtggaatcttcttagaaagacctatacaatgtcactacaagctttttaccctatcttttacaactcttttgcattcaccctaaactccaataaaagtaatcactgacccgatattatggttctcagagatttgctgagctgtgtcccatcactcttcctgaaatgagcttccctcctcacccaccttcacctattgaagttctcacttggcgaatctcagctcagaagttatctcctctgtgaagcacccatggagcatactatccagaagtggtctctctaagccaacagaccttgtcaatgctggtcccatggtggctgtcatgtgcccataaattgtgcttgtgtatacagtcttttcccatggagataaggaacaatgttatatgcaattttggaaccctttagcacctaattgagtgccttcctcctatgagacatgcaacaaatgctggtaatatgaatggactggttgatttgatcacaagtcagaaatttgggtttttaaatgtctacagagtcatttgggattatcagctcagctgctcaggtggtggatcctctacttttgccctgtggttttgctgccatgcccatgtagcaacagcggctgacctctctcactgaaaaggaaaaatcacttacatacccagggccctctcttccttgcccattcacgcttctagtatgtccatgcatccttttcatcctagaaccttatgctatagttagtaaccagattttgccatctgaaaactgttgctgtgcatgaaatcctaaaattctcatgtcaacttaattttgcatttctacccttctagaaaataatttcatggatattaccatcattttgtccagagacaatacaactaaatataacagtgagtggtgggttctcaacctgactggaaacagaatatacaatccgaactctcaggccctggaactggtggtcttcaatgacaaagtcagtcccccaagtctggggttcctggctggctatgggtaaggactcattgaacaattcacagttacaagagtctacttctgtatcatgtaaagttgagagtgggaagccttttatcttcttagaattcgctaattttagagctgcagtattaaaatgcacacatccttgtgtgcattttatttcaaaaaatgaggcaccagagtcccaaagagatcaaaactcccagtgtgactcacacagcccaggtatatggcttctttactccacgtcttcctgttatggcacagtttaatccaatcccatgtttacttgtataaattagcacagaaatatcacttttctgcttagatttccttctaatccttagcagatggatctattagacatcctgcttttgaacttctgaaacatcgcatcatgttctgatgcttaaatcctaggacacgcacatccccacaagacacaaatgtaaaatattgtatttctcaaagttagcctcataagaaatgattttcacccagaattttataaaaattaatctgagagacagtattgctaaaaggaaaggagcctgccacagaaaatcatatataattacatttctaccaaatacattatatggtttatgcatttaatatatgcaacaaaaccacctaaagttcatacatgaaacggttagcattgattatttacagaatgtgagattgtaaaggactttcatttttcaagtctaacagttctgtaatacataattctattttctatttataataattctataataaaaagtcaactttttaaccaaagggaaaaaatgtaagatttgatttgcttatttcttctacagaatttgagggaaagtaatatttttttcttttagacatgcttttctttattaactatatttaactgctgtatgcaatttctacttactgtttttttcagtattatgggattatatgcttcagttgtccttgtgattgggaaatttgtccgtgaattcttcagtgggatttctcactccatcatgtttgaagagcttccaaatgtggatcgaattttgaagttgtgcacagatatttttttagttcgagagacaggagaactggagctagaagaagatctctatgccaaattaatattcctatatcgctcaccagagacaatgatcaaatggactagagaaaaaacaaattgaaaccttagaacacagactgcaaataatgttaacatttgaattttttttaaaagcacaatattctcataagagctaagcatttctagttcgacggaaatggtttgtttctcttctgataggtagacaaaaggagctgatatccttctgcagtaaaagctaccttgcaagttaaggcactgttgaaaatgttatttgtaactccatttctctgaaatcagggctacttgctttatgttttagtcaacagtgtctcgcattctgattgatcatgtgaaggaatcatttatgggccccgtccctaagagaaacagaagaggagtcagaaagaaagatgcctgtgttttcctctgtggggcccgtgcacttcctggagagatgctacaatgcaatatacagcgctccatccccactggggaagctgctgtgatgagactagatgagccttcaacacactcagaaaatgcaacagcaatagggggcagacagctcctacctgtgtttctaggagcaaaagagagggaactaattgcccgtgaagacgccagtggaaggatcagcctcattctaagcaaaaacatagtattagtgatactcttactgccttatcttaaccaaggactaataggatacctttccattaaacaccagtgacttctcaggaaaaaaaaaaaaaaggagcaaaacaaatgatgtgtacacctgctttgttatggtccaccagtgaccagcttcaatgaggggaaccattctggagggctgcggtctcctgtgcaaacagacatgaggcagaagagtaaaaagaccaacccagtgggacctagaatactttgtaactctttaataactgaggtcaggaccgctcttctgccttccccttcccttaacgtgctttttcccatttccatgatttaaggcaatggtttttccagtatgtgacattttccttcctgtttttcaggtatatcaaagagtttacatattccaattcacatttttacatctgagacgggttttttaagttcataattatgaaagaaatatgtatattgagcttggggaaataaaaatggccttttcttaaattattattattggtaatacaacctcttcattaaataacaatgtagcatgaaaaatttatgattgaaatgtagttttcattccatattaagatacagtttctgagaagaatcattgaatggactagaatatgtcaaaaattgatcctgtgtagtttgggttcagggctgacttaaaataaagcacatcctgcaaagtcattttaagaat

SEQ ID NO: 24 - DNA, 29260 bp, Homo sapiens
acctggctccgccccccaggacgccgagcctcggccgggcggtaaaatcggcgcttaccctttaagcggcgggacttctggtcacgtcgtccgcggtcgccggaaggggaagtttcgcctcagaaggctgcctcgctggtccgaattcggtggcgccacgtccgcccgtctccgccttctgcatcgcggcttcggcggcttccacctagacacctaacagtcgcggagccggccgcgtcgtgagggggtcggcacggggagtcgggcggtcttgtgcatcttggctacctgtgggtcgaagatgtcggacatcggagactggttcaggagcatcccggcgatcacgcgctattggttcgccgccaccgtcgccgtgcccttggtcggcaaactcggcctcatcagcccggcctacctcttcctctggcccgaagccttcctttatcgctttcaggtacttaccggagacggggggcgtggagactacaggccccaggaggcccagcggcggctaagcgtaggctggcatgttgcgggcgcgcggtgcctgctgggatttgtagtgggtccggcgccggcggtttagggcggggtcctttgggcccggggaggctctgggatctggagcggggtgctggatagctggagttgtgggctggcctggtggggaggggttgacttcactggtatagtgagattgtgcttcccgctcttcgcactcagtgaaggaagcagtgagattagtcgttggtagttgtcaatctgttggacgctggcgattaggtccgcctggagcattgccctctgacctccctctgtcacccacgtgggtggcctgtaggtgtcaacttcaccaacttatagctgagttcctttcacgtttatggagtttttttgttttggttttcctataggagtgatttaaagtcagagatacaaagaacgagtgtattgttctgcatttccctctagacctaatttagtgtcccccacgtagtaatagaatgtacgaaggaatgggcaaagagtacatttgtccagaaatggaaggccttgttattttcttaagcatgaaggaaacagtccagagtaacatttctgtcaagagagtgccagttttctgaaggttatctgtattcaccaatttctgatttaaaacttcaatcagtggcaggtcagatagcaagatctggcattaatttcagccctttacttggcctatggataacattttcttgtctttccctgtcttcactgggtgttacttcttggtttcctttgctggttccttatcttcctgacttttaaatgttaggatgtgccttgggaatcagttataggaccttttctatagactctccctagctttaggtggtctcattcattcagcctcagggctttacatactttctataaactggagattctgaaatataaatataaatatcttcagtccagatctgtctccctatttccagatttgtgcatccagcagttacttgaaatcacgacttggatgactaagagtcatcttcatcttaacgtgtccaaaactgaatcccctttccccctttgccttagaagtgaatagcaactccgttattagaggagctgaagttaattgtcggagtcatcttttatttttcttgtttttctcacaccccacaatctgtcagcaaatcctattgactctacttgagacatatatccagaatacaatcccttttcattctccattgcaagccattatcactgcaatctggttcctttccatcttttctctagacagctagagtgatccttttaaaacctacatcaagtcctgtctttcctctgtccagaatcctaccatgtcttcttaatgagtaaaatccaagtcctttcagtggcctgcaaggcccctgctgcttctctgacctcatctcctactactctccaacttgtaccttaggctccacaatgagatccttgctgttacttcagtgcttatctggatctctcctcagggcctttgcacatgttgtttctctgcctgaggaagataaccgtggctcagttgtttacctcctaaccttcttcagatctctgcccaaatgccgtcttgttgacaaggccttctctgatggccgtacataaaatagcccgtccttcactccactcccttatcccttatccttcatttttctttctttctttcttttttttggagacggagtctcgctctgttgcccaggctggagtgtatatggcgcaatcttggttcactgcaacctctgtctcctgggttcaagcagttctcctgtctcagcctcccaagtagctggaattacaggtgcacaccaccatgcccagctaatttttgtattttagtagagacggggtttcgccatgttggccagactggtcttgaactcctgacctcaggtgatccacccgcctcagcctcccaaagtgctgggattagaggcgtgagccactgagcctggccttatccttcatttttcttgctacatattaccctttggtatttattagtctgcttcccctcagagaataaggctccatgagagccgttcaccactgtccttgttacctggaatagtgcctgggacgtagtaggtgcttatatattaactgagttgttggaagtaattgggcacttgctgtgtgctgggcactggggtacaatagtaaataggactgaaaaggtttcagagcctgtgaagacatagaggcacgtgttttaaggggtgtaatatttgatagggtgttccacccagaaaggcctcagagaagacatttgaagaaattggaatactgaggagccagccagccagctttgggtagatctggctctggagacaaccttccaggaaggactagtaagtgaaaggctcagaagtaggagctgggaacaggaagaagactgggttgccagctggcacagggtcagctgtagggtgaggattagtagatgacagcagggagatagccagggctgggtgtagtaaagctaagatggaaaggtgggttaaagctagatcatagttgagccttgtaggtcatgttaagaggtttgaactttattttgagggcactatgaagtctttggagccttgtgaacaaaggactgacagattgccccgactattctgtggagtggactttgtgtgtgtatggagggggttgaaggaggaagggctaggtgatgagatcagagagatgaatccagttaggaggccagagagatggtggtttggatcagtgtggctgtgaagatagagaaaagggcatagacttggcagaggggacgagattacagccgaatggatataaagagtgaatgggtgaagcgagcaggactgaaagatactactgttttcacaggagcagctgagtggatggcggagcccttgactgagatggggaatggtcagggatacctgggttgggagtgggggctggtatggatgaagagttaggttttggctgtgctaagtcttgagatgcttttcaggcatccatgtggcgaggccaagggagcagttggatataaaaacatgactctggagtgcagctggaattgcatactgttctgtgtttattactttactaaatatttgttggctgagagaatgttgtgtactttgtccctggtggcttgttgggtaatgtgtggtcatggggagcaatggtggcatattaatgtgtgagaaggacctggtcaaaaccggcttgttgtccctgttagcaaaatcctcacttgtgtagtgacactagtgactacacgatgtaaataagcacattgtaaagaagcaatgtaaataagcctaacaggctgcgggtgtataaggttaaaagtggtgaactgattaaaaagagtaatcgttcttgtcacatcttccacaattttgtcatcttccctgtattatttcttctcagctgccagcaggaggcaggacagtgtactgcccaggtgtgaaaagaccaacagctgtaccttgtcttttcttcctgttactctgattcttgcctattttggacacatgtaactttcagacccacctggaggaactcatttgcaaatgaagcagtcaaggaaaaactgcatttgagaggctgctgtgcacggacagtgtgcggtgtgctttagcagagttctgctagaaagttccttttttccttagaagctgaatctttcacaacttacaaaaatgggggagtgattgatttagaattgtgtgctcatgttggaagtgacaagttatttttcctcctcagctctagattcttgtgtgtagcttgttggtttagaacgctgaggtttataatgttatttctttagtttggataggttgaaacaggtgtgtgttaagactcattatactgttgtctacgatttctccctattctgagtccctcagatttatgttcatcaatcaaatagttcacaataatgaaatgtcttcatattaatcgttgattaactacacaagaggtggcaattcctgctgcctttgtgttttctaaggttatgtctcccagggccgcctgcatggctatatttcttcatttctttggacaaaataacatcaccctgttacaacttccctgaggtcatgtcactgaactctgacagtcatcctgagataagtgttacccccattttgtagacagcttcagtttcagtttctatttcgttgagtcaaggatagttctaagctgttttgtttaactcctttgcataatatctacgaaaaaaataagtatgtagcaaaacatttttgaaggtgatttcttccaaatcaatcatagcaaattgtttttccttttctattcgagtagaaaggctgttagatttcaagtagttgaatcatggtctcaaggcctggctcagtcccctgctagttgtgtacccttaggcaagttatttatcctgtctgagcctcaatttctttaggatctgaggataatatcatagcatattaactttgttctaagactccattgattatacgatgcaccatcaatttaatgcaacttttttgggggacaggggagtagaaattacattcaacgagtgtattgattgtaagacactctaatttcagaaacacaggaacgagtaccttcaaattgaggaaatatgttatctacttcttgcctctagtatgtagaacacatagaaaaatgtttgtaatacccaataagtagcctgataaataagctattcaaaaatagttgcctcctacgtggttggtatgggaaaaaaaatagttgccaatttttatttatcagccaatactttatgccttatttccttctctcctggacagtaagattctaattttaattagtaattgcaattgaaatgtaactgctggatgattattctgctttgtcttcttaaaagcatcctgacttgaaatgggaagatgtgaactcttgatttctctaatttatttccaggaataagaaatggtaccaaccaattctgtgactcagccttgtgcttatatttgccaagcttttgcttatatatcacatttaacctgatgacagcaaccttaggagactgatttaagggtgtattggggaagagagacgtttcaacatagcagggaggagaatgaacttggactataggctgagcatagaagttctatatccatcaaggtttggctatagaactctagtggcaagtgttctggtacgtaatttaagatctttccttagtagtcctgtccatgttgaacagttctgctgtgttctgtaataatgttgcccattagattgtggctttttaaaaaactttttattgagttacaatatacaagcaggaaagtgtatgtataataagtttatagcttgagtttttaaaaattcaaaacatgtatacagccagcattcagatcaagaaacagaatctctaaaagctttctcctgcttccttctggtcactgtcctctctaagggtgactatgctcttgatttttaataccatgtattgttgttgccagtttttatgctttttataggtggaattatgaagtatgttctcttttgtgtctacctgcttttatcaacattatgagagtcacccatattgttgcatgtggttataggttgctcattatgggaccataccacaatttatttactcattcagctattaatggaccttttgggcagtttccagtttggctattatgaatggtgctgctatgaacattctaatacatgtcttggtgaacatatgtacttcttggtgaggagaaatagtaatttctgttgcctatatatctaggagtagatttgatggcttctaattgctctttttaaagattaagtgcctttcatttgtttaaatgaatggaaggggccttttcttgcctacccgttgtgtctccccacccagcaaaaaaggccacagtttactaaactagcatttgtcacacaggtgctcatcatctttcttgcttggtgactgatatatacttaagtccgaatcaagtgatccttattatttcagacaaatcctcacttttcatactttaaaaaaaaaaacactagattctggatggcaaattatttcagtagcagattgtttagaagattttagctaaaggatggctgcaacctacactctgaagttgttggactaataactgaggaacaatgtcttatgtcttctttaagggtgtatatagcagtgagcacatgggctacatgtccttgttaagtgaggaactctaattagggcccagctttcctcctgaaaaaactgggatcattatgggcctggccttgaggttgctgtggacttaaaatgagatactcccccacgagtcctctcagtaagtgtgaggcaggcagtcctctgtctgcaagtcgtggctctttgtgctgcagttggctgcctcttaggctttccagggttgaaaatgggcctcttcactcctggcactgaacgtaaagccagttccttctccttactgtttacatatcaggtcgaggaaaaaatgggatttagttggatacttacaatggggatttccgaaatatgttacactgtgtccttctaaagagataagctgtcttctggtgttttcagattataattttaaagtaacacaaaaataatattaagtcttttagatcaatgaaagcaagtataactcaagggtaggcttaatgaacagggaaaagaagtgagatattttgacagacactgatttccaaagaacaggtgcaaacagtgactaaaaatagtcttatgtcatcagcattagagaaaatgtagtcagacaaaaacaaggtttcttttccaaaaccaggccttgagtaacttataggaatatgggggtagttgaaatatgaatttataaaaactggttagcgggtgtttccgaaaagattgtgataatacaattaacacacccacacatattaattctttttgcatagtatctttttaattcactttcttaattccaaccttttacaaatcctgtaagataaggaaggcagaagtcataggataatgtcattgggtagatgatgaagccaatttgacgtccatacttttccaagggtccagggctacctagagggtttgcttctggtctttactcccagtccttttcttaagcacagagaattaattagtaggtttactctgagtctatttcaggattacacaagtgtctgtagtagtgaacacttacactaattgtaattgtacctcataatactgacgccatttgtgagagggattgtaaaaataggggcttagtatcacaaactctggagtcagactgtctgggataaaattctagcttcaccacttactggctgatacttaaccttttctcatcctgtttcctcatctatgaaatccgtctcctgaatcagtgcgtgtaaataagctgagtagcacattaatttattgatttctttaaaaaaattaactatggaaattgaggctcggaagtggtgacttataagcaaaaacttaaacccaggtcttctcaagtcatctccagttccctttccactaaactatcctgtttctgtgataaagttgtgaatgaatcaaaccaaatgttaaactattttatttttctggtttaatacacgtttcttggaaagtcacttttttggtatgcacattgcatttccctctacaaggaattaagctctgagggttacattcctgtacttggagaatggaactggccagtctgtatgtggccagtccccgtgactgacgtcctccattccagccacacttgaattgttagcagtacccattcagttattgtgctcttgcaattcttggggcctttgtaacaagtccacatgtcccctcccttgtgccaaccctttcttcctttgacagccttccccactactctgaggaattcaggggccatgtcttttgtgcttggtacatgctagtgtgcaatgagatagacacatatctctcacaccaaaagccagcattttgctgccatttccaaaagtttaggaaggccatctgcttcaatcactatttagcattgttctggtgggggtgccagccagtgaattagacaagaatgaaataagatacaaaagtttatttacagctagggttgtatgcttggaaagcccaagaagctcaattttcttttttgttaagacatagtttcgctcttgttgcccaggctggagtgcagtgttgtgatctcggctcactgcaacctctgcctcctggattcaagcgattctcctgcctcagcctcccgagtagctgggattacaggcatgtgccaccacgcccggctaattttgtgtttttagtagagacaaggtttctccaccttggtcagcctggtctcgaactcccgacctcaggtgatctgcccacctcggcctcccaaagtgctgggattacaggcatgagccactactcccggccgaagctcaattttcaatattgtaggcagtaagatactcagcttttgtggttaagtataaaaaggtagaaagagatagctctatagacaactctaaaagctatgaaaaacttcttggctgggaattatatcaatatcacatggatataataaaagaatggttctaattcatttagaaaaataaaatattgagactaaccaagaaaattgtgacaattgttgaagaaaaaaagggggagatattatttagctgtttaactttaccagctattaaaatatgttataaaaggaatagaaactaggctaggcccagtggctcatgcctataatttcagcactttgggaggctgaggtgggagcatcatttgaggctggtagtttgagagcagtctggacaacataggaagagcccgtctcaaaaaacaaacaaacaaaattaccaggtgtgatggtacatgcctgtagtcctagccacttgggaggctgagtggagaattgcttgaacccagaaatttgaggttacagtgagctgtggtcaaaacactgcgctccagcctgagcaacagactgagaccttgtctcaaaaaaaaaaaaaaaaaagaaaatagaaattaaaataacttgatattggcataggaaccaattccaaacagaatggtgttaaaatagacctacatgtaaaagagactagagtataaacgttcaatgaaagtagtttttcaaataattggaaaaaatgtgggttactctgtaaatggggttgggaaaactgggtgactatttagaaaaacagttggatctcttcctcattccttggatgcaccttgaaagtgctaaaataaaaccatgaacacttacattcttggagcgaaaagactttctaaacatgacacatcatggatacatatgcctacatttaattaaacttttgtatgtcaaaatatggcaaaaacaccatgaaagtctaatgacatcagaaaatgcttgcaatgatgagaaagagaaatttcataatgtatgaggaaatgcagccaggtgcgatggctcatgcctgtaatcccagcactttgggaggccaggacaggtggattgcttgagctcaggaatttgagaccagcctgggcaacatcaggagaccctgtatctacaaaaaatataaaaattagccaggtgtggtggtgcatgctggtagtcccagctacttgggaggctgaggtgggagaatcacctgagtccaggaggtggaggttgtagtgagctaggatcatgccactgcactccagcctgggcatcagagcaagatcctatctcgggggggaaaaaaaaaatgtaaatccagaaaaacaaatgaataaaggaaatgctcaggtttttaaaacgtgaaaaggtgcttgacttctcataatgcaaataaaaattagttttcagattggtgaatatataatacatgaaatggtgagagtatggagagaagacaggattcatctactttttaggaggaagtataaattgagcaaacatttttgtaggcatttggcagtatctaccaaaataaatggttatgtctgttgctctagcagatttattgacaggaacttattctgtatatgcacatataaagaggatatacaagaatattcattgtggcattgtaacagtttaaacaaaagtttagacattcacatacaaggaatactatgaagccaattaaaatattttgtagggaatgaaccaaggtataaaacagtgccgtatagagtaggataaagaagaatgagtaatagtaacatgtatttcttagaggaaatacaagacactgatcagctgttgttggggaactgggagactggaggttgggaatgaggcttacttgttactttattatttaatttattttaattaaattaaatttaattttttgagacggagtttcgctcgtcacccaggctggagtgtagtggcgcgatcttggcttactgcaacctccgcctcctgggttcaagcgattctcctgcctcagcctcccgagtagctgagattacaggcccccgccacctcacctggctaatttttgtaattttattggagacagggtttcaccatgttggcctggctggtcttgaacttttgacctcaggtgatctgcctgcctcagcttcctaaagtgctgggattacaggcatgagccaccgaacctggcctgcttgttactttagacccttcttatgttttgtttgttttttcagggaaatgtttttaaagaaaaagtgcccctattgcctatttagtgcattggtttgaataaaaaattgttgttttacttctgcctttgaatgtggcatttttggacaaggtttgtcattccagaatattctttccctaaatagaggcattactgtactgttggaaattaagcctttgtaattcattttttgatgtaggcttaattgtatgcctgatctcagcaaagactaaccatatactcatatagtattgattttgtttcaacttgtttagaaatatttgttgcttattttatgatgtcgttttattccattgatttgcaaagtgatgtgattgtatttggtgtgaacacttttcttcagttgttttcttgagttgtgttggtaggatcactttcacacctctcattgaggaggatgctttgttaattttgtttagttagaagggaaagaaataaccaggcttacagaaactaacagctgtgtttattttgatctggacagatttggaggccaatcactgccaccttttatttccctgtgggtccaggaactggatttctttatttggtcaatttatatttcttatatcagtattctacgcgacttgaaacaggtatgttacccatagttgttttaagcattgtttctttctcatttactaatccatgtgtttactttggaggaatttggagggcagttagcattacaaaaagaaactgcataaagatagtaaatgcttagtgactgtgccaggactgcaccaggcacttagcttactcaatttttaatcctcacaacatcctgaggtataagtagcagtgttaccattttatagatgcaaaaagtagcagatcagaggttgacatggcttgtccatctccttagtggctgagctgtgtgcctttcatttattttgagggtctcactcatttcttttgcagcagtccttgtccttcagtgcagaattgggctggagtatatatgtctcctagattggggttgaaaaacatcaatttatgtaattaaaagcctagatttattctctaattgaaaaactcaactctaaaatacagtatatagccaagatttaataatatatggtagtttatcaggtatgagtaccaatgtaatattttattttatttatttatttattttttgagacaatcttgctccgttgcccaggctggagtgcagtggtgccatctcagttcactgtagcctctgcctctcgggttcaagcaattctcatgcctcagcctcctgagtagctgagattacagacacctgccaccatacccggctaatttttatatttttagtagagatggggttttaccctgttggccaggctggtctcaaactcctgacctcaagtgatctgtctgcctcagcctcccaaagtgctgggattacaggtgtgagtcaacgtgcccagccaacctatgtaatattatggataagttcgaaaaatcttttcgtaaaagtgtcttactgaattgtcatttatttcctacaataccttatatgctgtctgagtcacttatactaaagaaacaatacatcaatacactgtgttacaatatggatataattttgttaaatttaaatgactttgaaaaggctgactgacttcagagactttataaacttgctggctgttacctcaggatagagaactctgaactacccttaagtgtatgtaagtcagtgctcatatggttgagaattgcgaatcagtctcatcactgcagggaaatagtaggatgggtatttgatgtcaagtaacatttttccttaaattggcatttgcttttaggttctttttaaaaagaaagaaattgtattaatacaaagtgtaaggtcatagactattatattactattgggaggaacctagtttatttcctgagttttaccaaaagatgaataggagattcaaggaagtaaagtaacttggcagaaatgaaactgacaactaggcctctcaccaccatattaggggtttgatctttaaatctaccagaatatgtgatttttattctcctttgttccagttggacccataatgatactgagtgcttagcagtctgcctttctggtataacttaattgagcattaatttgttagagtaattttttttttttttgagacagggtcttgctctgtcacccagactggagtatagtggcacagtcatggctccctgcagccttgactgccggggttcaagtgatcttcccaccttagcctccctagtagctacaaggatgggtgttaaaccgccacacctggctgacttttgtattttttgtagagatggggtttcaccatgttgcccagcctggtcttgaactcctgggctcaagagatttgcccaccttgacctcccaaagtgctgggattacaggcgtgagccactgtgcccagctggagtaattattttatattgatagtaaacgttatatcaatagtaaaatagattaagtgtggatcatttatgatcagttatttaaaattttattctggaaaattttcaaacatatgcaaaagtggagggaaaagtcaatgaaccttttttctttttactgagaccaaattcacataacataaaattcatcattttaaccattttaaggtgtacaattcagtggtctttagtatattcacaatgttatgcagccatcaccacaatctaattccagaacagtttcatcattccctaaaaaagccaaagcagtcactctttacctcccactttccctcctcccagcctttggcaaccactaatctactttccgtgtatatggatttacctattcaggacatttcatatgtcctttggtgactggcttctttcactttgcacaatgtttttaaggttcattcctgtcatagtgtgtgtcagtacgaacccctccttaaccatctaatggttatcacctctaatagttatctcatagccaatcttgttttatttatatctattgctgtcctccacccctgattatttgaagcaaaatgccaggcatttcatttgtaaatatttcagaatttaactctgaactataaggacttaaaacataattctaatgctattattaaacctaaattgcaataattccatggccacttttttttttttttttttttgagatacagtttcactctgtcacccagtcgggggagtgcagtagcgtgatctcagctcactgcaacctctgcctcctgggttcaagtgattcttgtgcctcaggctcccgagtagctgggattacaggtgcatgccaccacatctggctaatttttgtgtttttggtagagatggcatttcgccatgttggccaggctggtctcaaactcctgaccttaggtaatccacctgcctcagcctcccaaagtgctgggattacaggcgtgagccactgcacctggccaatggccacttttatttttaattgccttcttgtgctttgaatccctttacccaaccctattacctggtcaggtaatacaacaaattgtaatgttattctctctgaataccaatttaggacaaatttgtgggattattaggtcactggtctcttttatttgctttgatttttataagttgcctcctcattccctactcaacaactacagagcattttgaaaggcttgagctgagaggcattttttaacagctttattgagatgtaattcatgtacggtacaacgtacccatttaaagtatacacaattcattggtttttagtatattgacagagttgtacagtcattatcacacccatttttataatatttcaccacccccaaaagaaaccctaccattagcagccattctcccttttcattcaatcccttcctcccccacacccttaggagaccactaaattttttttttttttttttttttttttgagacagggtctcactctgtcgcccaggctggagtgcagtggcactgtcttggctctttgcaacctctgcatctcgagttcaagcaattctcatgcctcagcctcctgagtagctgggactacaggcacgcaccaccacatctggctaatttttgtatttttagtagacaggttttcaccatgttggtcaggctggtctcaaactcctgacctcaagtgattcgcccacctcagcctcccaaagtgctggtactacaggcgtgagccactgtacctgaccaaaaccactgatcttattgactctttagatttgcgtgttctgggcatttcttaaaatcatacagtatcttgttgccttttgtgacttatgtcttttacgtagcataatgttttcaagattcttccatatagcctgtatcagtacttcattccattttattaccattaagattccatcgtatggatatacctcattttgtttattcagtcatcagttgatagacatttgacttggtttcattttttggccattgtgaataatagctgctatgaacgtgtagagaggaacttttgagatcattctatttaacactcttatttcatagataagaaaacagtgatctagagtggtggtgacgtgtcccaaaagttgcagagctctttgagttaacgcagttaggactggaacccaggttcactgatccccagttttctgtcaaccacacagctttaagttaacatcttgacaaaatgtttgccacctgcacattttcctgcctggctaaattgttagttatatagcagagttggcttatttgaggtttctgatttgaactggaagactgtaatttgaaaccagttaatttgtaaattctcagttgcaagcatgtcagataatatagtgctgtaatttatatgattacaatattttaagtactcagtctaaagactccttaggaatcagacagccaaagccacatcaaaagaagcacagctattattaaaatcgggaaattgtgttagaatttcagctgtgattcatcattgtgatcctctagcattaggcctgcttaacactgtggctgaagtgtgctttgaggtatcaagggagaaataaaggagagtagaagacacttttgctggaaacctattttcttttaattatatctttttgccttactgacacttgttgggtttctttttttaaattgactagctgtatcatgtaactgtgagggggtgtggaacggggagggaaagtaactttcaagctagagtgatcttacagtcatttctgtttctttttttttttttcttctgttaaagtcttctaactgaaggcattaggaattatgcttacacgggaggccgttgttgattattctgcccaataaggcatatggcgcagtgacaggagcactgtgctagtaatttgatgtcactctggttctaacaagctctgtgactttggtcatgtgactttaactctgcatctgtaagaagcaggtcgtaggtctttccattctcccttccagatgcagtatgaggactgagtcagaggctatggaaaggtttggctgacgctttattccctccttcccccacattgttttcccttggtagaatgtacgtctctggaagacagagactttctttttcagtatctaaggccagtgtggtacaggtggttgtgtgtgtgtatgtgtgtttctaataataatggtaagtacctcccagcatagccatgctggaggagacacaatggagacaaaacaggcatggttcctcctctgacagaacttaacggtctagtggaggaggacagggatcaagcatgtaatccagaatgcggccatcaggtcatggcgagagccaagaaggaaaggctgacaggctgggagggagcttggggggcctcactggtctttgggatacagggctcagaagctgtggaattgactgtactttctctgggtctgttttagcctgtggtagtcagagcatgtcacttactggaattcagttaggagagcatagattaaccttactcaggtaactttgattcagggctttattggggacgttgtttagatatttttaaaaattcacttttttagagaggagtggtttttaaaatgttctcattttggctttttctgtaactttttgaagtgtttctctatgtagatgttactttgttgtgaaattctgaaccatgacatttggcttgtttttgtttccaggagcttttgatgggaggccagcagactatttattcatgctcctctttaactggatttgcatcgtggtatccttcagtctgtgattttgggccagaaataaaccagtttttttccaggtttggggaaatagaccatattctgtaaacgtttcaaattacaatatttgcatcttggttgactaccgttaataagaataattatagttttttaaaaaaaactgtagtaaatcatatagcccttgagtgatgcattctcttaccatttgtgggatttttttccacctttggttgagtagttttatgactgttccctcttcttgttcccagttctctgtgttctcatgtgtgacagcttgttgactgaggcacaaagagagtccgtgccatgagacagcttttgaaatctgtggtccttatcagaaaattaatttacaaccagcatccttttctgacttcattgctgtccttctcttggggtcctacatagtaattcagtccctctgtgaagtacccagctctgggaagggacacagtacgtttctctgctttgtatcaatagcagttgtcagcagccctccaactgcaggactcttacagatggtgagagcagcagcagctctcgatgtctcaggtcctgtgcaaaattggtgagctcaaaattgcctttgggctcagctgccatttaaacttggctgagggccagaaaatgtggcactgtggatgccctttcccccctcctttgagggaaggaaaaaatattttggactttaaccatgctatagagtcctgagaatgtaagtagaatgattatttccttcaaaggctacaggcatcttcatcctttatttgaaggagagatgttaaaatgcaatagcagagaaaaaggatgccagatgaccagactaagtcatatgcggaagctgttgatttctactatgtccttgtcatggtatcgtctaatggaatatgcataatgaagattagatacctttgtgttgtagaatgttttaagcaatctgaactatagaaaagtattttccttcagaacactggaattaacttaaaaatttttttaattaaaaaaatatgtatataaattagagatggggtcttgctatgttgcccaggctggtctggagctcctggcctcaagcagtcctcccatcttggccttccaaagtacagagattacaagcatgagccaaattacacctggccaagtgaacttttaaatgggaggaaaataaccacatcagtcttgactaggtacagaatgcttttttatgtctgatctttaactttacaaaccaagattactggcttagcaatggatatgcaggtaagtgtccatttaaactatctatttgcccttttatttgtttcaaatatactattagtggcctttgtcagaagttgaaattgcattaactatggggttaattatgtggtattttgaaattatggaattacagctgttttatttatttatttatttatgagatggagtcttgctgtgttgctcaggctggagtgcagtggcttgatcttggctcactgcaacctccgcctcccgggttcaagtgattttcctgcctcagcttcccgtgtagctgggattatagatgcacgccaccacacccggctaatttttgtatttttagtagagatggggtttcaccatgtcaccaggctggtcttgaactcctgacctcatgatccgcctgcctcggcctcccaaagtgctgggattacaggcatgagccaccgtgcctggcctatagctgttttattttgaggatcttaagtcagctaaatctttgaagatcttacatgagctatctaaatcattgctttccttgctcatttctggcctctttttggtgtttgaacattgacaataatggttgtctagtattttctaggcatgtgacaacagtggttgtctagtattttctaggcatgtatatggatgttttttaaaaattgagattatatggtaatgctttgttgcttactttttgtaaataacagagcttgactcttacatttctgaatccatctaaaataatatagttttgttgtattttattataggattttgtaatatttattgtatgataaataataggatcaatttataattctgatcagttgagtttccctttacccaggtgaggattgttgtgaagaggaggggtaaaaagcatagtagatgtacaccttttttaagtgcctctggagcctggtttttacatgtcgacttcttttgcagttgctgatgattcctctgatcatgtcagtactttatgtctgggcccagctgaacagagacatgattgtatcattttggtttggaacacgatttaaggtactttgccttggttggaaaagtgtccttttcatttgtctgcagaaatccctcttcagtccagagatgtactttctgactcatccagaaggggtcactgcagagcagtgtaccataggcaagcccctttctgccctcctcaatcccagctctatttaattagccagcctggagtccgttgctggcctttgtttcttcactccctctgtacctcgggcccctcaaggttatgtccctgagtgatcttatgtgtctgtgttagagagaaggagagataactcatgtgaaaccctgctttaaaaatctgttcttatccctccctcgttccctgttatttgctttatactgtagctgaaacagattgtttttgcccccaaacacttctctttgtacattctttcacaattttccacctgtaacatcttgattctcttctttgtataaatcctacccattcttaatttgagttggaactgaacatatttcctgaatctcctgcctagaattagtcttacgtttgggctttttcaatactttgtgtttctctttagtacttagcacatgtagctgtaaagttatttgagtataaccctctctttcctagtttgtgaagtttcttgcaactcctttagctcttggtatgatgtcttggatttggtaaggggctcaaatgttgagttcatctggagagctttcttatttgggagagtattagtttaagatatcaatgcataatgagataaaaattcagaggaattttgcaagatatgtaaaagaagaacctaaaaagatggggtatgtttattttatttgtagcaatttgttggctggaatcttagtgtgattctctcatgggccttgcttttagtagcatctgtaggacactcatctgctttttgaagctgtctgtttatagcagttcagcagggcctgtattgcatcagacctgtgggcaaagtactgtgtccttccagttacaaatacacaattaagtctagttttagataggaaggtttaagtatagtgggaataatgctagattgatcctagaaattttgcagtgaccttccagaggatttatataaagcccttgtcagtgtatccttacccactttagtccccgtagtagctgtgtcctcgtcaggtgtggctactcacatttgcatatattcattccatcctaggcctgctatttaccctgggttatccttggattcaactatatcatcggaggctcgtaagtgatattagatttatttaattggaaactaatccttggaaaatttccattagtttttatctttctctaacctttatacaactttaaagaatctcaacattgacgcattagaaccctatatttatggaataatttcacttcgattgaattgattagattgcagggctttaagcatatttaaccttgaatggttgtgattttgttaacttattgttacacacagtatgttcctatgtgtatagtacaggaataaatatgtatttctggattcactattctgattgggcaaacagagacctaatttttgtctgagttggctcctctaagagctatgtataaaattactatgtcttatattcttaaggcatttccagaatgccttggaaactgcctatcggtcatagaaatccagattcttagataggatataattttgcaagtggtttgatgatacagaacttttttttttttttttttgagacgaagtttcacttttgttgcccaggctggagtgcaatggtgcgatcttggctcattgtaacctctgcctcatgggttcaagcaattctcctacctcagcctcccgagtagctgggattacaggcgcccgcctccatgcccggctatttttttttttttttttttttgggatttttagtagagatggggttttgccatgtttgccaggctggtctcaaactcctgacctcaaatgatctgcctgccttggcctcctaaagtgctgggatttcaggcatgagccaccatgcctggatgataatacagaacttttggccaaccagggtcaaatatctagtctattggtcaggaattagagctagacataggaatagctttaatttatccagtcagaattttaaagggaggataccaagatgcaacttctctaagaactcccatttcttcattttttctgtttatttatttacttatttattttttcaagatggggtctggctctgtcaccgaggttggagtgcagtggcgtgatcttggctcactgcaacctctgcttcccaggttcaagcaattctcatgcctcagcttcccgagtagatgggattacaggtgtgcaccaccacacccagctaatttttgtattttttgtagagatgaggtttcgctgtgttgcccaggctggtctcaaacttctgacctcaaatgatccgctcaccttggcctcccaaagtgctgggattgcaggcatgagccactgcacccagccagaactcccatttcttatactacaaactacttttaatatttcaatccatttttatattgctggttcttcatgtgtctgacatatttgctctgtgtgatcctaacttcttctgcatattgctggggagaagtgaatggatggagcagactgtttagagcaaagcatgttctgaacttggcaaagctgctcttccacccaggaaggtgaagtctgaagtagttgcaggtgttgatttgcccctgacgggaatcatgttgcaggtgaagacaaagaggatttgtaatagtaacagtagatctatacactcttgaggtgacctgtatgtaagccaagggaaaactgaagaaggtcagcgttgatttcagggtgcaagtcggctttcctaagtgatctctgtggtgtcttacactcaaggatacaagaggcaagggagaagtgcttaatggctccaggaaagggggaacaggcatttattgttcctcttttccttactcccacgcttctctcttggtagccttcatgtttgcccacattttataaatacaatattcatgactgaaagcattcagaagcatgctttgcaacttccccaactcttgaggcaggaagtagcaaaaacaatattttgaggatgggctggtgcttgaaagagaggtcagaggggctgctggccttgaagagtggcaggcctcattggttcagcaggactgatttcccgtctccctcagaatgcatttgccactcagactacaaaagtgctcattgtcagctctcacagactcccagggactaaatgggctgccttgaaggctctcttccttatgctattagttaaaacttggtgcatctctattgcttgaatgtctttaaactcatttggctctctttgcagggtaatcaatgagcttattggaaatctggttggacatctttattttttcctaatgttcagatacccaatggacttgggaggaagaaattttctatccacacctcagtttttgtaagtgtttttgtcctgtctcatctaacattttactgcctgtgttcttagtgcatcctaatgagagctccatgaggagtatgatttacccctatgccccatctgctggagaaacctgaggcaacaagtgacttaccctagtcacacagtcacaggaagttagggattaaagcttaggctcagttgccttcctgttactcttttagccagggaccactgacaactagattccaacattacaggaggcatctcagctctctgagcctgctgagggacctgatgcaactccagagtgcgaaacagtaggctggtgaatgggcagagtcacaggttagtggggtgtcttttcttggcccatcagtttttacccatgattttgcccaaggaagggtaagttagcgtgttggtcagcaattttaaacatttttatattaaatactatggagtagacattttacaggactgttcagagttaaaatgagagacttgaggtttgtataggcccaaccccctgggagtttgtgctctttatctgcttttagggtttactgaagtgggctggtaagggcaacagctttgatttttgagacaaacttggatttgaatcccagtcccctcagatagcagtttttatactgggaaagttacttaatcaaacctccaagcttcagtttgcaagcctgtaaattgtgggagaagcccctgtctcacaggactgcatgaggtaagatacactgttgggaagcacagtagcgggttctcggtaagtaaagctagctgccatattcctaaaggtgggggtaggagagcaggattttgacgatctgagaggagacgcgcacacacccagaagcatgtaatagtcgtgtgaccgttctgtcagtgaggcaaaaggctgtcgaagaacgggccagttaaatcaccatctgggtgtcacagcctgcctgacaatcatgcctaatctcatatcagggatatgcagtaatagcttgcatttgaaagctttaaaaaaacaaacaaaccaaacccttccacatcttgctaattttaatgttttgcagttctgtcattcctctaagggatcagtgagggcagtaaaacttgagcaggcctcctctttctccccttccttttatagggtaggggtatgtttttcaaagacttttcaaattgtgaactgtaatatacagagatataccatattggtggttgtggtgtgtgtgtttttctttaagagaataaaaagaaacttgtttctcttctgagccttgaattgccttcaggctaaaaaaacaaatgaccaatctggtttctaattatcaaaggacataataacagcaggtttggctttctgatctaggtttatcaagtaggatggcagatgcatcaattaaaaaaagcttggtgcttttggggggcagccaacagttactttactttaaatggccatattctaacttaacggcttgtagctacttctcagttgtgggcaacacaggatacaagattctagtggcaaaatcagcgagccctggagcctgccttccacttgaactttctctgttgggggaagtccttctgctaaattttgcataaagatcagatgacaaaatacagctccttgcaaaagcagtaactgctttgaaattaccataaatttttgttgattatgtataattgggtatctttttatactaattatttgcatttaatttcactatctacttaagcagtggagatggcttccatattgtcttagagtgagtagcaaagcaagacagccctagcattttctccagcaagtgttctattttattatgtactttggaggaatattattgtaccagaaggcatggatgttgagaaaccagcacttggaaaatacattttgatttaatggtaaagctgtatttgtttaaaatggaggaggtgagtataggaaggtataactgcttttctaaatggaatgctgatacatttgtatcaccattttccattccatttagagtagttatatcttctctgtacacactaaattttgtgtttaaaaggggtttttggccaggcgtggttgctcacgtcggtaatcccagcattttgggaggccgacgggtggatcacgaggtcaggagatcgagaccatcctggctaacatggtgaaaccctggctccactaaaaatacaaaaattagctggacatggtagcgggcgcctgttgtcccagctactcgggaggctgaggcaggagaattgcttgaacccgggaggtggaggttgcagtgagctgagatcatgctactgcactccagcctggtgacagagtgagactccgtctcaaaaaaaaacaaaaaaacaaaaacccgagttgttgtctgttttgggaagaggcatgaaggtatcgagtatgatgtaaacagactccagtcactgactgctgtcccttcccaggcaggatgcatgtagtataacaagtagtgcagggcgcaggctctggaaccaggctgactaggttggaatcctgtcactttcgaagcgcttcactcagtgttggctcaattttcttgtttataaaacaggagtaatagtaatgcctacctcatggggttattgtgaagatcagatgaatttataagcaggcagcacctagtgtaaggcaataatcactgagtaaattcacatagtaactgctctagtataaggtcaagtataaagcctgtcctcttcagggtttctgctgtggacaagtcacctgtcatgacttactcttgctgccaagaagggtttaagcggaggtatcagatcatgctctctgccttcaagcaaaattttaaacattaggatctgctaagtggaataggtttaaacacattctcagtttactaataaaagagtcaaagatgggaaatagttggaaaatactattgagagtgtaggcttgggtttaagttctcttagctgttctgtgaactcttagtttattaattttaaggtgggaaatcatctaaccgtctggggccccagctctcccaccatctgtgagaagggaagaatgtacctggaaggcagattctgaataaattttaaaacatacccatacttccaacatagaaagccttcttcccctgtctcctttgatgggctcagctgagagccttttagaaatgctgtgcaaggctcaaacatgcaggctgtggatttggcctttgaaagtgaatgtattttgtatcctttgatccagtttgagccatatttagatataccaagatgctatcagtcattctttggttgctgggcttgtgggtgtaatatttttgtttccatactgttctgcatggattacttttataagcagagaaaaaaacgttcagagtgtgaatttagctgaaatctgaatacatttaagaaacatgaaaaacgaatgccgtctgtggtcaggtcatggggctgagtacagaaaagacaaagttaaataagacgtccctcgctgccttcaacatgacaagtgccatgggaacagcaggagagggaggtgttctcggaggtcagataactatgtggaagtgactttgttctcttctctccgtttgtgtccccgtctttctgcaccaggtaccgctggctgcccagtaggagaggaggagtatcaggatttggtgtgccccctgctagcatgaggcgagctgctgatcagaatggcggaggcgggagacacaactggggccagggctttcgacttggagaccagtgaaggggcggcctcgggcagccgctcctctcaagccacatttcctcccagtgctgggtgcacttaacaactgcgttctggctaacactgttggacctgacccacactgaatgtagtctttcagtacgagacaaagtttcttaaatcccgaagaaaaatataagtgttccacaagtttcacgattctcattcaagtccttactgctgtgaagaacaaataccaactgtgcaaattgcaaaactgactacattttttggtgtcttctcttctcccctttccgtctgaataatgggttttagcgggtcctagtctgctggcattgagctggggctgggtcaccaaacccttcccaaaaggacccttatctctttcttgcacacatgcctctctcccacttttcccaacccccacatttgcaactagaagaggttgcccataaaattgctctgcccttgacaggttctgttatttattgacttttgccaaggcttggtcacaacaatcatattcacgtaattttccccctttggtggcagaactgtagcaatagggggagaagacaagcagcggatgaagcgttttctcagcttttggaattgcttcgacctgacatccgttgtaaccgtttgccacttcttcagatatttttataaaaaagtaccactgagtcagtgagggccacagattggtattaatgagatacgagggttgttgctgggtgtttgtttcctgagctaagtgatcaagactgtagtggagttgcagctaacatgggttaggtttaaaccatgggggatgcaacccctttgcgtttcatatgtaggcctactggctttgtgtagctggagtagttgggttgctttgtgttaggaggatccagatcatgttggctacagggagatgctctctttgagaggctcctgggcattgattccatttcaatctcattctggatatgtgttcattgagtaaaggaggagagaccctcatacgctatttaaatgtcacttttttgcctatcccccgttttttggtcatgtttcaattaattgtgaggaaggcgcagctcctctctgcacgtagatcattttttaaagctaatgtaagcacatctaagggaataacatgatttaaggttgaaatggctttagaatcatttgggtttgagggtgtgttattttgagtcatgaatgtacaagctctgtgaatcagaccagcttaaatacccacacctttttttcgtaggtgggcttttcctatcagagcttggctcataaccaaataaagttttttgaaggccatggcttttcacacagttattttattttatgacgttatctgaaagcagactgttaggagcagtattgagtggctgtcacactttgaggcaactaaaaaggcttcaaacgttttgatcagtttcttttcaggaaacattgtgctctaacagtatgactattctttcccccactcttaaacagtgtgatgtgtgttatcctaggaaatgagagttggcaaacaacttctcattttgaatagagtttgtgtgtacctctccatatttaatttatatgataaaataggtggggagagtctgaaccttaactgtcatgttttgttgttcatctgtggccacaataaagtttacttgtaaaattttagaggccattactccaattatgttgcacgtacactcattgtacaggcgtggagactcattgtatgtataagaatattctgacagtgagtgacccggagtctctggtgtaccctcttaccagtcagctgcctgcgagcagtcattttttcctaaaggtttacaagtatttagaactcttcagttcagggcaaaatgttcatgaagttattcctcttaaacatggttaggaagctgatgacgttattgattttgtctggattatgtttctggaataattttaccaaaacaagctatttgagttttgacttgacaaggcaaaacatgacagtggattctctttacaaatggaaaaaaaaaatccttattttgtataaaggacttccctttttgtaaactaatcctttttattggtaaaaattgtaaattaaaatgtgcaacttgaaggttgtctgtgttaagtttccatgtccctgctctgctgtctcttagatatcacataatttgtgtaaccaattatctcttgaagagcatttaggaagtacccagtattttttgctggattaattcctggatgcagaattcctgggttttcattttaatgaaggaggatgcttgctaactttga

SEQ ID NO: 25 - DNA, 143147 bp, Homo sapiens
aaagggggaaaagaaagtgcggcggaaagtaagaggctcactggggaagactgccgggatccaggtctccggggtccgctttggccagaggcgcggaaggaagcagtgcccggcgacactgcacccatcccggctgcttttgctgcgccctctcagcttcccaagaaaggtgagtctcgcgccgccgtgagggctcagaagtcaccaagccgcagaatctcagggtagacggattcttagagatcctatcgttaaaccctcctactttacagaagaggaaactgaggcacagaacgaggcagcggctgggataggtcatactgctagttaggactggagcccggattcgaacccaaacgttcagagacccatctttgctttgcagggatttaagtaacgcggttgtgggacgtctgctcgttgccgcccccatcctcagccctttgaggggtctacccttgttttcctcctcaccgccccctccccgctaccaccccccgcccccatctcctccttggtttctccagaccgctgctggaagcgccgaggacagaaggaagcggtgtgtcccagcacgcccactcggtatcacgtcgctctcagcgcagagctgtgacagcctgggaaaatgctgcttgcagcctcactccctcttcccctgacctgctttctcagaaagatgccccttcagagggtgtcggaccagcttctggaggagcgcggggagagaggagcgaggcccgggcgccagtgacctcctatggtactgtttcttcccagccccggaggaagcggagctagtggccctgtggggcacagggtgcccctcacttgggaagagctgacttcatggaaccatagagccccttccctcttctaaatactgagagggagcaaggaagctgagttaaagagaaaatcacaaacataaaagcaaacttcggctgtttcctttaagagctagcccacagcctgtcttccctccaccttctggttgtgaaattgtgaaccagggcgccacgcgaagcattctgctgctctgctgtacagatccctggtttagctactggatgagaaagaggacttgagttttgactccagctcttccatgtattagcagtgtgaacttgggcaagttatctcacctttccgatactgggtttttcttttctttctttcttccttttttttttttccagccaaaaaatggagatttataatggtcacaatgagccctttgggtagttggaaggatgaaatgggatcattcaagtagcatgtttagcacagtgcctggcctggcatctggttggttcaaaaccaatggcaactattgtaaatattgttacatagtaaccttgcagacagtgggttttcagaaaggtgatttcataccatcttacagaggcattttaaaaaaatctgtaaatgtggtgtctttcttcttttgaatttgagcaactcttttataataagaattttctgaatgttgtccatatgtgatgtggatcatggatgcttagctcgaaatgtaaaattgatgtttctcggtgatatgaatttcctactagtttttaggtcaaacctcaggcctgtgaactgccctgatctgagacatcctttattgacaaagagggtcttgaaatgggtgagaggcagaaagacaagaagacaaagttggaagttgcagctgtgttacagattattctaagccttctatccttgctctcttaggtcagtcgagcaaccttacatttttcatctagtatcagaaaacaaacaaaattctcatatatttcttttggattgtacagagatgctgctaaatgcaaacctttctggacacaaacttgccttatttaaacacgaacacacagacattcacatgcccacactagtcttcctgtattattggtattttaaagttaaatggattccctcccacacccttaacccttctcatgacaattgattttattctgatgaacttcatgcaataatttactactatctactggctttgccatgcgtccttaaattgagtgtccagcatttgtagttggctgcctccttcacaggccatagcatttgtatgcagtattggtaagtgcttgagaacagagtgtgatacatcttgatggaagataagagcccagtggtgcccacttaagtacctcccgcaccaagcattagtaaaggatgggatcacctgcttctatcagcttgttccatgtacatgcattgtggtgagctggctgggatatgactgaatgtgtgcctgagagacaggggccttgtgggggaaaaggaaaatgttcaaaataaggtcagatcatgaggatggaagggagattaaaagctaattcctttggttctgattcttcaaagaaaggttggtcaattatacccatatcttcatacagattattacttgttaccaaaaccatatatatgtatagaactttaaaatttccaaagtgcattctgtatatatgatactccttgttactcacaatagccctgggaggacatggcaagaatattaatagaggaaggagcccaggttttgtggtcagacctacttgatttcaaattccagctctcatgcctgagtagttgggtgatattgagcagtttatttaatcatttgaagtttctgttttatccagttctaaaatggaaaaaaaaaatgcttactttaaaaatctgtataacgaataaattcaatagaataatgtcaagtacatgtagtgaataggtgctcattaaatgatatctcttcttagctagtctcaatttatttagaacataactggaatgagactcagagaaatgaaaagttgctagaggtcatgtgttagtatgtttcaactctgggaatacagttcacaccttttcatgtctagtttagggcatttcccatcacactctgtttcctcgccaatgagatatttaacaatttacttcagttataaagttgaccttatttgtctggttatttcaggatatcctttttgttgaaaagcaggtattttcttgcaaagagaacaatccttaagcacagttctgtagagtttagtggagccaactgtcataagagggtatttaaagcaatggtctctaagacaaccttcctactctcctgtgttggatgtaatacacctttgattcctaagagaaagggtactaactaagaagacataaagtacagaattatatcactcttttcttcctgttgtgagtggtttcttccctctgccatcctcatgctagttcaaaggctgggaagaagattgaacaacaaatgttatgagtgtccatggcattattcaacttttttttttgacaattttgtgggtactgagtagagtagacagaataatgtgcaaaggtggcatttgcagaaagagaccactgcttcctggtggtgctgattacttgtctggagtttcactcctccttgtggaaagtgatggctggaggctcatgttggaagatgaagggatctgtttctggcccaggcagtggggctgttcatctgctgagacttctcataggccattagatttctcttctttgtagcaagcacacaggcttgcaaacgcagatgtagaaggaacattttgctccttgcttttggcattttggagcatatgtttgctcctataggtaagcagttagcatcatcttacctggcacggttaggaaagcagaatgtggcttgaggaaatcagaggacgtagaaaaaaacaaagattatctccagcctatacacagcttcatttgttgctcaacttcatcaggcttttgctggtgacacagatgtaggatctggtgagtcactgttgccttgcccatgaaatattaaagagagccacctactgtgctctttgcccattttggaaattgttctgcatggaaaaaaaagaagaagaaaagaaaaaagaaacaccaaagaataggaaggttacagaacatttggtaagtgatatttcggtggataaattcaggttagccattcatttgctgccttttttttttttttaaatgataatgcatggtttacactgatagggttgttaggagacatccctttggtctgactttattctaactctctgtagcagctgtggtagtgtggattttgagagtctggctgaaatctgaggcaagttattctatagagatgatcttttggctctgcagctaggaaatagggacactgatgcctgcttagaagcttaagtccctatttatttcaacatcttattcatagaaaacatttaataaacactgattctgtcctctgctaacaactccttcaatgtattagtctgttaaattacgatcatcataatttaacaggtactctttacttgtctccatcattatttgtgctgagtatcttaaatatatcatctcattcaatcctcacaataatcctgtatatttttttaggaaaccgaggctcatagagttacgtagcatggcctatgtattagtctgtgttcatgctgctgataaagacagacccaagactgggcagtttgcaaaagaaagaggttcattggacttatagttccacatggctggggaggcctgacaatcatggcggaagtcaaggaggagcaagtcacatcttacgtggatggcagcaggccaaaaaagagaacttgtgcagagaaactctcattttgaaaactatctgatcttgtgagacccattcactatcacgagaatagcatgggacagacctaccccacatgattcaatcatctcccactgggtccctcccacaacatgtgggaattatgggagctacaagatgagatttgggtggggacacagagccaaaccatatcagcctgtgtaacagcacaaagcaagacatgatgctgagactcatctacgcattttattctagagttaggaagaacttccaattgtcccacctctggactagaactgaggacttagactaagaccaatgacctacccaatcatcatcctacatcctcatcccggtactaccttgcctgtgactgagaaatatctttacctttggacctaaaatgtgggagagctgaactagatgatctctaaatttcttctgctataacgcattgtgtatctttaagattcctttcaactttgagattctgtaatcacatctatttgcaaaagttaaagctaaaatggagaaaggggagtaaaaagaaaatactcttattgttttattccctggagatgtatttttctgaacaaacaaagatgagcaagagaaatcagcatttcatcggcacatgtacttttgtcatttcatttaaacataaaaataactctcagatatatattattatttgccttttacaaatgaaagaactgaggctcagagagacttatagacttgcccaaggtttcctaattagtaaagattggaacctgcgtgtgcctgagtgcaaagccttttggtccactacagcatatttactagataccacaccatgaaatttggaaactcatataaccagattcgtaaatgccccatctctgtatcctcacatcacactacctcagcttctgtcttctcctcttcttctactctttcctttccaaacatactgctccaatcctttcttgattctctccagctcacaaaaccccttttaaatgcatataacatcttctatctctattgttattattattattttttttactgtggtcctggaatttgtaatttgtgcttttgtttttgttcatccccattgggcacaggacagaataagctatgccatcagctgagagacttacaaatgtctctatctaatctgtgtgtcaatcatctttctatctagctctatttattagtgaaattaaagaaagatagagcatattaagcccctggctcttaatagttggcacctagaagggacttggtaaatattcattccttcctcatcattcagcactgctgtttacccaaatcattactcatttaatgaatctcagatggagagggggagtatattgagtagatgccccagctggtctaagagaatgtgccacagtttggcaagcaattgggatggtaaaggataggaaatgaatgtgatatttaccttaaaatatctgctgaggatatggtttattctgccctgtgcctagcacagtgactcatacataagaagggcaaaattgaacggatgatgggttcatattatgtcagtgggcccaaaattgactttctggatttctcgtgctttatcaatagtattagttgtgtcaaagtttgcctctacagactaataaagtagttttaatttcctttaattttgtggtcacaaaatcagacaatgataaggagtcataggctccaagaaagttagacattactagctcaatgatgggaaaacccatttctgtcctaataataaagggcattttgcagaaaacacggtgaaggatgatgctgaagtgcccgtttgcatatattgacagcaagaccagtgtcaagtatcataaataaattgccagagagaaagtaggaagtttccattgaagtgggcagctgcaatgagcttcgatctcaagatttctaaaagcattgaagaatttacatcacttcaactattattttctgttgaacatgagaacaggtaaccttttatgtctagtttatatccagcagatgcttgtgatttctacctttctggcacaaaagtcctcatgattacacggcttcctcctctgccaatcaatgctaatggcaagagaaatgagaagcagtcattttataagcattatgtctggaaatgttcctttcgttgatagcagtttcttaacgccagtatggttagatgctatggcaacttaaaattgtgtttccataatatagtggacattgatgtcaaactgatctgcctgggtttgactttggccgaattatttggtctatctttgccttatttttatgatctgtaaaatggggataataaaacccatcttgtcaggcctttggtaagtgtcaatcatatgccatgacatttgtcaagaggcttatgcatagggattttaacctctattacaattaacaacagcaatgagaattgttccattgcatgcccagatggatactaaattagaaaaagaaagatccaggttgaaataataacagcttttttttaatatagaactttaagtcgtcaaaatgcttgttattgtatatgcaaatgtatacacatgtaacattttttttttgcaataattctgaggtaatcagggcaggtgttgctaatgttttacatcatgagtctcaaaggggctacatatttactacagccaagcagctaataaatagtagaactgggacttggaccctagttttctaactccaagattatgtcattttttttttttttcctcagtcaatcagccctggtcctggttagttgcgtttccttctccagactccttgctttcaccccgaaaatgagcaatttggaaaatattatgtctaaggtagagtgttttataaatctgtgactgtagaacaatgtcttaggaggtatctcattggcctcggtgagaattacaaccgggtactgcacggagagtcagatccataaagaaccctttatgtccttaaggatgtgattctgccacattactctgacctacagatcattccccatctgccccatccccttcaggacccaggtttggggatgggaagaaaaagtagatgactcggttaggcacatggacatttaatatttgggaaatgataatagagcctttcttaaaaaaaaagcaagttctgtatcaccgttaatctccatagttttctacaacaaaataaaggagaaaatattttgctttagtttggattctagcgttgagtacacattttctgctttcttcttttgagctcttagtgcccacagaagaggcttgactctcattaaaatgtgagttctttctgtttatagaaatgatggagacttgagaatggtaatacacactaagtagcacttttctggaagattatacttcagtttcccaattacagagtgagacagtggtgggggcagcagattgaatgaatagagtagatcgtaagaagtaggctgagcttcggaatcaggctgggtttgaattctagatactgcatgcctagcctgtccagacttagttttctcacctgtaaaatggtaataaacatgcctgccttcctttgcttccttccttccttccttccttccttccttccttccttccttccttccttcctccctccctcccttcgttcctcttccttccttcctattatctatgtatctttctatgtatctatctatgtatctatgtatctatctatctatctatctatctatctatctatctatctatctctatttattaataaggttcaagtaagaaaaaatatattaagcctctagcttttaatagctggcacctagaaggcactcagtaaatattcattccttcctcttcattcagtgctgctgtttacccaaagcctctctcatttgatgaatctcagatggagagggggagtatatcaagtagatgccccagctggtctaagaatgtgccacaatttggcaaacaattgggatggcaaaggataggaaatgaatgtaatatttaccttaaaatatctcagaatctttcatgtgtaggaggaattagaccagtgataaattgcagtgcatggatctttcacaacagaatcatgtggataccttctgaaatgagcagatatctaggatatctgcactgaaatctaagaatcactggattagaattttcagtactcagaggcaggatattgtaggggtttgaatttggattcaaattctgctccctcagtgtaaacctaaggaagttatttaacttttctatgttactcattgggttgtggggagaagtaagtaatttgatacatatgaagtgcctaaaacacagttttacttactgtataagccagtctttgaaataccttgcatgactttgtttaacttacattttatttcctctctaactaaatgtcctagataactacttggctaactctttcatttgcttaaagtctttttcaatatctcctcagggaagcctacttggattgcttgaatttgcatgggttggggtaggggaagcaggaatagggctgcttgctctctgaaatcctgatctcccttaccctactcttatttttcctttattctgtggcatttggtaccttataagcttacacatactattttattattttatttagtctatttttaaaatttaacttttattttaaattcaggggtacatgtgcaggtttgttacataggtaaccttgtgtcgtggggatttgttatacagattatttcattgcccaggtattaagcctagcacccattagtaatttttcctgattctctccctcctcccacctatcaccctccaatgggccccagtgtgtgttgttttcctttatgtgttcatgtgttctcatttagctcccaattctaagtgagaacatgcaggattaggttttctgttcctctcttagtttgctaaggataatggtccccagctctatccatgtttcggtaaaggacataatctcattcctttttatggctgcatagtattccacggtgtatatgtaccatattttctttatccagtgtaccaatgacgggcatttaggttgatttcatgtctttgctattgtgaatagtgctcagtgaacatacacatgcatatgtctttataatagaataatttatattcctttgggtgtatacccagtaatgagattgctgggttgagtggtatttctttttgtaggtctttgaggaattgccacactgtcttccacaatggttgaactgatttgtactcccagcaacagtgtatagtgttcctttttctctgcaaccttgccagcatctgttattttctgactttttaatagtagccattctgactggtgtgagatggtatctcgttgtagttttgatttgaatttctctaatgattagtgatgttttattcatatgcttgctggtttcatgtatgtctttggaaagggtctgttcatgtcctttgctcattttttctaaataggttgttttttcttgtaaatttgtttaggttccttctagatgctggatattagacctttgtcagaagcatagtttgcaaaatttttctcccattctgtaggttttctctttgctctgttgatcatttcttttgttgtgcacaagctctttaattagatcctatttgtcaatatttgcttttgttgcaactgcttttcgtgtcttcattatgaaaaatctttgcccattcctatgtccagaatggcactgcctaggttgtcttccagggttttaagtctttaatccatcctgagttaatttttacgtatgatgtaaggaaggggttcaatttcaatcttcttcatatggctagccagttaccccagcattatttattgaataggaaatcctttcctcatttcttattttttatttcacctccagtagattataaagtccacaaggacagggacacttgatttgcttattgctgtatcccaagtgcctagaatagtttctagcaaatagcaaatggccaataaggaggcaatgatacataaataagtatatggatagatgttagtgtgattatttgtccccaagaagtagaaagagatagaaccggataagacagtaaattatacatgtaatattcaaataaaatttgacatacatatatgcgcatatacacacatatatatacacatttacacacatacatatacatatgtatatataagtgtatgtgtgtatttttggagtgttgagtatatatttaaatattgaagtaataatttatgtctatgtacatatatatatgtgtgtacatgtatatatgtgtatgtaaaaataagtgtctatttatctatatatttaggagtttttcaaagctacctgaggaaacagaggtgttgaagtgtttacttgttaggttgctatagtgataggaagaaagatgaaaatatgtacatatgagtcaagagacaacagacaaacagaagaaatagaagtgatttcaggacaagaaatgaaaggctaagattaaaacagcaaccaacattggagggacatagaagagggacagtttttaagtagactagtcagagaagtgatctccgagaaactgacatttgaactaagacaaaagcctgagaaggacccacgataggcctgaggtcgtcactgaggtggtgggccaagtaagagacagtgaagagctggaaataaggttctaagataggcaaggcctaggtcagactggtcttgcaggctatggtgaggagtttggattttacgcaaagtgtagcaggaagtcactgaacagacagaagcaggatgatgagcaggtcaaaggtgtttagagccttgaacagagagtgaaggaaaatggaagaacttatttataagatgagaagaccaactgctctgatttcatcatgtaggctgttatgaacagatgagaaagacaatttggtttcattgatgtttcattcataggctctcgttcccattagaacatttcaaaagggaaaacaaaaacccagctaaaatagggaaaacctatatattctagatgtggctttgctttttctcaaatgataccattcttatttccaaatgcattaagtaatggatggaaatgtatgcactattgctcaattcaattcagctggaaattttacagttcttgtgtaggtgttttatgtaatcaattccccaaaacactgaacctagagctatttccttaggaaactttagctaccagtttctgaaatctgtcgtagtgaagagtaagcatgtgaaaggcaaattaaattccatacaagatcaatttcttctttctgactctacaaatttaaatggtacctaactcttgaagaagtagcttacaggtcatctcttccgtgatgtgtttactgggcccgtgcacatataatctcatacatgcctcttcataatatgagtttaaaatagcttgataacatatgccagactccatttcaaattttctataaataatttctttttgaagtctcggaataaccgtatgtggcaggtgaagttataatcaccattttacacaagacaaaactgagacccggaatcacagagttgatcagtggtagtgtcaatattggaaattgagcaagcttaatcattatactattctgctctttgattgtaaaaagtaaacctgcacatttattcacctctatttgtcccacttactttgtggtgccttatatgaaggaatagttcaataagcgtattgaatcagtgaattaatctgtgacctattctttcaagttgtatcatttcattagcaaatagtgataaaaacgtgggttttagactgaggcaacctaggtagcagaaggtactcactacctctgtgatatggtaaaattactaacatctctaaacctctttcttcatctatgttgttggcacaaatgtagggccattgtgaggattacatgaagtgtgcatgtaaagcacttagcacagttcctggaacataattagagctgagtctatctgaactgtttttattattttttgaactaaaataacctcctcaaacatgattacaattatgtaccaggcagttttttagttgtgcttgttttattaactttcttttaaaaatcaaagccaaagattcaatcatataatcagtgatgttaattttgttccagggctcatcctggcatcctgccctcagcagggcatgcagtgtggattctgaaaggccctcttataggaaggaaggccagttctggagaacagcatgagagcaaaaggtgctgtgtgaccacgcttttttcctccatacatctgacatagctaaaggcagcacttccaaccttgcctgtctatctccctagcctggatctaccttgctggaaagttactttgtattccagcgatgatcccagagcattttgggtgacaaggaaaaaacagcagaagactaaagttttgccccagataacacttaatgaggttaatttacagaacttgctggaggtttaggacctaatattgatcctgtgcctcttgtgtaccaggagctgtgctgaatgtcttagtttcattatctcattcaatccttactgcagccatgtacaaattttagtcgtaaaccaaatttacaactaaaaaataaaaataaaaagtgacatgcttgacatgcttgcctctacgtgtgttttgcagggctgtggtgataaaatcaaatatttcttgtgttttgccacatttttctttgaaagcaaattttgcagcgttgcaacacctctggagtctccagggacctcccctgcagtgaagacacatttggcagagaaatgaggcaaaggttgcatgtggaaggcaggaagtttcattccagttgacagtttactttgacctggaagaagctggtaccaatgagctgagttctattttgtggattacatttgtttgcttctttgtagggaaccaatatggtgcttgtttacatttttttttttttttttttgcttttggtcttgttatgggatgtttaaaaggtgtaacttttatccttctacattttccaagtaaagttcagatgtttcgatattcctgacactatttgataaattattttaaggaaaggtctacacacacacacacacacacacacacacacacacacacacacacgagaatggtgcctgattcataattggcactcactatatatttgctgaatgaatacataagaaaataaatgcatttcctttttcatctttctctctctgagaatgggaactgctgcaggatttttttaaatggcaagtttcaatatatacctttcttcttaaatgtttgctttaagaataatttcagaaggagattattctaaaatatggagcattacttaatcttagttatgcagcacagctaattggagtggactgtaattcctttggaatttattgaggtgagatcatttacttgtatactaaatggtcccagactgatatactgttaaatttgtgtagtctgattttcataaatttgctggcctttctctctcttattgtctgctaattctcattgcttttggcatgtctggctctccattccccatacaattaacagtttctactttactgcagactaggaagctgggtaatgaatttgttggaccgggcatataataagaatacatagctttgaatgtggactagagagactcttttccaaggtaaggaagttaaaagttatggctgctatagaaacagtcttcatataaggtgataccacacatagtaacactgggtttcagttgcctgcgttaataaaaagggaggcttggtagggataattcatttactcttttggacaataagcattttctgagaaacttctgtaggcaagacactggtgagatatagagaattaaaaaagcaaatacacaaacacaactgaaagataaaacatacacaggggtttataatacaatttatacagtatttcaaatagcatgagaatacataatgtactttgaaaagatatataaggtaataaaacatttttgtatttcagaggaaagacaattgtgtaactcaggaagggctttataaggaagttgtatttaaagtgagtcttgaagtgatggacaggttggacagagagagattggtaaggagaagtggtaaatgaattatggtctgaccggggtgagtgaatgatatggattgtgcgatttatcagagagagctacaattgtgggagagactgggcaactgaaggcctagggcaggatatttgggagatgagagaacagttaagaaatcctgagaaggcactggttaggaagtctgttgagggctgttgcctctgcctgtggcaggcagacagtcagaaatgaaatctggatgtgacgtggaaaaggacagattggagcccctgagtctctagtttgatgatataggtgttctgcagaagagattggtgctcttagccacggaatttcacatctgcctggcttcagacggaggagtttaaagggaagatctggcaggaattgaaagagcagtgggcagccaggcgcagtggctcagcctgtaatccccgcactttgggagggccgaggcaggtggatcatgaagtcaggagttcgagaccagcctggtcaagagaccagcctggccaacgtggtgaaaccccttctctactaaaaatacaaaaatggccgggcgtggtggctcatgcctgtaatcccagcactttgggaggccgaggcgggcagatcacgaggtcaagagatcaagaccatctggccaacatggtgaaaccccatctctactaaaaatacaaaaattagctgggtgtggtgacgcacgcctgtactcccagctccttgggaggctgaggcaggagaatcacttgaacccgggaggcggaggttgcagtgagccgagatcgcgccactgcactccagcctggcgacagagctagactgtctcaaaagaaaaaaaaaaaaaaaaatttagccgggcgtggtggcagtcacctgtaatcccagctactcgggaggctgaggcaggagaattgcttgaatccgggaggcggaggttgcagtgagccgaagatcacagcgccactgcactccagagtgggcaacagagcgagactctgactcaaaaaaaaaaaaaaaaagaaaagaaaaagaaagagcagtgggcctggctgctgccccatctaggaggtgagccagtgatcagcaacaacgtatgtgagttgcagtactacctagaggcctagacagaccctctgaataaagttctctatgggcagccctaacttggaaccataaagagtaaggaattctaggaaacatcattccagtttaactatttttgcacagttaggaaacagaagtgacttttatcttagagaaagggaagataatgaaaacataaagtgaaggagggaaacaggaacctgccctggagagagcccagtctgaccgggagataatatgtgaatacatcatcattgaatgcaaggaggcactattttttggggaccttaaatgctctgttaagaaattcatacttaatcctataagacatggagacacaatgaatattctcgagtaagggaggggcattatcagatctgtattttagatctggcttagagagggaataagtggggcaattaatgaggattctattataataatcaaggtggaaaatttgcattcccagaactttcttctgttctcactaaaggaggtgacccagagtcatcataagatgttctggaccattctgggaattaaaaatgctagtgtacattacaagccaaagtgatttcacctatggctgctattgtcaactccgatgcccttatggtatgcctagataactcttcttaaaaactccctgataagtttgcttctagtaggtgaagaacaaggagaagtgtatacacaattagaacatcggcttaaatgaaattggcttatgcaatcatgtcagtatcattttgagaggagagatcctataaaaacaaatacttattacgtagtaaattaagactttggggctttactgagtggtaacaacagtattctcttatgtgtatccaagtgcccaacaagttacagaccacttacatgttcattatctcatttgatttgataacagctctgcaaggtcagttttatctgaattattacaagtgaaaaaactgaagctcagaggttgtgatgaccatcaagtggccacttagccccgatgattcaagagctcattggtgttctatatattcaaagggcaccattctattgctcaactttccatttcgctctatgcaccactgcctgataatcttgggacatatctttgttcatgctgtgtccttgttctaaatccattcatcgctgggccctgttgctcacacctgcgatcttagcactttggggaactgaggtgggagggtcccttgagcctggaagtttgaggttacagtgagtctggactgtgccaccgtactctagcctgagcaacagagcaagaacctgtctgtaacaataataataataattaaaaaaaatccacccatagttcttggacattctcactttaaagatctctttccacccaaagaacaggctttttgtaacccaggtgttacaatttcagctgttctgtttcctcactttcctgaagtatttttactgcctttcctcaaagcacaggacaccaaacacagggtaaagaggaaagggttctttacaaaagcatacctgagtggataccttaacaccctcaggaaatctacacatctttgaattagggcattccataagtcttccctgtcagcacttcccggcacatactcctgaatgtttaaaaaccaaccatatctcttggcttcctacttgtcaagacacagctgaacttactcacttgtcttgacttatgtaaaacacacacttacagtcagtgctgtatcacctaagacttcaacagccagcagcaagtgaattaagaaaccgtaatatatcctccattcaatgcacccttgcagggttttgcacccctaaagagatccctagggcacatgaaatcgggtgactaccccagcttcttgctgtggggaatctagggtttttgtagttaatgatattgagacatggacttaggggaacaggaggaggcatatagaaatcaagctttcgcagcagccattaaatggaatacgtgtaatcgttctcaaagaatactagattgctggggccaaagaggctaaacctctggctttgcagaaaggcctcagaggaatatgttgtgtttataaagtcagccaaacctacctgtaactggctttctagttctggcatagtgcactttctggtatcatgctgcttctcttgtcttggttctcacacatgagttttggcctaattgctctagtttgagagagtcaaaggcaagtcttctagtaatgaggggaaaaaaggataatagctaacaagttgaagtgcttactgtgtgccaggtgctttacaaaattacctcatataatcatctttctttttttttttttttttttgagatggagccttgctctgtcgcccaggctggagtgcagtggcaccatctcggctcactgcaagcttcgcctcctgggttcacgccattctcctgcctcagcctcccgagtagctgggactacaggtgcccgccaccacgccctgctaattttttgtatttttagtagagacggggtttcaccgtgttagccaggatgttctcgatctcctgacctcgtgatctgcccgcctcggcctcccaaagtgctgggataatcatcttgtctaattccatgtgaggtgctttactgaccctgtccaccaataaggaaattgagagtcaatgtggttaagtagcttgtacagctgtggagaaggacctgaacccaggtctatatggctgtaaagctcatgatgaaaccccgtgctttgcctccctgtgctgaggcgtgccgtgcatcccatggcccctatccagtttgcttgcacgtacagctgaacatcttataacaggcgtttagttagtactctgatgtgtctgacagttccctagaagctcagcttggactgagccagcccatttgcgtttctggcctcttcttgcttccttttctcctttttcaatttcctttttcggctcaggcagcatgggagatgccttaatcaattgatgatagttccttctgttttaatgacattctcatttcctcagtatgtttttctcactttgagggttggagaggggagtaagggaacaaatactttcaaaaacccctagtctcctagttttgaaagtaagttccatgacgttatggaaatgctgctttgaaatactggaactgctgtattgaatgcccataggtgtctgtgaaagagggaaccgtaggcccaacatggctcgaaagacttcatccaggataagtaggttgacatgacaagggatttgggtccagctcaacataaagagacatttattacaattagggccatatgaaaactacattagtaatgagttcaccatcactagagatattaaaagagggcctagacatctagttggcaaggatgtcacagggagatttgaatattggaaaaaggagtttgaatcaaaatgacatttaaaggcctttccggccttgagattctgtcttgaattcacttagaaactttatattgggaataaaggtttccccttgttataattaacaccaactagtgatgtctcctcctccctcccccctgtgcttcccctgtctgaacaactactcgatttaagaaggggacttaggatgaggaaggatgtggttccttcccacttggcagcactccgtgtcagaatggaagacttgtgtctgggcctggcacggttccgtcaggccctcttaccagcccagtcgtgtctgtgaccagagcacgtgggaggtgcacatccgtgtagaaaaacctcccactggctgccagctctggatttttgaaataattcctaatgaatgcagtcttgcccaggccaaacctcttacaggaatgatgacacaccctgaaacaagtccgagtcaggccagacaagcatcccctgaaaaatactccctttgcggttggcagcatatgagaaagtatctttgagagccgtttcttcttgccgtttcaaaggaaagctgcttgcaggccaggaggtcaggagtgaaaaactcctttttttttttcttctattttttcttttcttttaattggcttactactcatctgaaagctctgctagtcaaatatgataatcctttgatttaatgtcaggattgagacagttctctggttcttgaaggaaagagtgttgcaatgctaggaagtctccagcagctgattaacagctttgatttgaaagaataaaaagaaagatacaaaaactggcagtgggtcctaccgatcggtgctgcaactaagaatggacagtatttaaataagatgatctttcccctcaggatttacagagacttccataatctccagcccacttcattttttttttttaatgtaatgttacagctcggtatgctttgctcaaatctatcatgtttggatatttcaaactaggaagtttcattccttgtagaaaagcttcagaaactcaccagatattttaagtcaggtcagtccagctcttcccaggaaataaagatgttaagaacttcatagctgtagggactccttagagatccgatccagtgctgcctataggaccttgggccgagatttcccatgtacaccataaatcttcacaaagtcgtgggaaaagaacagcaacttcagctccttttgcagcctgatcattgcttctgggcccgagtagctgtcttcttttgatataggaccattgcctgttcagacatgactctttttcctggatacaaatggtatgttatttttagggggcagttatatttcttaatagttttcagagttggtagacaggcctgaactgggaatcaaaagccatcttctcacatttccactagtgagttattgacctcatgaaagtcacctctcctccctgggcctttacttcccaaatagtgttccaaataacattagtgacttctgaggtcctgtctaattttctagatgtcatccggataagaagataaagtgtaagagaattaaaaaaaaaaaaaaaaaaaaagaaaaccagcaaagtgaagtgtggggcttaggaaaatgagagtcctctgtttaaaatatgtctcagagagccttggtagcaacaaaggtcccaaatataggaatcttagtctgtactgtgtattgcagggtatatggatttcctgtatttgcctaagttctatttgctaagagctgactagaaacatgaatagtagtcctgaggaagcttaaagatgctatcacattcagtttactcatttgacatatcaaccctgcggcctttgttctggaggtacactgaaacttgaactcaagtctcctgcctgcttgtgcaatgtgctttcaagtacactgcctattcagtttatttagcagtgatgaacgcttacagaaaccatcaagctatgttttgaaagttagttgattcaaaacaatagagtttagtggtcagccaaacagaagcaaggagatttgctagttttgcatatgtgtgtgacttagtttccctattatccacgtgttaaacataagttctttgtacagctctattcctggccaacaattagtgctattttttttctctcgggttttagaagatctacctcctccaaacaacagcaattaactacgacttataactcactctcagctccccaccagggccacttacattcacatttctgatcacaatatttcttaaggtaaatcttcagttctctgagaatgctgaacaatgagtgtcttctagctcaagttacagtttgtaatgaccaattttgtaattgtggaacagccacaaacacggtggcataagattcatgtatcctggcttaatagctcagattatttccaaaaacccactgacgttggatcaatcatgctacctttgtccttttgtttttctgtctattaagtgctgtgtttggcccagtcttcctcaggtctcctatggtcaaggatcgtgttttaactgttttgataggttgtctttctcaggtgtattccatgctacactgctatcatatagcaaagatcctgagaaattatactttcatgaacaattcagggctgtgattttgaacatgaattatttttcactgtgcataatgatgttcccagaacctattgaaatacgtaagactctaacgtgaaatggccccagacccccatattaccagtttttgcttgttgggtttcttttcttgttgggtgttagtagctcaactttcacacctgccatcaacatgcctccttataaaagccatttgtccttcatgcaagtttgtgacttcttctctgcctaggcataaggactcagataaccaagttgttatctgaagatctgtactataaataaagttgattctttttttaatttttttttaagttgatgcatcttagttaccgtttgcagctctggtttgtctagctgttggctactggtatttacttgataattgacactgtctagtaattgagttaccagctgttgaggtatgactgcatgcctctgattctgtgggtctcacttttctcttctttggatgttttcactggccaatagattcgttttgtatttttactgtgatcttctgggtagatgctagggaccctaatgatttttaagtaatcctgaagaaaattaccgtaagcctaaaggtggttgaaaatgacagttttttgcaaataatcaaaatgccatccatagggacatggttaaatacactatcataagctagacaatgtaatcatatttagccattaaaaatgatgtataatagatcataatgctacataagtgtgaattagggtgacaaccatggtctatgctttgcctaataaagtataatttaaaaaacaaacagacaaaaagaaatgtaattacataagctaatctggaaaaaatgtgaaagacacattactaaataaaataagcatcttttatatacacatatgattcaatttttgtaaaaagaaaaacagttatatgtgaaaaaatgaaagagtctgagtctagtagttatatatggttatattaagagagagactggatgaatgccaaagggagaggagaaggggccacagtgtttacacttcctacctaatatagatattttttttaacttttagacatttacttatttaaaaaattaacttggaacctcttactaagtgagactcgtagcctatctcaaagagcgataatgtgatatttaaagattttgctgatttggacagaaacagaaacaagaagtgatagagaatttattagatgctttactttagatacattttctcttctttttttttattattaataatgttggcagggaggcagtgaacttgcccattagagtttggcaacctgcttgagtttcctaggcatcccatgagtcctctctgtttcttgccacacagcattgactcagatctattcctttacatgcaggcagctgtacgaaaacctatgcactcttatagcctcatctggtttcctttgtcaagatattacattatgaaacattttgggaaattagcagcttttgacagtaaatacgaatgatttgtgattccactaagccactgcttaattttaggctgctgaatggtgaacactttaaggagcgtgggaacaggccatattttgttttgatcttacacagtctcatttgaaggaaggttatccatttgaagatgggctataatttacagaaaggcaattatattgaagactaataatgagcatttagtaatacatatcaaaatgtagaatatgaataacttcagaatttcaagatcttttattctacataattaatttttacagctgaaatgtgcctatctttttggcgatcagataccccctgccctccaaaatacagggttaaatctacataagacgtatacgatttctccatggcatatcattctaggcctgttttctgtaattccttgcctactcacctgcaggttatattctagtcttactagatttcttgttttcctctaaatatctcatgtacttttctgttttgagaactttactcagattatttttgctttttggaataccttctcttttcttcccttcttttctctttgctctccactgtctctgtgattctttctggtccctaagtacccacacagaagcacacacctctgttcctcttcctgtttagatgcaagatcttccccatgaaccctccctaccactattagctagcaagaatcactgctcacttggcatccacagccctttatttacactttatgccttacactgttgcttctcaatgtatggtctaaggagcagcagcaatagcagcctctgggggttgactagaaatgcagaatcttgagtcttgtcctagacttatggaatgtgtgaatctccattttacccagttttccagattctccttatgcatgctaccatttgagaagcactgtcttagagcagatatccaactttgccttcacttggttgcttttgtgtgagtgggttctgatagaatctggcttgtgatcacagactgtatcttcagcattcatctgcaaggcaggatggagtgctttgcacacagcaggagctcttaactgtgtgttgttgaataaaagcttgcattttcaatgaagaggggtgtttgagggaaaaaacaaatacagggtatttccatgattcttgtcggcacgatgtctttcagattgtctggtttccatcattgctgtggttgggttttatagaccctagtacaaagggactgatatggtttggctgtatcccacctaaatttcatcttgtagttcccataatccctatgtgtcatgggagggacccagtggcaggtaattgaatcatggggacggttacccccatgatgcctttcttgtgatagcaagtgagttctcacgagatctgatggctttataaggggctctcccctgttttgctcagtacttattcctaccaccatgtgaagaaggacgtgtttgctttcccttcctccatgattgtaagtttcctgaagcctccccagccatgctgatttgtgagtcaattaaacatctttcctttaaaaattacccagttttggatatgtctttgttagcagtgtaagaatagactaatacagagacttaccaccttatcaaatctctttcctcctctcacctctttgagaaagagttacagtggtgtggaggattacagctttcagaaagaagctcaggtgagttcattgtccaggggattgtatttaaagcatagggaaatactttgtattaatattttatgaataggactatatctgtgtatctgtgatgattgtatatttgtccaagaattggaagcctgatcacaaggtcagagtaagatccagaatcagaatttggtgcctctgaacttaggaaaataacattgttttagtttattatatttccttttgcaaaatttgacaaggaaaagcttcataatttcaaaaatgcttttctatcttgtgatacagattgtaacagacttatattcagatttgttctccaagtatctccatcttccccacttcccctggtattgctgtttttcttagtgtcacttttgccttctcctctcatctgtacatatttcttttgcggttttcttagttattctactcgtattccaatacttaaaacatctgtatcatataactctggtgatattcctgatccttcacaaaatgttgtgtataattaataaaattacagtgtgtataaatatgtaaaaataaataaggataaattaaaaataaaaataaaatgaaatatataattataaataaaataaaatgaagataaaatgtaaaaaataacctaacaggtgatttttttgacatagataagaacaaccctagtagggacttgccatttttatttctgtttttaaagcagatcttgaatatgtaatgcccgttacatccatttcttttagattattaagattaagacattgtttaaatacttctttctacttttattggctattttttttaaaaaatatattttatggttccgtgctctccctctggcatttgaatgatacaaaaatgaattataggaaccaaaacataatgctacttgtttcatcttaaaaccttaagttgcttacaatgaaatgaaggaggtaagatgttaccacataaagagaaaacactgtcatagagtttttgtttagagagatctaggacatcttggatatgcaaaaatgacaaggttggtagaacattgagggacagattagatgaattctcgttacttgtttttcccattcacatatccctctctctcttctctcttccgtcctctctgccttcctccctccttcccaaggtgtcttattacctttccctccctttgtccttctgtttttttctttggtggatgaatgtttgtaagatgtccattttgaagctgaaagcctcaaaggctcaaaggcagataattctctttttggaagtcattttacaaaatcctttttatgaacctgtctatagggaaatttcttcctgtcctggctgtgcaatgaaccatttatttgttctcatggataccaatacttattcattattttaaactttgtattttcttttttttttcctcctaagaagttcattttgctctttcttctgattttcctacctgtttgtaataacaggaattagtctttccatgtgtctgtgttgatttttttaatattactttagtgaaaattatagaggttacaggtttaggagctgttggggaaataaaatttaaaaccaaagtctcccaactgagaaattctctctataaaagtaagagagaaagaaaacaaatctattttttattcttaaacaagcattaaatcagaatgtgatgtacatcacaggtaatccactaagagatggcaaagacagaaagaactctcactcttttatgaagccaaacagcccattacatacgtgttttcaagataaacaataacttgtcctcaagtaagcttgacagcaccatttgtcacacatagctcatcctaactttacctggtaattgaggtgaccatccatgttagctgattggttttggccagaggaaaaacaaacttcacatatctttatgacaggaggtagttttttaacttggtgcaagttgcctaccaaagttagggtccaactctcccatagaaactgggagataggggtgctatctaccaaagttagggcccaactctcccatagaaactgggagataggggtgctatctcctgtgatgttcacttttcaaagagatggcctccaggtcttcctagtaaaaggcatttctaggtcacaaagctgacaaaaggccttgcttagccttcaaaaggatttatatacatttcaaagagtacaaaaagtactcagtaattgcaagttggccaaagtaaatgctctgagaaaaagaaagaaggtgaagaatcttttcccttattttcaacaagaattatgcttcttagttttaatttgtacttaatctgacagaagataggtcctatttcattatgtttaactaagcagttcagaattaaagttttactttttctgagtttgacattcagctgacttttgtctttggccttgtggtaacaaattatacgcctccaagttggaatctgatttgacaattcattagcatttctttaatttgtatttttattgtaataaaattgaccattttaaccatttttaagtctactgttttgtggagttaagtacattttcattgtgcaactattgccaccattcatccccagaatttttcacattttgtactcaaactgtagcctttaaacattaacttctgagtctgtcctcccctcagcccctggcaacaaccatcattatcactttaaccaacctattcgaaatgcccatgaaatttcaatatcctgtctctggatgagaagtggagaattgtgtttgcccaggattttaaagataaagatgttttcttgggaaactgactgagaaaaacaactttaaaaccttgaatgtggtgcacccatttatacaagtgatgccacactaattataaataacttaagtctgtgcagttccccagaaatgtctcattcgtgccacttcattactttcaaactgataataaaataccctcctagtgaaatatttttttgcatgtaactcagggattttactattgtagatttggcatttttcacaacccttgctccagtgaatttttatctttcttaattgatcttttggacacagcaaacgaaatattgaacacttcatatattttgttttataaactgtcgtggatatgaaggagaatgatgtgaaagaatcagggcagacaatctgttgcagtcagagaaccttaattaaaatgaagctttgctatttgattgtcgtgatagcttgagttagacacttcacctttctgcacctaatttcatcatctgtaagacaggaaaattatattcctttttgagtaagttgtgtgaatatgaagtaaaataagacatgaaaagaagcactgtgtatagtgtcaaagcatgaattatttcaactgagtaatgtacttaacatatggcagaaatttggaaaatacttgttgagtgaatgaacagatgttattctcaaggttaatttttctagggttctctcttctacacacatactcctgtctttgcttaaaacctaccctctcttggctttcctctgattcctgattgtatcttcttctccttacccaaattatgcttccagtttaaaaactccagatctcagagtttgggtagtgatttgaaagggctcaaggaatttctgttatattatttcatagaaaactcttcctttctaaatggaactgcttcctgaaagcttttgggggttagaaatggccattcgagttatccactgtaacatacacaaagattaagggaattttttttttttttttttttggctagcatcaacaggctcaggggagttcaccctagccaaaaaaaaatgatgagctgcaataatgttaaatcagacatgtgaatccaaattaaacagaattcttggtgtaattccaggctgttccctcgatggtcattgggtgggggctcactaagcaactctgttgttcagtgtcaccatacacatgataaatgcaaatgtatgtattataaagcagcataaccaaggcttacactgacaaaggcagatgacaatccaaaggtattctgttgaacatgccttgcctgacatgttttagtggaaaaatcacccccacccatgatgatctgagaaagaaatgagtgttgagagactgaaggagcagaaaacacataaaggaattatagtattttcctggattgagaaacagcctgtagaatcactctgtttagaagaatgtaatcattcactcaataatccagagcgttttctatatgccaggcttcaatgctagaccctgggagtcaaaaatgaatcagaagtggaccctgtctgcaaacgtcttaagagagaagacatacacacttatttaatagtacaagataaaaaagcacattactgagactatatgggaagcatagctaacgttttaggaagaaggtagaaattacatctggcagagggaagcagggaggtttcatgaaagaagtggtttcggaaatatgtcctgaaggacaggtggtatgtgtacacttggagagggtaatgaagggcatcccaggcagaagagatgagtaaaggggaaggaaggcacggggtgatctgtagcaatatctctatttgtacctgtggtgggagtgcttgatatgtgagaagtagtggtacagcaaagggttggaaagagagcttgctgccagatcgtgggaggattcagaatgtcagtgacggacatcagggaagtagcactaggatatgatgtgtgagcaaattgctttgggctttgtcatcagtcggcctttacaggtgttcccatggcacccaacccttacctgaggcttttacagccttcttgtttgcagtgtggtaaatatctcttcctttggatttagagaaggagatttcaggctgttttttatatattagagaatggaaagaacatttgcatgcaaaaactctcagtttttaggtcaccctaatacatacatgcattttcttccctttttcagaaagagcagaacaattgaaaataatagcccttttaatttttctaacattaaggtcacacaggtgaaagggttatttgctgggtctcataggtgcttactccttttatcattggaaaaataaaggctcccctctgttttctgactttttctggatggtgtcttatgttctgatttggcaacagtctttaagaatccagaattctggaagtagtgaaattataatcaactccaattagctacactggtggagcatagcattatcatacttaaatccaccagcatgtcttacatctcattttagctagtcattatgccattgttcctccatcagcttgccacaggagtggtttagcaaattagaaaattgatttgaatttcctacttttttcccaattaaaagttcatgagccttactctaaaactacctccagtaggagtaatacacccagtgagagaattcctaggaattcctcaaagcttggtctactgtttgggggcccttacacagtcaaactccacctccaccgtgtttttctgaaagaacttcattcagcatttccaaactgtggcaaggaacctgatgattgcagatgttactaaacaagaattactaaagtcaattagatttgagaaacactgtatattattactaagtaattgagtttcacaacatgcattagcatcctgaaaggccctgaaagaagtcctgtgggaaaagataacttttgaacctctttcacctaatattaataacctaatgtttctctaaactgagggtgaattactaaagcatagcctttcaaaatcattctgtaaaagcctaagctgaacaatgtggttcaatatgtggccttcagagggtctaagataatttaagaatgaaatttaaaatatcaggagactcgaattaagtaggtacatttattaggactctgcattgtatccatcctctatttacctaccaggatttacgtgaatattttttcatagcctggagatcctttcaaaccctgtctgtgttaacagagctgctacatctgatattattttccggaatctgaagaaacaccaaagaggactgaaataataagacattaatttcagctgtagaatgccgatgttgctgaccctgcagggttattgcagagggagattaattatgcatatctgccaccctaggctttggagttgaagtaccctgctgtaattcactgccggatcattcatgtagccagcatactgatatgattattattccaccaaggtttttatctgcccctagacaattacagaagcacttaccagcatctctcattgacttcttatttaaaattcccagggccacagcaggcattcgcatccttttatcggagacagctacagatcaatgacatgaagcaacatgggattttctgtaggacatgacaaatgctgagattgttgctaagcagaagatagacattcagattccagtagaaaatagtgttgcagtggctctctaacacaaacttttaaggcaatgacaagaacatacaatggaaatattatgagatttggtgtcaaggtatttgagtttgaacactggcttcactatttggtgtccaggaagctatagttcttctgtaaaatgggattgaaattaaatgacaaactcttggcagcttgaggatctggagatctctttaggttgtgagatgaaatgtatatatgtgtgaaatccctgctagggtatgtatatatgtgtgaatccctacgaggttgtgaagttttaatgtatacatgtgtgaaaaaaaactttgtgagtgacagagtgttttaaaaatatttttgtgctaatgggaatggctttcattccccgcgtagtcataatggaacatccttttcgtggccccactgcttgggtgatgacctatcgatgcctgtagtcacctcacacagaatgtagtgactatgcatcggtatgattagcagctgcatgcagtgtacatccttgaaatgatgcacagaataaaattcctatttcctattgctgttctcagcccagggttttaagggacttcgaacctgcaagataacattcatctgatttgcatttttttcagttaagttttcctctctgttctatagatcagtggcaaaaagtatggcttgttttgttttaattttcccctaagaggctttctcccttatgcgtggctgcatcacagaacgctacctgtcttcagagaccagctgtagtgccagctccaaggaatctttccaccctcactcctcagtctaaaccccttttctctccccacaactcctactctctaccacattaaaatgcaagtaattccttccccacagcatgctggcatgttgcttggactgatttgtatacttaataatagcatgagcaaacacagctacatagctttgtagagttaaagaaataataagagcagatacacttttaggtattttatatatgttaactcatataatcccctcagcaatcctaggaagtagaaattattattctccccattttgcagatgggagaagtaagtcaccaagagattaagtaactggcccaatatttcatgggtaccatgggggcagagccaggaattggtaattaaaataataggcttttaaactatgaggttacaatgagccctatgcaaattggagatttctataggttgtgagttcctggatgtctgaggcaatgaaaatctgtgtcatctattcacatttagcgtaagggctccgcatagtaggtatccagttacacgaaatagctttgcattgagaaaatcgccccttgaaagcttaggatgtggccacaaaatgccccccttgtcctctgtcaatatgtttttagtatacgttctgcattcctgctcaatatgcttgtcagagcattttaaaacctcacataagcactgcttgagcacctctctgtgagggaggccagtgttctgtttttttgtaagtagctgtgtggtaaagataaggcatacttgttgaaattagggttacttgagtctttagtggtttatggatcagtagataatagcactataacattccagctcattcgcattctgatgaaaggggaattgcatggtgttactttattttcaataaagtcaccaaatgtcaatgcatatgaaaagaactctggccatagtcctccgccccttccccccatccagtgtgatctggtggactgaggtcacagcccagactatgggactggtgggtgcgcattgccatctgtcaggatgatcctggtgcccaaaaattagtgaaagaagccatagaattttctcaacagggacacagactcacacagacctcctcagtgttagttcataaggggattttctttaacactttagatacagaaacatgatatttctttagggcttacttttttggcttatatgagttcccaggaaaacctggaatattatctttgtgtttcagggacaaaagtggggattggagcagtgaggatgcataataggctgttttctcctataggctgagaatacctgaaggtaaaggctgcactgaagcccctgtgctttctcccaggtggcgaagtgttggcctggtgcactgtaagtctgctgtgaatgttctaatttaactcttgactttaactcttcctaataaaactagttgtggaaactgaggcatagggacaatgaaatatgtggccaatgttatagcacttgttaatgccagagtcagaactaggagagggctcgtcctgcccatctctctgtgtaatggagaatgaggagcccctgggtgttgcagggtctgatggagtaaggggggcctctccgaggcttctgggcacctgaacaggaggggaactgaggccctcttctgctggatgctttctattgagccaatcatttttctgaaagaattgggggaatgatactaggaagtgctctgtgaagggacaactgactgttttgtgaggccaaggatgccttggatccattcaagtctaatttctgaagacaggttcatttcagaggcagtggatcttgatggctgtcacagaacttacggtggcatctgtttgaaccaaccttttgagaatattccattcttaggatgacctgtggcctgactagataatgcagcgtgcctgtgaatccatatgtaaaataaaagtatcaatgtctcatatttgtatcatatttcaccatttattaagctttatcataaacatgatctattgtgatccttatatcatcctatgaggtaatccttattttattgataaggattccagggttcagaggggttaagtacattatccaaggccacacagttaaaaagtaatcaacagcaaactagaacagaggttgactgtgtcctagagaaatgttattcctactacccagaaattgccttgtatttatatgtacttattgcataacaaaattggactatacactgtggacacaaacttagattcccagtcaaaaaaggagagtagtaagaaaaaatctaaacaaaacagatcagggcagaagtttctcaggcctctaagacaggtgtaggtatctacccagaggttttagaaaaggaatagtttatttttagacaaaggcaagatgagagagactctggagaagctgcagaagggacctgagtcttgaattaggctgtgggaaagttaagacttatttcctttcagtgatagacaatttggtctcaagtggagttttaaaaatcatctgtatcttgtggattgaggattgatttgggaattatggcttgggctcccccttctgcaattagagttttcactatggcagtattttccatgagaccttaataggtatattgcataaaaagaggttcatggtcaaattgttgtgagacattctccttagggttcttttcacgtgactaggaaagattaggctcacagacacgtagaagggtgagaaaaatgggatttatttggcaaaaaggaaaaaaagggaaacagggactctcaacaaagcaagagtcctgttaggaggcttcccgcctcacagattgaacccctggttcccacccaggaacaagaggaaccaggctcctccctcttgcaaacggtgtgaacctctgtagctccaccccattctcccagtgcgcaggctggtcagaggttctctagggacccctttacacttgactgtctcattccccctgaaagaagtacatctagctgccattagaataaggataaggataaagatggagaccaatcttaactgcttcctgctgacagggggtgctgttttgggaaaaatgacagtcagagctccctcagaggcctatgtaagggtccccagcagaaggggccatcatccaaagctccggttgcaagaccatttggagtttgatggcctgaatgtgagaagagacagactgggttattagaaaacatgtatttaaatgaaacaagtcgggggtgaggacagctcaaaaatcctgaggccttttaccagtttgcacagagagaggccaaaagcctgattggtaaaacaacttttacccttttaccatcatgtcaggcttctgggttgccttctcccgagcccaatactaagtcaactggtttaaggtttgggaaattaactttcccagtttggagcctgcatccaaggggagtgttctgtagtatagagacaaaattacctatcagtgaagagagggcagaggaggagaaaggaaaaaataagctgcttttttcaaaggagttccaggggttcaggatgcatttaaaggggtacggagtgaagatggatggctactcatctagaaagaggggagcaggcatccctggttcccttctcttcctagcaaatacctggggtgcgtgagggagagaaggaagagtgtcctctttccctcttccatccttgcatctctgagtcctggcagccttggcacgtgccgcccatggttgccaaagcaggcacccatgaaacagggggggcttagagaataggaagtatcttctctcacctatgcctctattccccctactgtcagtagccttggagttccctagacctcatttgtgccagggatactagcatgacctttatccatgaaatgggaggcttggcttaattggcaggaattagccattctcacctcaactgtgccttttaacctctgttatcatggcctctggatcccttagatccaattttctttcctagggctttgacctgaagcttgaaattgagtttgggacaataatgtgtctcatggggaattgcatggactccttatcataagccaaatgctgaggtaaagctgcggaattgagtcgtcctccaagaagggagagaaaatgatgtcttgtgacatttccagataactggtgggtatagttatgcttgctaagatttgggtgcatggcgcttggctttggttagctcccttggtcttactttcccaaaaaggaaacctccagctgatggatatactatttattcccatcacctggcagaatttgcacgataattgctcagaactagaatattgatccagatttctacattacccatcccatttgctctttctgagctgcagccagagattgctggttggttcacaggaacaagcaggattagtctaaaatgtaggcaaaaacttaaaaataactaatgaatttagaatttaatgacaaaggtgtgagaagttttcaagcatagtttctctccagtccttatttttgttaaaaagaaaaatcgtggtaggactgacttgtttgcaaaatagactttagtcttatatttggcctgattatttgcataaagtacagcaagaatatctgtttctacatacaccttttagattggttttggtggaactctattccacaaggaatttcagataagaccttttaaagctgagcctaaccatgggtttgtatcttcaaatacctatgagttgggtgatcctctcctcttaaggtcccaagataaatttggagctcttgggcctgttagaaagtgacattctctactgaccacaggtcaggaaccctgtacaaggactgtgtagacaagagtatgaagccagtttttttccccagagctttcattggctctgcaagttgagcttgactccttaaaggggagcatattcttcagtcaaacccttggtaaaacaaacagtttctgcaattgtgtcctgttgcaaaagaaaaatggatgcttattgtactgatgcaaacgactatattgccgtaagttaaaaatactcacagatagcttccaaattctagaggaaccaggcagagagaaacaaacatgcttcaaattttcttcacaggaggatacttactcaattattaaaggctgtaaatagttcaaaataagtttctttgactctgaaaaacaaaacaaagatcagcaatattccaagtaaaagttggaaagattgtttcagttttctcagttcagtctgtttagttcttgttttgcttgatatttgtgaacactacagctctttgagtcctgtacatttttcttttattccactgttacaatctccaaagttatcaaaaacctgtatttaagagcccctgtcaaagttctatagctcattataaacaatcttttgaaaaggattaaaacaagtcaacaattgtctgtgaataacaaaatgtccagggtagttacagttagaaacacaattgacaaagtttggttatctctgtggtttacaataacttaatataacaagcttgttatgattgatagcatatactcagatattagaattttagaaattccatacaattttggaacatatattagcattattcaccaaaatatttcctaaagaagattgaacatcattttggcaatccaacgtacctaaacatgttaaataatcctgtttacctctcttttctggacactccaggggccctttgaagtatccaaaaagccaggtgtcaggaaagacaattttgtaactaaagtttgattttgggaagcctgataagtatgtaagaagtttaaaacatttgatgttctgaaatagaattccagattatgataaattattttacaaaaatgatgactcaggaacttaacaagcaaaaatccttttatagccctttacaaattttgctaaagaataaattagtgccttaacagtcccttgttgtgctttgatttcaatcctcaatttacagaaaaaccatataatacctttttgaatttagtcaatatgttcacacagggaatttttgcaagattaatttttacactccttctactgcttgtttgaagttttagctttcttatctaatttaaaataattctttaatcctgggcaagaatttacatttttctcaaagattaaagtcacgtgaactgaaaggtaccacagcttttgtcttcccttttaaaaacatttgatccaagtgcttatcttcctttaggacaattaattagagctttttttatagacatcacacacaaaacacatatacaactacacccagtccccacaagatccttcatttggcaatctcatatttggattattagcctctgagtgctttaattttgggggttccatgagaaaaacagaggtctttcccctctcatgcatgcattaaaagtggtgaggcaaaatggagaaaaataatttggttgactgaaaaaaagaaaaaagcactttttccagaaaaacaaggtccaagaaaaggaaaacataaaggccttttaaatataactataacttggatatccacttttaattaagctgagcggtccttaagaaaatccttttaactcccttaatactcgacaagtggccaatatttctggctttcagattttactaaaggctcagagcaaggaaaatccaatgcagtttgtggaggggaagggaatcaacaaatagcaaaagcaaaaaagtcatacagatatcaaaccctgaagaactcatttcctaagccaggattgaatcccggccataggtaagctaaacaaagccttgccatgtggttacatgccacgcccccgaggacgtacaacaagatggaggcccgcaaggaagtattttacagaccatacagaaagactgcaaagcacaccagactggctacaacttaagaccagcctcacaaatcctttttcataattaaaactttacagagaatataaacattgatccttatcattcctagcctagtaaaatgtcttctaaaaggaaaacacaaacaaaaaataaataaacaaccaccacgcttaaaagtcaactcctgacctgatggagaaaaggaaagaaaaaaattttttttaatgcctgggaagaacctcttattcttatgcaaatgcgttcctccaccggggagagaaacttaattgctctccaatggggttgaaccccttggccaagggaggtgaagaggccatggatgcatagcattccccagccccagccgggatgggacggggaacggggagctgccgtttgcccgtccatccggaaaaaagaaggaaaaggccaaggaaaggctgggttggactgaggccgtcttttctgacccctgagcgtgacagtggtgggggcacagtttcctctagcctcagaagtctgaggttgagaaggtttagaaatgagagggaaaggccgggcgcggtggctcacgcctgtaatcccagcactttgggaggccgaggcgggcggatcacgaggtcaggagatcgagaccatcccggctaaaaacggtgaaaccccgcctctactaaaaatacaaaaaattagccgggcgtagtggcgggcgcctgtagtcccagctactcgggaggctgaggcaggagaatggcgtgaacccgggaggcggagcttgcagtgagccgagatcccgccactgcactccagcctgggcgacagagcgagactccgtctcaaaaaaaaaaaaaaaaaaaaaaaaaaaagaaatgagagggaaagagatttcttgttttgcatctcactcaccctttctcaaaccccatgttctgggcaccaaagatgttgtaggactttctccttaggattcttgttacacaaccaggaaagattaggctcacagacacacagaagggtgagaaaaatggaatttattgggcaaaaaggaaaaaaaaaggaaacgggctctcagcaaagtgagagagtcctgctagcaggcttcccgcctcacagattgaaaccctggttactacccaggaacaggagaggcaggctcctcccccctgcaaatggtgcaaactttcatggctccaccccgttcaaccagtgtgcagaccagccggaggttctcctggggaccctttatatttggctgtctcaaaataactttgcttaatgttgtgttaagccaagcggaccacagtattcactgggcagattactccaaacctttaaaatgccagtgtgtattgtgaatctccaagagatacgtgatatgttacttttcaaatttattttttggccatgcagtccttttgcagattgctcagcacaggacatgataattttcatctcggattttggaggaattgtatcctttttggccatttgctttcttgttgtttagtgtgtgtgtgtgtgtgtgtgtgtgtgtgtgtgtgtctctaactttgctccctacctgtgagatccctgattaaataaatgaacagtgtgtttatttctatatattgcacaacttctattaaagtgtataaagtaggggcttaataaatacattgatttgaatcaaatttgatgctgtagattcagaagctagggaattacaggttttgtagagaaatctatgaaaactcagccacaattttgttacttctgtcctttctaacagcttgtagaaaatgcctttctctcgagagtctcatagacaggatcgtgatcttcagaccatccttttgaattagagaggttattagtggcaatgtcgttaagtgaaatttaaggggagaaaacctcagatggctaagaaacttttctatgctgggaaaagtaattaatttcctaacctggaggtgactggatcttagtccacaggtgatatgtctgttttgggcctgtggtggtgataatttcacctaattccctacttgaacttcaaatggcgtcacattgcccaagtgatgtgctccttcctccctcctctctactccgcttccttctctactccctactctcaggtgctttgaaatgcctctgctgcagcactgttctctatactgtgtggggggaggtttggatgagaagagaaacatataatctcaaacatacagaaaaagttacagtacagcagaaagagcatttttttcctgatccataatcccaaacatgtttttatagccaaaagattcatttcacgatcaggcattgcatttagttctcttgccttgcttccttcagcctggaacagcctttccattttgcattaacttcctaccttgatacttttgaaatttacacagcagttgttttgtagaatgttcccctatgggtttgtctaatgttttttcattgttataattaaaagtatgtggtttgaatacctccaaaaattgcaagcttcatgaggaaggggatagtttctctccctcttcctccagactgtccagagcatgatacatatttgctgagtgaattaaaagtagtgtttgaccatctcatcataaattactcctccttccagccttgaagttccctgtcacattctgtgttggatttaatttgcttcctcggtttaaaattatatatatagatagatagagatctgtctatctatctatctatctatctatctatctatctatctatctatctatcttctatagttagttctgtatctttctgtaacctcttcctgttgtcttaaatacgctttaaccaacgaaaaagtttttccacattttttacagaagcacaacatattgacagtacataaatattgtgttcaactttttcattttgtttacataggcatcgtcatgtgatcatcacctaagaactagaacatcagcaggccctagaagcctcactcttgcccctccctttaatatctcaaaggtaattcattttctgatttaaattaagcaatttataaaacatttccttatcgactttaagttctctaccccttcagtttctttcaaatttaaacaaaaccaagcaaaaactttagcttatttcataataaacactaattgtcataatatatagcattttttatatatatatatgtatgtatacacacacacacacatatgtatgttttcacatgtcacatcctttgatcctctccatctaccctatcagatagtcagcacagggatttttactgctattttaaaaatgaggatatgaggcctagagaagggaaacctcctgagccacgattttccaatttccaatttcatcatagaggctatcacagtaatcttggcttttctgtaatttgtcaaggccagacttgacaactaaaactatcttctttgaaatattttgacaatagagcactaaacttggacctagtacacacaaagtgtagggcatggcaagttttgccaaatactcaatggtcaacttgaaccacgtaatttgggctcttttttgtaaataatattagtggtagctcacattgtctactactccatagttcctcaattatttcacatctattatctcacttaataagagttgatgataaacagcatttgctgagagcaatttgtgttcctggatggtgctaagcactttacagcaattgttaagactttcctctcaacaaatggtgaggtagttgtattagtttctatcattccccagcctcagtgtccctaagtagagaaatacttaatcatcaaattgtcctctggagagagggtacaatggaacaattccttaccttgtttagaaggatccatgaacccctagcacatcagtcttgaattaaccatcaagacagtgagctagttacagatcttcctaagaggtcagtatgaatattcctcacctcttctctcaggctctccagtatcacacagtcaaacaaactaggaactgcaagttcagtgctctttttaaattgctctttcaccttccactcactgaaaacccagttctagttctcccttgtgagggacaggacttcatgatggtatttcttacctcaccccacagagcatgttgctattcaaaatattaaagcacaaaagggaatcaatctgctcacattctattccaagcttctaaagatggcaggtggtatattatgtatatatgtcctctcagagtgctgagcactttgaagctatttcctaaaaagggagaaggcagtatctaagaggagtgtgctaatgttttcttatgaactttgactctgctgttatatcagtaaaggttagcagtactggcttggtaagctgaaagttggggcatttcattgatctctccatgtacctccactgctaggcatttctggaatattcagtgcttaatgacaaggctgtgttattttcaaagtaaatgttgaaaatagaaaccatatttaggttaaaacacctttctttaaactgtcaaaaaggctccataaatcatttgttgagtttttaaaaagaaaaatcataccacttaaaatatatttctaattaatgcactgtaacattaacttttttgggagtacagctctttgaatattaactcatgtatcgaatcaagtaaccactgtgacaaacaggatacaaaactgttctgtttctccaaacaactctcatgtgcccttcttttgcagtcatactctcccattatccctaaccccttgatctgttctcggtcactccagttctgtctttttgagagtgttatttaaatggaatcatacaataggcatcctattaaggttggtttatttaattcagcacaatgcctttgagattcatccaagttattatatcaacatatataatgctcattgcttagtattgctgagtattattctatttttttggatgccacagaatttgttgatccattcacttgtagaatgacaattgaattgtttccagctttaggcaattaataatagggcttctacaaacatgcaggtatagctttttgtatgaaagtaagttttcatttcccttggacaaatatccaagagtgagattactgggttgtatggcaagtttatgtttaactttattaagaaactgctgttttccagagagggtatatggacatttcatattccaccagtatgagagttccaattgctttgcatcctcttcatcacttggtattgtcagtatttattttttaattttagtcattctgaaaggtgtattgtggtatctccttgtggttttaatttgcatttccctgatggctaatgacattgaatgactcttcatgtgtttatttgacttttgcatatcgttttggtaaagtgtttctttatgacttaaacattttaaaattgagttgtttcttgtatgattcctccaactttattcttctttttcaaaatttttctcaatgtcttagggctttctattttcatataaatatcagaatcagtttctctatagctagaaaaaatctttctgggattttgattggaattaactaaatctttaggccatcttggagaaaattgacttctctatgttgagtttctcagttcatgaatatggtatgtctcttctattattttctagtaccattttaacaaattaccaaaaacttagttgcttaaaaagcacccatttattgttgcacagtttctgtgggtcagaaggccaagaacaatgtggcttagctggttccctgcttagggtttcgtaaggctgaaatgatggtgtcagcagtattgtgttcctttctggtgactctggagatgaatatatttctattcctttaatagttattggactattcaggtcgtctgtttcatcttagctgagctttagtagtttgtagtttttgagatgttagtccattttatctaagttgtggaatgtatgagcctggagtttgtaatattgccttattaccatttgaatatctccgtgatcactagtcatgtcccatcattcatttctatttttagtgatagtaccttttttccttacttaacgtatcacctggcttgaggtttatgttttattgttcttttcaaagaactaacttttggtttctttatttttctatatgtatatatttcctgttttgaaattatttgatttctactctataaaatttcctttattatgcttgtttcatttattcttctttctgtagtttcttaaagtggaagattagattatgggcttgctatctttcttcttttctaagataagcctttagtgctacaaattatcctctaatcactacattagctgcatcccacacacttggtatgttttattttatttttgtcaagttagaaatattttctaatttcccttacaactttcttttcaacccatatatactttattttaaggcatgtattttaattttgaagtgtttggagattttcctattatctttctgttattgatttctagtttaattctatggggagagaacatactttgaattcttttaaatttgttaaaatttgatttatgatacatgatacggtgtatctggtgaatgtcctattgaaaagaatgccttattttttacttttagaatcctcaaacagttgttccatcaaatatgcccgcgttttataactgcaaagacaggatgaagaatatttacttcattttaccccaaatcagagtcttccatgtcactttgccaaaactttcatttgctgataaatattagatttgaaatattctgcacaaggatcctattttcaaaaaaagccctgtaaactccacaaaagactgatgatgaaaataactctcatgtcttactaaatgctatcccttttgtgtagaatggaataattagtagcttttcctgttttcttcaaaggcttgttcattgtatcttaggtaaccacagaaatgccagacctactcagactttttgcagtaacttagagaaaataaaaggaaagatctgaatgggattagggcaggattgggactcaaggaagtgatttgactacagggttgaccttttatggggatggccttctggggtgtattccttggcgtgaatggccaagttttcaaaagtgcgaatggtcgtagttttcagtgggcaggtcatagaaaagggtgtcagtcaaccatggcagaatgaagcaggtttagcagtttcatggttataggaggtttatctagctgactgcaagtctttacagggacataaggtaggctcctggaagagggtgctgacgagcaccaggctgaaggcctaagtgggtgttttctgagtatagagctatatatgggatcaggaaactgagggacaaatccagtcctgtgatctggtgaagtgctgctgagcggaaggcaggcagaacaaatggtgattcatggcaaatcccacccttggcacagcaaacctagtttcagcctgtcacctgcgggctaggtgagagaattcagtggtcagagtgatgcagataaggagatgctaatgattaccaagtctagagaatgcagacgataaaaagtttcatatgcggaagtagatgttaaggtgctgagcacgtgaagacccatctttaacattgtcgtcgattacagagaactaagtacattttaaatcttcttgctaaatgatatagtcattaaagttgatatactgggaaacaataggattaaatatgagagatgtaccaaaagataagggagggagcatgaggattatcatgcagtaaattacacggataatgcaggaaaggctgggaagatattatatgtaggttagaatcatctgaagcaacagcagggtctgttaggccccattgcaataatctaaagctaagctctaatttagacactgagaatctgtgtttattacccacgtccctttgctttctgacagttcctccatctctgacccagcaccctctcactctaagacgcaacaaccaaaagtgtattactctttacgataataaaattctaaggctgaatacaagacaatgctaaatgacccagcattctctgagaggtttcagatcagccaggcgcctcccaataacattggtacctttaatctgtcaaaaccagcctgttcaatcacgtttccttttcagtctgctttattctaattcatcacagggcaggactggccctggatgtgtgttcgcagacaggttatctttagattagctttgccttggtgacctgactctttgctgccttcagcataatccagttactcttgggaatatcaattaaggccctcaatcacactaattagaatgtcttataaatgttgccttaggaattcagcagcttataaacaggcaaactgggaaaatctagaggtatgtgggggtttttaaatagctgacagcaatttgggagggcgtattgctttagcatagctgagaagtggggctgaaattacggttccctgaatgcagtgaaatctctagttgctctttgctggcaagtttaatgcagaattattaattacatttattaatgacttggatgaagatataggttgcatgctgatcaagtctgtagatgtcacaaagctaggaagatagcaattattgtgataacagattcaggagccaaaatgacttcaagacagaatttagcagccatctatctaatacgcgcctggcagtgctctataaagtacaatttgagggtcatgttgctcccctactcagaaaactttggtgactccctatttgctctttaaatcccaagcctttggcctgttatttaaggctttgccatattatgattctaccactgtctgctttccaacaaaatcttctgtagttctttttctaaaaccttgtgcttgagcaaaactcagttctttatatactattttccatttgtgttctatgctttcactacctttgagcattattctccactgaaagtttctttttctcacatgttccttctgtctcaagtctaaatatccataccagttcaaatgtcacctcttgtgtttcgtcttcttttattgtcttggctggagtgacctctttcctttgctaatcttcaataacacttatctgttcctctctatttttatcactttttacttcatattgcagggggttttttttttggtgcacattttaagtttctgttagaccctgcctagtgctagaatttctgtctggtaactctttttatctcttaagtgtctctagatgtgtgttctatacatagttgatgatactaaagtgtcttgctgggggttcatctttactgtggaaaagtgcctttagagaagaccctacattttgcccatgagaggcttcgtagctgtatcatagcaacttggaaactcaaaggataaatccttgaggggacggatattccattttccatgatgtgcttatttcacattgcttgcctgtatcaaaacatatctcgtccacacacacacacacacacacacacacacacacacacacacatctgctacataaccacacacacacacaaactaaaaaatttggaaaagaaggagaaaatgctcaatacatgttttattgaataaatgaaagactgatggagagaaaaagatttccccaaggtcataatataagagctggaaggaagaggtgctgggaagaaaacatcatttaatttatcagatgaaacaacagcttgtgatatgacgagctcacctgtgatttgtgtacaaccaggctaaaaaaggaagcatgaaccagagatttttggagaggtgtggtcaagagaggtgacgggagttggaaacttgcatagtcctttagggtggccacacctcttggattccttgtgtagtttatatcttttgttataatttaatgctcttaaaattggcccattttaaatgatgttatatggtcatcttatttatcaaatacctctttgatctgtttaagctgctgcatacctgtggttgtgaaacttgtggcataggctatttgagataataatctttgtagttagcctaatgtggatataaatagcatctttgtcacttactggaaatatgagctggacaagttatcaagacctctgcaagcattcttatatggctgttaccttcgacacagaaagcagagttcttgagcatggaatttctgcatcatcttcaggtttcagtatttataacccacagaggttttaccagtggccagatatttcttgggtagtagaaaaagaaatacttcacagagctgtcaaatctccacatcttcagcattaaatatcatgcaaccaaatgtaagggtatggttcacagcagttggctgtttcagctggttattaataggaaggcgaaagatcatagaaagttgactcctccctcatcatttctgtcttccagtgagaagaggagagcacgaacagcaggaattagatttatatattttccttaatataaattcacagtatggtagattgcagacaaagtctgaatccaggatttctagactttctatgtgtctatgtgtcactaaaagggaaaagtacctggattgtaaagtattccaactagaaatagaccaagggaatgcaaagaggggtaagaaggttgaatttatctgccagaaatgtaaatcctggtcaaaaaatccagatgaatattttttaagtaggcagttatagttcagtgaaaaagagagttgtggagccagaaagctggagtttgatcatagctctaccactctctagccaaaggatcgtggtgatgttattgaaacttgtctctagccaaaggatcttagttatgttatttaaacctgtgtattaaacttctttatctgcatgtaatatgggaattgaaaaacaaacaacaaaaaaacagaaacaaaataaaacctgtcttattggttggttctgacaatgaaatttgttaatattgtaaaattcttagaacagtccctagtctatagtcagcaggcatgaatgctagttattattatttaagcccttgaaagtagtaagtgatttcccttacctttgtatttatggttacaggatgacacttctgtggtgtgtagtgagtctctacttttatggaatcctgcaaagtgatgcctcaggtaagtgaatggcttttgacaatgtattaaaatgcaagtcatgcgtagggtaatgagtccactcttcctgaaaatgaatttaaataaacataatgttattcatgtccattgtcttctgcggtagcaaataatcataaagcagaataatagaattttgatgatggaaagaaccattgctgtctctagtcttcatgggatagagtacacagggggcagtgggccgctgtgtttaaacacaggtatttttcattaccttcacactcagccaactagaatattgcttttttcccttacctcaggtcctatgggggaaaaatgggagtgataatagcacaatctgtttttcaaatttgagccagtggtggaaaagttatcagtggtaataatccattgagatgttaaataaaataatgagtttttgtcatattgtttctatataggaaaaagaaaggatctgtctttagactcattctttctctggatgttgctttataagaggaaccagctaagacctttatagagtttgaaaaccaaactcagtcatcatgggcctggatcacgtgaaattagatatggaagagacttgctatttgaaagtccatcttttcagatctcctcttcttcccagaattatgcccagaatcactctctatctctgactattaatcattacatttcagcctatgtttttggactaatcaaattcttagaaagtttttagtacataaaactgaaatttgtctctttgattttagtatctaaaactgaaatttgtctctttccaaacatttacttggttcaactgtaggactgaaaaaaaaaaaagaaacaaacaaacaaacaaacaaaacaaccaaaacctaatgcaatggttctctaattgtaatgaagggaacctagaggtcctcattttataaagcttttcatgtaaaattcccctgaacaccataaaccatactttacatatcgttgctttaattccttttctttgtgagagggcttctgcaatgttaagttagctaccatataaccatgacctcagtgttctgcaatatatgccttcaactgtttttcatatgacatggatttgagctctcctaccatcctgatcatcttttctgggtgcgtttcagcttttctatgccacataaaacattgtattagaaaccaaaaatagtactaaaggagtggtataagtaggacagagtacagctcagtgctgaaactagcagtaacttctagccttgttggccctttggggcttcacagaggaatggctgtagataaccggagatgttattcggctgggatgcgctaggagacagctccttggctgtttagtccagcatctgtcctgcttggttaggtgtcgcgtttgataggtgagtttcttgatgtcctgattttcaaatatgttaaatataattcttgattttagtttgttcttatttgatttagttctatgtttgaatgctatctgctcacagaggcttccttgaccatcttaactaaaaatccctaccagtcactctctctccctccatcctgttttagttttctttgtaacactcacattccctgatattatattagccttctttctcttctctcctcctcctccctcttcctcttctcttgtttcctcctccttttccttcctttttttcttcctgaactccctgtccttcctccttttctgcctcccttctttcctttctctccatctctttttcttcctccttccctccctctgtcttggattttaagctgcctgagggcaggaacttgttcaggaacttttgtttgttatccaaacactcagaataatactgacacatagacacatagcagatgctcaatacataggtgttaaatggttgaatacatgtccctttacatcctttcccctgcccccagactgtccagttttataatggaacgtgtttgggttcatgccagtaattcatcatgtggttttatgtcctccctcatcctgaaggaagagggacaggtgactgtgttaccattgctgaaggatcatggaggttccagaagctaatgagtgctggtgccttcccagcagtcctgaccatgttacttttctgaatgacctttactgtaatccatccaaggagtccccagcccccacctcaagtgctgttggtaagagagctttctatccaggaactgtgactcataattctgccaggggaagctaacttcttgaataagataagttctcataccagccacattgcgtcaccgtgggagcaggaaacatgttgtaatcccctcagcccatctggcacgtactcatttgccttccttatgaagaggtgtattgtgtctgacagtgatgccacttcctagttggagggagaggaacaaaaaggacatgttgttgacaaaaacgaaaagagcaactggctctgggctagtgggggaagaaagaaatcattgcgcatcttgagggatcaaccaacctctctgcacatgaaagtattgccttttacaaggcatctgtggatgctgacagatttgttggtctttcatgaggctctccctgtgctcaggttcccatctcaacggaaacacaggttgatgtgaggaacaaagcagaaatgttctgaaaaccctaaagcaatctacatgcgtatcatattagtaagacatttattttgttctgagtccttccatgtgggccttttaagagaatcctcaaatataaaaaagaaaccataaaagcataagaacttagcgccatgcaatgtgttttcacacgcagtgaactggccgtgaagtcatacgattctgacttccgatcatgatttttctggtagcagtactgtgatccccttatcccctcaggaatgggggagcaacattttcatcttaggtgatgataaaagcaaatgattttttaagaaagctttatttccctttaaggaattaaagcttggataattataatagcgattctataattataatgtgctagttatagtaataataataaagctccctttgcttaaaaaagcagtttgcattgtacatattcaatgtcagtctcacacccaaaccatggggtagtcagagctgttgtaactacctttgttgggtaagacaagttaggatcaaagtatttaattgtattactcgaagtcacacagctatacttagcatgcttgtgacttcaacgagtttctggattcctgacatccatattatttttacgaaatatgctccagttggggtctattagaatataaattactaagaaaaaagattaagatctaagggatcacaggtaatcattttgcaaactgttgaagaaccactctgtgataggtttctatgctttgtaggtaaggtatatccttacacgcttatcctgccccctcacagcactgaaacattttcttcaggaggaaaatgattgtaatacaaaattcaaacccaatattcctttttttgcttattatagtattaaatattttcactaataaactcgaagaagttctgtttgtaagacttcgaaatggaaacttcagctcaatacacgtctcttttgctgtgcctcattggcagtgtgtcaggaagctgaactgttaaaagctgcctttggagtagacataaattttggaacctgtgatcccaagttgaggaggtaataaaaatagcaccatatagaatatagtgaatttaaaaaatattaccatatcaaaattatttgctggacaaatcacatgaaaaagagagtacactgccaccccaaaatgcaggcacacacacggatctttgagaaagattttatttcaaagtcaacagttgactgtgtgccaggtgcagggctggatttcacacacattatcaggaacttcgcaggaaccattgtacaggggtaggggctggagactcttctacctgtttgatagtttaggaaatgaagatccagggaggtggcccaagtgctcatgatagcctggcttgcctgatagagccaggctgccttgactccagaaacagtgctcttttttatttttccatactataattgcctttctttaggactgtgctctgctactagaagtaagatcctctgattccttttccattatattttacaaaattggtagagaatggaaatcatctatccaatgattgggagtgaattatacaatgcaaaataaataaatagtaaaaaacactgtggtttcctagtaattgagagattcaagttctgttttactctgtgacttgtttgatgacagtaaaggggtcatttcatcactttttgtcattgcatccttatttataaaccaagccaaccaaccaaacaattaacaaacaatagcagcagatcccagtcaattccagtttcttgatttttatgaaggaacactatgcatcatggacacacacagggtatactcctattagctacttaaattctttctaataacaatgttaacaatgatttcactttattctaaagatcatgcgtttgaccattttagattgtagaatccagggttagtaagaggaatttcttattttaagaggaatacagtaaagtttgagagaaggaagaggaaataattaccaaatagaattccgtgagagcagagaaagttaccaatcctatcaggagatattggggaagacttaatcattgctccttcctaggaagaaacgcatctcttatttgggaatgaaatagttcagggcaactcaaaagatagtgcaaaggcatttagaagccaagctggaaaggtaggttgggaacaaattatgcaggacgggaattacttcaggtaaagagaatgtccacatttaatgtattttggttatagttggctaggtttcttttcctttttttaaattctgtcgtatttttgcaaggacatacactattattaattctatgtgatggttctttcaccttttggtaagaattcagtttgttaccagccccagtggcctcattttatttgaatatccttgctttaataactccgtgctcagatatacttgtgacattgtgtcctgtcccagttgcccatggctggtcatcctgaacactcttcatttctatgtaatttagtccaaacatttggaaaatgtatgaagaatactgtttcattttattcttagtcctaaaggtcattggaattacagaatttcaccctgttgtcatttaaatgatgcctctcggaagcagatctcttcacttttttttttttctttagctgtgtttatagcttgaagcacacttatattttagttacttatatttcccaagggtggatttactgtagcctgattgaaaagaaatttaagtaccacataattggcttgatactgagtttgcaaatacacagcttcttgtatcacagtgataattctaagtttagaaaaatgacctggttctttttcacatggctgtgttagttaaaggaaaccagtatttttgtaggaactcctgcataccgttgtaggaaaaaatgtttgttttacaagaatttattctaccctttgaattacctttgtttttgctatcctttccctcactcccccaaccctgaatattcatttctaccatattttagggaccagattgccaccttagcagtgactcactaccaagaccagtttctacccacttttctttcaccacttaaaaagtttcttttctgtttaactgattaactttttagaaaataaaatatatacccacccaggataacaacacaatgattgctttatttttaaatccactgagtgctgccatctctcatttatttttgaggaacagtgagaaaatggatacatttaacaaataatttgggaacctcagtcaccttcaagttacctgctatccaaacctataaaagctgatgtacaaaattttctggctttgcctttgcgtgttttagagatagtgggaataatgaaaatgcaagatgactacgacaatgagagaaaataaataaaataatcacttcctcagcaacctagaccatattctgttgtgttttatgacattcatttctccttctaccataggaaccaaaatgcttggtatagctatacattactgggaaataaatagcacttttctgcagtgtttgtagggtctgaaatagtttaaggctcttatccatcagcccatttttttttacttctgagatactttcatatttatttatttatttatttatttattttttgagacggagcttcgctcttgttgccaggctggagtgcaatggtgcgatctcagctcacctcaacctccacctcccaagttcaagtgattctcctgcctcagcctccctagtagctgggattacaggcatttgccaccatgcccaactaattctgtatttttttgtagagatggggtttctccatgttggtcgggttggtctggaactcctgacctcaggtgatctgcctgcctcagcctcccaaagtgctggaatggcaggctactttcatattttttttaaagtgctctttaaggtttatagtagtgttcattttgatatgtgcaccaagatactggtgtttgcgtttcccccttcccttatgtaagaaaatgttatggtctctttgagatttggacttgccacccagtgctaccaagactgaccaatttagtctatttgccaattacgtttcctcagtggaaccttctccaggacctactgcatacgtgtagatactcaagaggaaagaaaaagaaaacaggcacatcgatcatgattttttttatgtgtgattttttctgttaactattgctttttattaatttattatggtgggttttattttttcctaattacttacccttgcataagaagtataactatgggccaggcacactggctcatgcctataatgccagtactttgggaggctgaggtggggagattgcttgaggccagaagtttgagaccagcctgcacaaaataataagaccctgactccacaaaaaaaaaattaaaaaaatagctgagtatggtgatgcacacctgtagtcccagctaatcaggaggctgaggtgggaggatcacttgagactggccggtaaaggctaaaatgagctgtgatcacgccactgcactccagcctgggcgacagaacaagaccctgtctctctctttctcaaaaaaaagtacaactatagttgaaatatagacctttattattattactagatgagagattaaattgtatttatcatatgtaaaatgacatttcgaagtatttatacattgtggaatgactaaatctagctaattaacatatgtattacctaacatagttaccatttttggagtgagaagactttagattcactgttatcactttaaagcaagcttgtccaacccgtggcccgcgggccacatgaagcccaaaacggccttgaatatggcccaacacaaattttgaaactttcttaaaacattatggactttttgtgattttcatttttagatcatcagttattgttagtgttagcttattttatgtgtggcccaagacaattcttcttcttccaaagtggcacaggagagccggaagattggacacatctgctttaaggcaaacagatatacaaattattgttcccaagtggataccaaccattattaattattatttactgtagttttgtttgccctttttttcaagggggagaaatctttaattgtttgccatagacttatctgatgaccagatgcaaaaacctactagctttaaattgatgcacctgagttaacctgaatgccctatccttctctagcgtttgggacttcagactatcccaaaattgcttaatggactgatgtttgatttttagagtgaaaacattaattttattcttatattttcaatgttttttgaatttttaaatttatctggtcatctagagaaaactgaatttcttatatgacagatattttgacattcacagcttgattctacatgtctttttgtcattttctggtgtccactcaaggtaaaggcaaataagaaaaaagagaagaaggagagaaaagaggaataatgagggagagaggaagagagagagagacctttttttgaaaaagagagatagtaggaaaaagagagagagaggcataaaatgcaaagagaaaaatagagataaaatattcctacacgggtttcctggatctgatgtaaacccggctatatacttttttcagattaccaaagaagctaaaccatttttaataccacatttaaatactcccccctttttttcctgagctttgcattgaatggtttcctttttgaacagttaatgttttctaggtttttttgtttgtttattttacattcttactctttccctccttccgagtatattaaaatggtgagagaaaatagaaaccttaaatattccagaagtttccttacatctagtgcccctacagccatgagagtggtcagcatgtccagggttaatgctttgttttttttttttttttttttttgagacggagtctcgctctgtcgcccaggctggagtgcagtggcgggatctcggctcactgcaagctccgcctcccgggttcacgccattctcctgcctcagcctcccgagtagctgggactacaggcgcccgccaccacgcccggctaattttttgtatttttagtagagacggggtttcaccgttttagccgggatggtctcgatctcctgacctcgtgatccgcccgcctcggcctcccaaagttctgggattacaggcgtgagaatgctttgttaatcaggatacttttattctgaaaaaaagtgtacagcagagatggtggagacttaaagctttgcatgcccctcaggataatgaaggaagaagagatggcgggcaaaagtgtaagactctggacccccttttgcaagtttatacgttctaaggcagaaacaatctgctgtttgcaattgacactgagctgtgaaatgtttttgctagtagcagtgtatttcttgaggcacagtagaaacccaaccaatctatattcaagtctaagaggagggtgtagctttacttggaggttgattgaaatcatggaaattgtgaatggagtaattagtaatcggaagtgttggaggactttctccctcccgctgcatgcagtattcttagtgaaatgctaaggggaatttcaggaagaaagtgaagacggggttggttgttttattaaggcaaacttttagctctctcacctttattactctaaatatcctgttcttaaaaaggattcttcctctcatttataatgcagtaataattgatgactacaataatagccatgaagcattttacagtattgggtttttaatcactaaaagaagaccatgttaagctaaacatggctttaaatctattttattttaattctctgtaaattgataattactatatagtggtgggtaggtatgtaataggaaggaaggtgaggaaactcacattctttgaatcaaggattatattcatataatattatattcatttctgaaaagcctcataattcagaaatacatgttttcttccatcgttacaagtgagggactccaaattcaaaaaattgaatgaacttacctaatatcactatagaagtaagtggtaaaatttgtattgctctttgactttaagatgcactgtcatttaaaatacaccatgctgccactgagttatttataattaaaacttcattttaaaacatgccaaccaaatctgtcaataattgatgatacggaacacacatatttgaaaagaaacgtttaaccagttaccaaaacagaatctagtatgtgatttttcgtgttgcaaataaaatttcaaggtgatttgcttcagtcttcctgaaacatatacagtacattttaattgtgtatatttagataatatacatctttccaagtttatacaaattttctcaaaggaaagcagttctatacaggaagaagattgcagatgaatgaaggaaaggtggcttggtacaggtgcagtgggtttgagtgcagtgggaagctgttaactttagtattctgcaaggttgctttggcattattcatatggcttcccctgtggctaactcagagatactaactctaactccctagcttttgctccttttccaatgactgactgcaggctctgtccctccacttaggtgttaagggactcagtcaaggatgtttacatgtgcctcagagatttttttgggtacccagcagtgtagagttctagaaagttcttttcagtttacaaatgccagttcttttctgctagtctttggcagtgattgaatgtgaattgtgaaatttgattgtggtctcactccaagttctattttatttctggtggagctggaatgttttatctttctcggaaacgatcactttttgtgtgtatggcaacaaaacagctagaataactgtcacttgggctcagcaagtacacaaaagtatgggctgggggcattttaaccaatccatattcatacacaggtaagctattccacttactgcaaactctccagaattgaaatcccagcagatttaatacacaaagcctcttcagtcctagggaaatgagtttttttttaacagactgattattcatttcaaaacatggaatatttttgtcataaaaggatgataagtattgccctcctattttaaatatgtacctttgtgatttaatagaaactggtcaaagatctatataacctccacatttagggaggttggtccttcatgattagatgtgaaacccagttcagcatatgtctcctgggcacctgttatgtgcagacctttgtacgtagggtaggcaaagatgaagacattgtgcgtgtattcattcattcattcatctgtagtgtgtatgtgctggacactgtgcttgcctgtattggtaaccaaaacaaaaattatctttgccctcatgaaattcacagtcttggggatggcttcaagtcttttcttacttgaagaacgtaagtaaacaaatttttataagaagttctctatagttataaataaggcattatattgatggaaagtaatgggatattcctttccttatcccatagttaaggaaaatctattaaagaatatgctatttaattgagaattgagggatgagaaagagccaccttcaaaggcagtggcatgagatgtaggccttgggttgcaggagctttgagaactatggggaaagaaacatgcgacgaagaggaagccgtggtcagagtgcagcacatactgagggtgttgttacatttacttgaactgcagtaaaaggccattgaaaggatttgggcaggactgttacattatccagctaaggtattaaatgatcttgtgagctgctatgtaggaataagattggaaaagatttctgtttttcccagtatggcggacaaggtcctctaaacaccccttttgctgtaaagcagctagaaatgctgcatttaaaaataaatgtcatttaaaatgaattgctgagttggtaagaaatccttagaggccaaaattgaagtgaaaacaggaatccagaaaagaaaggaagccagctctgcagctggcggctacccagggtaacatccagagtcagaggaaggagatatatttaaatgcgaggacatttggataatttttagaaaaaaaaaatagttaaattcctaccttgtactttacctcaaaacaaatcgcagttgaattaaatatttaaatgtaaaaaaccctaagagtagtagaaaaaatacatgcaaatatttattataatgttgggatggatacatttgtagatatgtcatcaaaggtaagggtcagcaaagaaagtctgacataattgactacataaagattttaaaaattagtatagcacagaatattgtaagttaaaggacaaatgaaaaattgggaaaacatatggcaaagggttaatgtcatcagaatgcaaggagctattatatatatatacacacacacacacgcacattttaatggaaaaattggcaaagatttgaaactagcagttcaggcagtcaaaaacagatcaacacaaattgatcagtctaaaaagaagctcaagttaacgagtgacaaaatagattcaaactaaaccaacatgcgatgccattttttttcactcatcagtctggcagagattaaagaacaatccagcctagcattggtcaggatatggtgatctaataaccaggtatgctggtctctcacacacagtggttgagagctcacctggaataggctttgtggaggggacctgggctatttgtttcaaagataccaccaaaatgcctccctttaatcttgtaatgaaccatacatgctatattctaagaaaatactcggagaaatgcatcaagacatgctcaaaaactatatttttcataggattgttacaatggccgggcgcggtggctcacgcctgtaatcccagcactttgggaggctgaggtgggcggatcacgaggtcaggagatcgagagcacggtgaaaccccgtctctactaaaaatacaaaaaattagccgggcgcggtggcgggcgcctgtagtcccagctactcgggaggctgaggcaggagaatggcgtgaacccgggaggcggagcttgcagggagccgagatcgcgccaccgcactcccgcctgggcgacagagcgagactccgtctcaaaaaaaaaaaaaaaaaaaaaggattgttacaataagtaacattggaaacaatataaatattcatgataaagggagcttaaatctatatatatatgtgtatatcaatacaatggaatatgatggattcatttatggtagatgtttctgtataaaaacaaataccatatagcagaactagtgtgaaacctttaccaactgtggcagttgtttgccggagctaggtggtatgggcttgtaagaaccaactattcaatttttaggaagcttttgagtcatttgtcaaattagtcatttgaagttggctttggtaagagtttttaccacatgaaaattggtaaaccgatgctagaaattagctttgtcatcatcaacccccggctgtttaccagcacgccactctggtcatgcatgtgtaagcatgtggaaaacctttctggcagaagatacatgccttttctttcccccctgcaggatcttgctctgttacctaggctagagtgctcactgcagcctcaaattcctgtgctcaagaggttctcttgcctcagccttccaagtagctgggactataggggcatgccaccaggctcagctaattttttaatttttttgtggagatggggtctcgctatgttgcccaggttggtcttgaattcctggcctcaggagatcctcctgagtgatcttcttgtgttggcctaccaaagtactgggattacaggtgtgagccaccatgtccagcctacacccaacccttaacagtgattatctttgaaaagtggaattatgtttgggtttatttctgccccttttaaaataactttattttctgttactacattaattcatttaggattatggcctccaactgcatcggtgtttctgcaaagggagctaagcattgggcacacatgggcataaacatgggaacaatagactctgcagagaactaccagagggaggtgggaggaggacacaggttgaaaaactacctatcgggtatctataccccaaacttcagcattatgcaatattcccatgttactaacctgcgtatgtacccccatatctaaaatgaaagttgaaatgaaaaataattcaaaaatgaaattacttattgtctgactgtatttcaatctaattaaatttataattggaagtaaagggtaacttaatttttagaagtaagaaagtatatagatctgagctgttgtattcctcgggatggcaagcaagaggcaattgtgacaggtatgatagtttaagccttggctctttgtttctgtctgtaaattggtatgttaataacttctctagcacagaggtaacttcaatattcatgaaatgacctcagtagaatactaaattagaaactttgtaatggaaaatagatattaccatagattttcctgcattataaccatggcttgtgtttgtgtatttgttagcatgttgtgtcaagaaaataagcattagctacccaaatacttggaatttgaaattagcaactccccactttcctccatcagtctactaatattggatactgtattagtctgttcccaagttgctaataaagacatacccaagactgggtcatttataaagcaagagaggtttaatgaactcacagctccacatggttggggaggcctcaaaatcatggaggaaggtagaaaaggaggagcaaaggcatgtcctacatggcagcaggccagagagcgtgtgcaggggaactgccctttataaaaccatcagatctcatgagactatcatgacaacagcatgggaaaaacccgcacctgtgattcaattacctcacactaggtccctcccatggtatgtggggagtatgggagctacaattcaagatgatatttgggtggggacacagccaaaccatatcagatacttagccctaaacctatctatacaccctgattcttaccaactttatctactcatttaaacatatctctttgttacaggcagctttctgttttgtttgtttttggttttgtttttaaaagctcagtactacagaacatagtaagctagttatcaacatttccgtatctgtaggcatggttatgcatgtgttaaattaatacttcttccttcaaccatcagcctttcttcatttctctatgcaataaacatatgttgtattgggcttacactgtgtgctagatacagttcacattatcattatattcactaaccattacagggatgaatgatatcatacagtatttacagtattaaaatggttatattatttgatcttagaatagcattgtaaaatatattattattgtcacttcacaaataaggaaatagaggcccggagagattaggtggtttagacgtagttttgcatataggaagtagaaccaggactcaaggttttgtcctctgttcccaagcccattattctttttcctggcagacccaagggattcctacctttttattactgaggacatcttttattttatattttttctaaagattccttttattgcaagcaataaaaccagacacattagtcgtgctgccatcacaacaatctaattttagaacatttcatcaccccaaaacgaagccctgaggattagcagccaatccacaacccattctcccccacccaagccctaggcaaccagtagtctacttcctgtctctatagatttgcctattccggatatttcatacaagtgggatgatattatatgtggcatattgtgattgatttagttttcacttaatgcaatgttttcaaggtacagctatgatatagcatgtatcactacatcattttttagtgatgaataatattcatcattgaatcataattgagaaatattcttcatccctgatgcacctgtgtgtgatttccaaattttgactatcatgaataatgctactatgaacatatgtgtacaagtttttgtgtggacatatgttttcatttttcttgggtatatagctgtaagttgaattactggatcaaggtaactctatgcttaacattttgaagaactgccaactacgttccaacgtaactgtgccattgtaaatgtctttttgaagtattttgaagtatatacctatttgaggtatttgcactctcatattcaactgagaacatctcctgtgagtatctcatgttcaactgatttcagctcttgtgtatctcgtgttcaactcttatgctcaactgatttcaactccaatgaatatctaccaagaagtgggactgctggatgaaatgctactctcatttttaattatttggcaaaacttccatagtgtttttccagaatggataaagagaatgcattatatcatacaattgagtgtcagtcagccctaagaaaggaggaaatcctgccatatgcatagacctggaggacattatgctaagttaaataagccaggcacagaaggacagacactacatgatgctatttacatgaggaatctaaaatagtcaaactcatagaagctgggagtagaatggtggttgccagaggctgagaagggggagaaatggagaggtgttaatcaaagggtgcaaagtttcagttacgcaaggtaagtcctagaaatctactctacagcttagtgcctatggttaacaattctgtattgtatacttaagaactcgctaggaaattaaatgttacataaagtgttcttatcactaaaataattaatacataaatgaatacataaatagggcaggaggaaacttttagaggttatgtgtatgtttatggcatagattgtgatgatggtttcttgcccgtgtatatatctccaaactcctcactttaggcacatcaaatatatacagctttctgtatgtcaatcatacctcagtaaagtggtttttaaaaaagaaacagcagaagaggtcattgtgaattcagaggtcttcagaggactcagccctttaatctctgattcagtaaagtggcattcgagtgtttccttttttgttagtgtaacaaatataaatctcagtgctatgggagctcagaaagtgttctggatcagaacatgccctgggtaattcacagtgtataaggcagagaagaaaaacctggactcaagtcaaatcctggtttccgtatgactctcagtgtccttatctataaaatgaagctgatagtatcagccctgcataccccacagagctgttttggagatccagtgagagaatgaatctaaagttttctgtaaccagtaaaagcaaatcaggaagcagaagctcagtcaaatgagcctagaaaccacacacttggcaggtaggtaagcaccagttggtgctctgtattatgagattaggactgagaccttttacattcgaagctgggtgcttgccgacaagaatccgtatttccaaatgtgagcaaacccttgcccagcagagttttcacaaaatccagatgttgagttttgtgtcaattgtttaagaattcaaaagcagatagtagcatatttttcaaaatcagttgcttgacaaccagtttatggtcctatgattctctgccaccttccctggttttgacgactctaaatcagttgaaacttgtattatttttctattgtatttttcaatatatttgccaaagaatatgggaaaagaaactttattcattcaacagccattgtttgaggtatttccatgagccaggtatttgataggcattaggatatggtgaagaacaaatagtccctgttcctttcttcatgctcgtttgtgtctcatatgtctaactgtttcagggtccctgctattcaccgtgactcacagatggcaccaatactgtgttttaaaaatgaaaagcaaagtggaggtcaaagttaggttctaaaaaaaataaaaatgaggaataacataaggaggataaaagatgttgaggctgcagttcagttctgttgctaatttactgggtgatttgggcaagctacttaacctctcagaatctgtttccacatctgttaatttgcttagttcttgactctaacaagctagcattctgtagtttgagatttaagagcctctgaaacaagtttcctttctatttctttacatttttgatcaatccatctttgctcattttccatgtggctcttatctgctcctctccatcttaagtattatcctagtccaagccacatcatctcattcttgaacttttcttttcttttttttttttttcatttgagatggagtttcactgtttttgcccaggctggagttcagtggcacgatctcggctcactgcaacctccacctcccgggatcaagtaagtctcctgcctcagcctcacacatggctgggattacacgcgtgcgccaccacccaggctaattttgtatttttagtagagataaggtttcaccatgttggtcaggctggtctcaaactcctgacctcaggtgatccacccgcctcggcctcccaaagtgctgggattataggctgagccaccctgcctggcacattcttaaatttttctgcagtagcctcataattagctgtttctccttcacttttactctctacagtccattcttcacacagtaaccagtgttacctatttcaaattgtaaattaaatcaggtgtctcctctgtggaaaaccctggaatatgtcccattattcttagaattaaatttaagttccttacagcggcctatatgctcttatatgttcaaattcctacctgttgcttcagcttcttcatattccactgttttccttgcccctggcagtgaagttttctgagattcttcaggaacttcacatgtactattccctttctcacctaagttcttccttcacacactctcctctcaactttgtccctcacatcttcattctatttcactcagctcaaaagtccatttctcagggaacatcccatctcctgccctaatcagcgacctctcaggctaagtaagatccctgttaatatatccactttatacgctgtacgtctttttcatgataatcactccaatagcaattgttgttaattgggtaattatttatttaactacttaattaatgtctgtgaccttctctagaatgaaagctccatgacaacaggcagatttatttgcctctgtatgttttatgtgtagcaaagcctttgcagttagtaggtgctcagtaaatactcagcgaatgaatgaaaggatataataaataggtaacacttaattctttaaatcagctatgagattattttgtatgagataacaaggtatatatgccagagagttctgaagaagcatagacgtttctttctatgtagttactgatctctgtttttactgtgagtgcaaacaatactcatgccaccccattagaaacaaatatccaccaaactctgtgtgctgggcactaagctggatgagcaggactaaagctctctctttgagctcacaatctagcagcaaattagcctcaaataacagttacgcaaggtacgaagtggttagtatcataagagaggttcagagaaacagctatggtggtttcaaactgagagaaattgcttcaaactgagagcagccatctatatatccagaggtgtagtgttcaatttaggccttaaaaaatttgtgtgatgtgactacttggagataggtgagaaatggcaatgaagaatggagctatgattaaataattgcctctgcccggttgttacaagtaaagccaagtctctaaacaagaggcaggaacttaaccttttaaaatttatttttatttttattcactcttatttacatatggtcaaattgagttttttggtgtaagaagtctgtgaattttgacaaatgcatacaaccatgtaaaaaccaccacagtttaggtacagaaagtcccattatcctcccaaatttctctcatgctgccactgtgccgtccccccacacccagtcactagcaaccactgatcgttttctgctcctataattctgccttttccagaatatcagatagatagaattgtactggtctggcttccttcacttagcataacacatttgaggtacatccatattatcatatgtttgagaagtccattccttgttaccaagtaacattccattgtatggatataccactgttgtttattcattcattagttgtaggatatgtgattgcttcaagtttttggctattatgattaaggctgctgtaaacgtctatatacaggctttgtctcaacacaagtttttgttacctaggactgatattgctaggtcatatggtaaggtcattaggtatgtttaacctaataagaggctgccaaactcttttccaaagtagctatactcaattctgtattcccgtcttcaatgaatgagagtccagctgctgcacatttcatgaacacttgctattttccattttttaaaatgctaaccattctaatagttttacagtagtatcttgtgtgatttttaatttacatttatataatgactaataatttggaccattttgtcatatgtatatctcctttggtgaagtgtctgttaaaatattttgtccctttttaattaagttcctgatatttttctttgacttttgagagttctctatatattctgaaaatgagttcttcattgaatagctgatttgtggcttgtctttgctaacctttaattttcttgttattttaaaaatcttgctcccaggcccatcactggatctcctatagtctcttaggtctactcagtatgtttatagaacttctaggttttttcagacacagtggggatctaggaagatgaaaatgaccattgccctgttaacaaggagcttttgagtagctggaaagagaattcaggtatccaaatatttataacccacgaaataatgtcccgagtgccatagggatgtatagatggtgtgctatactgcagagtgttgtcactcattgaggtttctggttactaaaatactttgaggccccgaagagagaaacaataaagactgtggatgattacatcctacaaactgtaacaaagtggcttccctctttacagcctcatgtattatctttgatgatgatgggcattaggggatgaaaaaggggccgtgccaggcaatgcagtctttctcaacttgatcagtcacagtgcccactctaaccattgtcaagcaaaaggaccacatcagaagccattagcctcactgcatctccccaccccctcagcccgtttgctgtaattgtcccatttgacttcgtttaataacaaatgggtaaagaaattccatgcttgacacatgtggagttgcatgtgtgtgtgacccatcagacagcttcagggcacaagtatactgcccagcctatcttttgcttctgctcatactaatcattaacatgtgtcactttaggctgggcatggtggctcacgcctgcaatcctaacactttgggaggccgaggcgggtggattgcctgacctcaggagtttgagaccagcctgggcaacagggtgaaaccctgtctctactaaaatacaaaaaattagccgggcatggtggtgtgtgcctgcagtcccagctacttgggagggtgaggtaggagaattgcttgaacccgggaggctgaggttgcagtgagccaagattgcatcactgcactccagcctgggtgacagagtgagactccaactccaaaaaaaaagaaaaaaagaaaaaaaagtcactttattcattaagtaccattagtgactctcagttgctacaaggataaagtttgttcttaccctgattgaccctagtctcattgaccctttaccattctcatgctttgtgaaatcatcccacaccctgtgatctaaccccggctgactcatggactaactcatcatggctcacatcagcctggactcctccccttggaggaggagtcagtgcacattctatgcattttttccagacttaaatcagatgccatctcttctgtgaaggcaccgatgagtgtcacccatcttgaagtccgaattaaaagtgccttctgccctcctatgacacgttgcatctttattttttccttttagcatttgcttcattttgctttgtgttgtggttgtttgcctgactctccacccagtcttgacagtgagatctttgagagcacagtctatatcttccttgtatctttatccctcgttggagcctaacataaactgttgcatgtggtaagttttcactgagggtttattgattgaaggacatgccataagccacagttcaccttgctttgtgacccagacagaagaggtgtctcagtggctgatagttgtaactggaggtgacagggggctctgatgtgttctaagcaaagacagccctgtttccctattggccgtgattatgccctcctatctagaataggaaaagggtgatttgattttgagcaataagcaacctgactctaattgtctaccttaaatgccttccattgttctgcttaaggtgattttctaccagcatgaaatgttctccttcccagacagttgatggaggagctgagtcatgcctgactatacttaataagacagaggcagctaatgccccagggagctgccttcgaggacagcttgacatttctgactcctctgctttttaaaagtgggtgttgtgagggaaagttaagcatgaaggtagcttcggagtctccactggaaacaggactatatagtgacactctctaatttagacagatgtgatctaccccgctgcctcttggctgtgatatgtgccttccgatgctgggaggtgctaatcaaggatgtcatgtttttcatgaaagagtctcacttgcttactcactttgttctactttctattaatgagtgcccacccacttccgttcttttctctgaaaaactggcttgatttatatttttcagagtcaggctagaaaatactcttgaagttagcatggattataaacccatcatattatagagatggacagggttacagatcatctggttttaccttcttatacgtgataaaactgaatcccaaagcaggaaagtgacttggtcacagtcagcattaaatttcagactctagagagtgacagatctgcgttagaatccccgtctcctactgacttgctgtgtaattgtgtgggtatcttttaacttatctatgcttcatgctcgtcatttgttaaatgagggccataataaagctatctgaaagaggcattatgaagagtgaaaatgataataaatgtaaaacacttaatacctggcgtatagaaaacactcacaattaagtgaatggtactggtagttcctatggtggtggcagttttataatggtggtcacactggcagaattaggacaagaaaccaggtcttctgaccctatgtctttgttctccatagggtatactacaagatgtatctcaggaactatatttagctatgaggaagtttaaagtgatctgtctgaagatgaattcctatattcaaagaaaggatcagtagcgagtttgctgtagcacagaaggaaaagaaaacatggtttgagatgtttgtcaacatgaagaatcaaattgggcggagtgtttgagggaagaaattatatgtaaaatctccaaaataaaaaccaaggggctgagtaagacctgagaacctgaggtcagtggatagaggactgactctggaatcagaaaaactgctgcccaatagctctgtgagcttcccaattcactctctgaacctctctttcaaaccccaaaatggggcaatatcctctatatctgggatcaaaggatataatatgtctaaaacttccatctaaactatacattactatggattatgtcaacaatgttggatttgcagtctttggtgggatgtggtggaagaaataaggcaatgatttctaagtgatgcatttgaaacattttcctacctcaaagcatacggagataaaaaggtctcttacatctttttttctttctttctttttttgagatggcatctcactctgttgccaggctggagtgcagtggtgcaatctcagctcactgcaacctctgcctcctgggttcaagcgattctcctgcctcagcctcctgagtagctgggactacaggcatgcgccaccacgcccagctaatttttgtatttttagtagagatggagtttcaccatgttggccaggttggtcttgatctcttgacctcgtgatccgcccgcctgggcctcccaaagtgctgggattacaggcgtgagccaccatgcccggcctacatctttctaagcaaccatcttcattattcattttccactaggcagggaatcacatgcagcattgggagtccaaaagtcctcagggatgagtgtcttggacttgacagtgttgtcctggaatatatacctggacacacatgcacacacacacaagatgtttgtgtgtgtagttgtagttgtaccatgcagttcctaaaagccctcttcaaatgactgtgagttattttcctggtctttcatctatttttctaaatttgatttttctagaatgtttgttttcttcacatatgaaaagtacattctcttgttttgcttcctttgttctagattttagagaagttggtttgtagttttctctttcccaataaacgtatgaggcaaatgttctcaaccttagcactatagtaagtcaataagctcaacataaaagtacgtataaaaatttaacccctgacataccaagagaaaagagaaacaaagattgatataagtccagtataaactcttatttttgcagttggttttatatgcagaagtaatgttcatgatatggttatcagagagacttttatcctgcctctgctactaacccagtctttcacctcaggcattccctagcccctctggtgtcagagcctgatctgtataatgtgtcatggggctggatgatttttgaatccaccttccagctctaacatgcagtggttttctaagatgcacggtggattataggggacttcagtgttcagaaacttagaccaggattttatcttagcatttactcttcccaagaccctgcttctttccttgggaggagatactgttctctaggtgagtgaccactaaaaacctagccactcagcacccccacctcttgaattcttcctgtcaccccatcatattcactgccagacatttctccaaaccccatttctcatgctctcagcttttgttgcttgcttcacccaattttctctcagaatcttttgttttctgcttgtcactaccagccatcaagaaaaatctacacgcttgacacattattaagatagaatgagactgcaccggcgtttcgcaggtgatgcctctgttaaacacagtggcaggattgtcgcctgtgtctcttcctctggcaggtgatgaagatcataaatgttcttttactccaggcagtttcctgagaattgctggggaggttgctgacaaggtttgctagatgcactttcctttgactttgtaattttgcgtggaatattggctgcacatcttgaggcggggaagttagaaagctcctaattgaaagttgaaggccccgatgtacttttatggaatgagtctctctgagcccccaactgggaagtgtaagacatggtgttgaaaggtacagagacccattaaatacatgatgggctttaaattccaatcatgctgttgagtggaaaggtgttcactgacgtatccttggtaattaagaagagagttcatgctcagactgccttctgcattttaccactcaaatccaagctttgagtttcctgcccttggctctggtaaaaggcaataaaaactcaaaatcaaacacacataataattcctttctctgctgattctctttccagatctcaattttctcatctgtaataatccacatcatgatagctaaaacatattcatattaagttcttactgtgtcagagtccatgtggcattttcgtgtatcatcttatttaccgctaacaacagctctatgggattggcactgattaacttcatattttgtgacatatatttgtgacatgtactgttacctatgtggcaactgtggacaggattcttcttcttctttttttttttttggtgagacggagtcttgctctgttgcccaggctggagcgcagtggcaccatcttggctcactgcaacctctacctcccgggttcaagcaattctcctgcctcaccctcccaagtagctgggactacaggtgcccaccacattcccggctaattttttgtattttagtagagatggggtttcaccatattgcccaagccggtcgcgaactcctgagctctggcaatctgcccgcctcggcctcccaaaatgctgggattacaaggtgtgagccaccgtgcctggccaggattcttctttccaggtgccacacttatgggcagcgatgccatttagcttgttttcagcctcaaggacaaacccacatatcagctttttcacttgtaaaatgggaagggtgaaaatagtaattttatgacttgaccatatagaacacatgcagcgttatcttttttggctcagtattaacgttgtctgttccagtcttcctgggtttgattcttagcctgcttcatcctctgttttgaagaggagtgtactgttgtactatttacattcaaagtgccaagtgggaatgtctgtgcagatatttatttggaatatatatttcactgggacaatgtagtagaacacagaatttggattggagaggaatgattttatacttgctacaagtaaactcttgtgttactcaagttatctttctgggtatagtttgtaaaatcttctcatttgcagaatgagaagaattttttaaaatgttgtaaaatctcccttgtcgtccaacactctcagacactttgtcacaggtgaatctccagagcttaaacatcaacaacatttgttgagcacaattcagtttgaaatgggctatactcagtttgaaagtgaaaaagagagaaatataatcataacaacagcaaagattatgtgaccagctctccgctaaacacattaccagtgttgcctcatttaatcttcaaaccagtttttgtttacacatgggaatatttaatttatttgcacatagtcacgtggataggaagtggcagaacgaggtttagaacggggttgttggagacttaccattgcatactccctagggaaagcagttgttttgggacattagagccctggtttggcccctccccaccactatcatatattgtttacccatctctcagacgtgttttttgtcctctctcgactgcattcacttcatgtatggaatgggggtattttcagctatcttactggaattcagggctgcaactagacctgaggcctgtattttctgggactctaatgataacatgtgaaataactttatttcatgcgctgtcagtcttgaatggaaatttcaacacagagactgtatattttctagatattcttcatagcccctagcactcacaggatcctgaataaatattatctaataataagaataaagagagcaaaagctgtttgattattatattaaaataatcattgaatttttacatcttaatcatggattagaaaagatagcttggagggaaaaaaacccccacaaaaacaagctaatgactgcttagcgtttctccagtgtactgtgtcacacttgacacagcctgtttatttattgtcacaacagccctgcaaaaaaaatcattcccttcagcagcatgaggttgctcattacagtaattttttttaaagaaaaccatgaaccatggtacagaagaagcatactcagaattcgttcttttggtttgtttgtttgttttgagatggaatctcgctctgtctcccaggctggagtgcagtggtgcgatctcggctcactgaaacatctgcctcccggggtcaagtgattctcttacctcagcttcccaagtagctggaattacaggcacgcgccaccacacccagctaatgtttctatttttagtagagacagggtttcgccatgttggccagactggtctcgaactcgacctcaggtgatctgtcctgccttggcccagaattcattatgtgggcttctatcccctggtgccactttgatgagagaagcagagcttgttacaggtggctattagatgatgttactgtattaccttccttattctgcacaacagcaggaagggtggctgctggaaccttctgggacataaacacatgataattcagggtctttttgctggtaatccaaaacccagttatgaaatgatttgagatatggaaacagcctggagaccttcagcagcttcgttagaccaggaagctttaaaattatctagaaaacccagggtttttattcaggtgctctcccacaaggaaaactttgtagaaagtgacgcttgtatttacaaactaagagtgaaactccagcatggcagatactgactgcaaactgctcggaggtgctaaaatattcatcctttaataatgctagactctgaaagaccccagctcttttagatttgattttataactctaagtattgcctattataattctgaatttaaacttcgtaggattggttgttttcatccgtcagggttcactttcctttcttacctctttcttttcttcttttttcctttgttcaggtttactttgtaatgatttgtccatactttttattttttaactggatggaactgccacttcaaattgatatgaaatgacagtctttagggcagtgtaaatacctggtgccataaacaggagtagtacactattcggaataaaaattattctaggagcaaactctaatgaaactgaaaccgtggcttgtggatttctccctcaccaaaccctttttttttttgaatttggcattctttcctaatctgacaaatgttatcatcccttgtatctgtcagagctattttccatttttttttcaaattattcaatcaagaaaacttccttttgttggtgggagtaaggtatgtctaattatctggtcctggaaagcagccatctgcccagtgatgaacacgggtttgtatgcagtgccagcaacatgaggatgcgtgatggatgctcacagacactccagctctccctcctccactcctgacttcttgctctcctcttgatgacttagtcagtgaatgtgaattttcagaaacattttctagactttgtttgggtagctctaccctgaataaacatatctaagttttaatattgtgttagttttctctcatactgctaataaagacataactgagactgggcaatttataaaggaaagaggtttagttgactccagttccacatggctagggagccctcacaatcatggcagaaggcaaatgaggagcaaagtcacgtcttacatgtcagcaggcaagagagactgtgtgcaggggtactctcctttataaaaccgtcagatctcgtgagacgtattcatattatgagaacagcacaggaaagacccacccccatgattcaattacctcccaccatgtccctcccacgacatttgggaattatgggagctacaattcaagatgagatttgggtggggacacagtcaaaccatatcaaatatcttccactataatataaattatactctaggtgaatggtgtttgcagatatttttggaaaccagtggtatattataggatactgctagaaaaatgtctagatatttaaaataatttgtcattgaggaacaaaaagaatataagtcaaagagacatagactcataaggtggttaaaatctcaggaattgttcatctagccacttatttgaacagaggaaataaaaccattgttatcagtgaagacaatgatcagccataagtagacatgtaaaataacagctgtttaaactaattcctttccaagtttagtgagcatagggattacctggggattgttaaaatgcagatcgtgattcaatacatcaggatgggttctgaaaatctgcagttctgacaaggtggcaaggaatactgatgatgctggtgggttgaggaccagactccaagtaatgaggatataaaaagcttatttatcacataaaatgtagaggtggaaagttcagggctggtaaggcaactccgcaagttattcaaggtcccacctcctttcactttcagatttcaccatctttagggtgtggtcctcattcttaccgttcattatgtagcgccagctatcatatctatctatgtcccacgcagcaggacagaagaaatgggatggtaggaggagcatgggaaccataggaacatgccagtgtctctcaaggaagatttctgggatctaccatatgacaaatttcaaaccttttctattagccagaacctagtcacctgaccacatccaggtgagaggcaagctgggaaatgttacttttaaactgagtggctatgtgcctaactgaaagtccccacactctattgggaaggggcgtgtgaggcatggaaatggggcatgtctagcagtccatgccacagatgcggatgtctgacacaagaagtggtttgccaaagatcacagaaaaattacagttcatagattaattataaccagtacatgtatggacattctcagtttatgtgtggtgctgttttatgtcataggcttatttcattttcataactattttacactattatgagcttcttttttggttgtggaaactgaggttcaaaatggttgagggacttcattgatcataaagcctacccttactactctctttataattgcatattcctgtctctcccttctctctccctccttcattcctgattcctcttaccagattctatattgttctttgttcccttcactcatcacctttcaacattctatatatttttcttatttagcatgtcaattgcttattgtcagtctccttgtgttagaaggtgagctccgtgagacctttgttttgtttgccagtgcatcccaagcacccatttagtatttggcacatgacggaatgctcagtacatagttttttaaatgaaggaataatgccactaggtatcaaagtccgccttggaattatgtctgttatcttcaaccctaatgctatacgccttctccatcagggcttctgctaatgttttagactctggaactcctgtgtttgcctcagaaatgtgctcacacttaaacatattgatttcctccttgtcttcgtgacattcatttaatgttgctagccaacttaaccagtttgctcttaccttcagttctctctttatctcagtcccaggttaatatttcctgaggacccaagcataccactagaaaaacaaactttagcaaaactaccaaaattaacgtcaaaccagcgttcctgtttgacttagtctctagcctcaggcttagataggactactagcacacgcagatgggacagtttctaagtggcctgatccgcattggtttctagtttggaatgtaaaaggggactggttctggtctcagccaaatctcaagactctcacctccaccctccgccctgtttacagtaatagaattaatataaaatgtagcacaatataatataatagcatttaatattattatgcttctgtttagaaacctgttatgacaattggttgatttcattcagttaactctatttctatgtctttcttttgtgaagattgttaattttctgatgggaattttctgatacaggttcagctaatacgtactgagctcgttttgcatgctaggacttttaactctcacacagcactgtaagataggcagggtgtacatgcagagactagtttaagagaagcattttgtccaaggccatatggcaactaagtggcacatggaaaataattaactatggaaagtaattccactttaggtctcctaaaattcaaatctttgctctttcttttctatacctgagtttcctgattttttatacttatatgtctgtctaccccagcacctagcatagtgctttgcgcatagcaggttctcaataaatatttaatgaatacaaatatatgaagagcttttctgtggaaaatattctgctttgaatgtgtgaggatacatttgggacaaacatcctagctctatagtcaggcagctttttttttttgtgctaccactcaggcaaaagtaagtcaattaatctctctgtctccgtttcctggcatgtaatgtgggaatgggcatgaaagccctagagtgtgttgtgagattaattagttaaaacgtataccctgctatataaatgctaattgctgtcaggagcgtgggttggatcttccagtgacttggctttgcaaagctttgcacatttccattagtcctctgtgccaccaagtctcagccttaagaaacccttttggctgagaggaatgatgactttgtggttctcccatgttgagaggccaatttagagaggacttccactgtggagtaaactgaataagaagggacattataaacaaaaaaggaattcttgtgctagtaatttgctaaattccctttgctgttattagagacaaatgtatttgcataacagccttttcctgtcttttctgaggctggtgcctgcagtgaatcatataattaatttggtattacatgacactccagcctgttgccatagattttatttttatttgttcattgaataatataaaaagctctgacaaaatgcgctcaggtggctgtctagagaacttaaaaactcacagaactaatttcaaatgggcaaatatcccaaagaaaaagctcaataataataatgtttatgaatgctaatacatatattttcaggctctgtggtacaggaggctgactcactttacacacatattcatttggtccatgaaacatcatgtaagggagatacatggcaggtataattatttcctttccctttaaaaatgtattgaatttaattgaagacatattaagccgatggattgggccagaaatcttggtgattgacttgtattcaaattttagtatgtaaggaacaaatgcttttttaaaaagtgtctggtcttgatttattaacttatgttatgaaaggaaaattctaccttcctttttttgttaatcaagataggcagtactagttgctatcacaaatctcagtgacttaagacaatagagatttatttttcactcatgtcacagccgcttgaaagtcaagtggcattcctgaacagctctgctctgagcagtggcaggaatccagattcctcccatcctgtgatgctaccttttcaacagtttctggacttcagggcctccatttcagggaaagagagcatcagagattatgctggggatttcaggctctacagcatttctgcccacatttcactggccagaggaaattcacatggccccaacccaattaccaaagagaagtagttttcacatgagtcaaggagaacagaattaatgagcatatagacagtctctaccatagtctgttctcgtgatcactaaaaatccattttataattcctcctaaattggtctgagtatatgcttgccgttaaaatgttatgttagctctccttttttatttcctctttcccaatcggcattctcctactttacaaaagaaaaatctacatgtcgctcatcatctatcttactattaattattgcccagggctataaagattttcagggtctaacatgacacttattttattggtgtcagaatgtctccttaataagggcactgttaaaccccagcaggccttcctttttctctccaatttaccaatgtttctattaagagtgaatcatgacatcagaatatgatctgtggcccaagttggagtgatctgaattgatacacattgtagagtgggttataggaaagatactaatttccatttaatagtctttcgtctaccatcatctaattgcagtccaaaaagtgcagtcttcagggagatgcttttgcaaaacacgtgaagaatatctgtaggaaataccaatggcagtgacatcttattttatctagacaacaaacagtataatgaaattgcagactccatttgctatccaactgttttcttcctctttttttttctatatactttatcattcaaagtgaaatgactgtcaagccaatacataacaacacaatttttggaaataaaatataaaatcaaaaatttttctaacagaaagtagttatgataaggatggtttgacatagaatgggtttgccaactgtattacctagtggatattttcttccttctttcctttcttccttttattctaattattattttaattaatttgaaagcaaattatgcacagatttttaaggtcaatatattaaaaaaaatcaaaataattatatactttctgccttaactatcctcacttttactaattacccttctcagagacaacaacttggatgtcttatttatctcttctaatatttcccatctatattttgctaacctatttgtatacattgttatcttttgtgtagtcaacccaaggcattatcttttcacttttttcattatagtaaatgaggataatctcactgaaactgctatcccttctacccattcttctctatatttcatatttggtcgagtcaataatcatttcattaatatgttttcacatatttatgaactataattctattacgtctcttagtttttgaagttattaactgcattgcttttcatatgcttattttaatttgtatgtttttgtaaccatttttatagctttcaattgcctttcagcataatttttcacatttttcacactgttaatgacatcagataatctgtcagttgtgattattttttcccttattggaggtttccaatccctactacctatactggttcgttaccaagccctggtgcataaattttatccttgggtctcgttcactgtcattctgaggatccctttcctctcttgaattagaatccctattcccaatcctaggttttctctattattgttttattctctcatttttgtggcacacatcccccgaagctccctgataaggaggacatggtaaataaattgtggagtctttacgtgtctgcatttgtcaccttcacacttgattgttttattatgtttaggttctaggttggaaatacttttccttcagatgcatcgcttcattatcttctagtttccagtcttgtgtttgggagttcccaaaccattctcattcctaatatttcgtaaagtgactttttttttttcctttcctttcttactccttggcagtttgcagaatcctctctttctctgcaattgttttgaaatatttatgtggtgtgagtctatttctatccattattctggggcaattgataggtccttagaaggttgtatacttcagttctcagattttgttttttttctgtgaattatttaattgagaactttcttggtattttgggtttttttttttttttgaaaggtgtggtgcagagagttctcttattgagtgattgagattcctgaagtgggcttctaactttcttatctattttctatttctttttctttctactctgctttttaggaaatctttaaatttaacatctaaaaaaaaatctattaaagttttttgttttagtgggcttttgttctctgaatattgcttggttatagcatttgttcctgcttcatggatgaaacaggttccttatcgctctgagaatgttgatagtattttttacatgtttacttttccttgaataatttgattttctccaagttccttttacttttttttttctgacattacattttgtggtagaggtttttctcagatgatctgctcagatttaagaagaagtgattaagaagctgattggaaattctaaatgtgagtgtgaagccgtgatgctcgttaaacttgagcttttctgttggatgatgtggctgcacaattttctaaagagcttctgatagtaagattgtcatatatttcttcttaaactggccagattttccacggaagattctttccttctcttctgtggagagtaaatgtctgactgccctcatccttggagctgagtgaagaaaactgttcagtgctagaagagtgggcttggaacaaagcatgtaacttttttatatagctgtcattctgtcttctttcttttaccattcttcccatatcttcggttttgagatacctgactgcatgtgccaggatagattattgatattggtaataagcaaatccaaatcatctctgccttcaaagaacaaagttgtgtggtatgccatccatcaaagtacccaacctaagggagcctctgtctctgtgctttcatatttgccaaggcagaagaaaagggaattttgtaaaatataccccatccaaaacatccacaagtaggactgactacatcttcttggtcaaagtaagtcacatggccgctccttacttcagaggtgtggaaatgtacaatcttatactcggaggagaacccataaatagtgggtgaacagcactaatgactctttatcttgatgctgataattcctgggtcttttcagcaccctgaactacagattggtttgttctccagttctctgctgctggtttaggatttgtctttttaggtgtgttaagtctgttaccacttgtccatgttggtatcactattgtcttttctcctactcttgcagttacttgggattatgtattaaacattattttaattttcttttcttttctttttttgaaacagagtcttgctctctcacccaggctggagtgcagtggcacgatctcagctcactgcaacctctgcctcccgggttcaagcaagtctcctgcctcagctttccgagcagctggaattacaggcctctgccaccatgcctggctaatttttgtatttttagtagagatggagtttcgccatgttggccaggctggtctcgaactcctgacctcaggtgatccgccccctcggcctcctaaagtgttggaattacaggcgtgagccaccatgcccagccaaaactttggttatacttttatataaactgaataagcgaactctgcaactttgcaaatattttcaaagaatgtgatactttataaaatacattgtgttacaagtgtgcattgatgtgaacaacactgatttttccaattatttctctgtatgttttttaaaagttgcttctaactaaaaacatagcaacaaatagtcatttgttgagtcttggaaaaactagttgttaaatttccccgagctttattacttacctgacaaatccttttgcaagtcagaaagcttcagattcttcacttttatcaaaattagaataatgacaagtgagttgttttgccagttatccactgctgcaaaaacggtgccttgcaaagaagcacaaatttaaatgaccaaacttcattttatttatttcacttgtatttttgcttctgagtctgtatcttgtgcggctcagctcgtccaggccggacttgctcttgtacctttggtcagttgtggaaagccagatagccatacttctggaggtgggccagctgccagctggggtgtctcagctgtcctctctgtggtctcttatttattaatatgcttttgtggacttgttctcatagtgacaacagagttccaagagaaaaagcaaaatcttttaactcttaagtttagatcgtcacacaccacacaatcacttttgctgcattttgtttgccagtagaactcacaaggacagcccagatttgatggctggtgagatagactcttgattggaaaacttacagtttcaaattgcagaggatgtggagataggggaaagggaaaactagggctgtttttgctgactctgtattccagagttttcaaatgatcgttaaaaataatgtttgatgataaaaatataaaatgggtatacagctcagaaagaatttaaagaattgagtgaccttgtggaactaagctcctttagttccttactgtaaacaaattttcccagttctcacgtgtaagcaaacaattttcaactagtacctaaaaactctcattcaaaaatagcccttctatattactaagaaatgatttccaatgcaagctttacattttataatcattaattacttataaaatgaaaacatattatttaaatttataagacatttcaaaaatcttttaacacttagcactttacatattacacaaaagaataaaatgatgaaaaataaagcataaactatcaaacataagaatatattccattaaagtaaatttgcatgtggagatagtggaattaatgtaagttcaaggaaaaaaagaaactatggaatttataatggttaaagaaagcttttttacatgtttttaggttggatattggtgtatggcaaatcactattccattggatgtaattaaaagaatgatgtaactcttttctttcaaaatggcattacttatgacactaaatatatcctttccaattatacttggcatgagaagttttagatgtcaatggaaacgtagggaagattacagagttaaaaaaatacatacataagcatgtgtatgtgcatatgttagggacatgaggaaaaaactactttaaggtgatggttttgtggtccgcaggactccatcaccctgacctctgttcactcttcatctggtgacttctagagccctccattcagatatcactctaaagaaaataaatattttcttgttttcttaaaataaagaaaaaattctttaaaagaagtttgtttttttttctgagtagatgagtgattacttttcattataaagaataaattatagaagccattacgcacaaggacagtgcagattggaggggtggtaagatagactcttgattggaaaactcacagtttcaaattgcagaggatgtggatacaggggaaagagaaaactagggctgtttttgcagactgtattccagacttttcaagtgatcgttaaaaataatgtttgatgataaaaatataaaatgggtatgcagctcagaaggaatttaaagaattgagtgaccttgtagaactaagctccttttttatttgactctgtcattgaaactgtagcacctttagttctgaatgagtattccaccaaggagtattactgagatctcttgatttcttgaggtctactgtcctgctgtccaataaagtagacagtagacatatgtggctagtccagattgagatgtaagtgaaaaatacattgaattttgaagatgtaccacagaaaaagaatgtaaatgtaaaatagctcatttttttatattttggatatattgggtttaacaaaatattaaaattaatttcgtctgctttgttttacttttttagtgtggtaactgaaatgtctaaaatcacgtatgtgtgttgcattataatttctattggacattgcagatctagcccatgaatcagaagatctagagcaaactgggagtcctttctcccatttgcccaaggattgtctttttcagttacaatttcctccttaaaccattctctgttccacaaagtgaaaaaacacttgatgtctttcttaggtgaaactttctcccataccttgcagggcttaacagggtcaagctatcagatcaaatcattattcaagagatactcagaaaataataaataatggggaacagcagtttcttcacaccaaaggtgcctactgtatgcaattattagagggaggctggaagatgaccagagaaagaggttctggaaaagaccgggtgaactgaggagaaggtgtgttcttttgaggcctttgttgtaaaatgactcatctgcccctttctttcttttttgattattccagaacgctgcgatgactggggactagacaccatgaggcaaatccaagtgtttgaagatgagccagctcgcatcaagtgcccactctttgaacacttcttgaaattcaactacagcacagcccattcagctggccttactctgatctggtattggactaggcaggaccgggaccttgaggagccaattaacttccgcctccccgagaaccgcattagtaaggagaaagatgtgctgtggttccggcccactctcctcaatgacactggcaactatacctgcatgttaaggtagcctgattcttggcagtggctttctcttttccctttagtttctgggctcttttccggatgatccgtgtgctaggaagctggggagaagtcggaagcatttagatagagtttagtgaggtaattgtctgcagcttagctgaaggggtctgaaggaggtatgcagagaaattggttgtggcccttagaatgttctccagaggtagttccttcccagaccctgagacatatcaaagttgtccgaaagtggagccttgttattaatcccctctcaccacaccggttcctgcctgcctttatgccccacctggagacatccatttctccagacattgaacagggcagagaatagagcccatttgtatctgtttttcttggcatctttcaaagtacttggcacagaagagaaactcaggtgcattgtgtgatgcacaatgcctcccaaatatgtgtgatgtgatgcctcccaaatattattttactttttgagtgtggcaactgaaatgtcgaaaattacatatgtggttcgcattatcatttctgtcagacactgcacatctagcccccaaatcagaagacctagaacgaactgggagtcctctctcccatttgtccaaggtttgccttttcagttacaatttcctccttagaattttgtctgtcataatattctcccaaatattattttgggaggcatgacatatatgtatgacaatgctttttaaacttctaccaactttcccctaagaagcaagagaataccatatctctggcaatctaaggatataatccaaacaatttaccatgactgtaaaatttcttttcaatccacttttttttcccttgaaagttttgtagattttatattttactcttcagtattcctcttttttttttctgcattaatgttgtttttggggaaaaaaacaaaaaaacaaaacaaaacaaaacaaacaacttctaaaaactgaggcctctccacagaatagcccttttcagggttaattatttggttactttttactcacagtcactttttagctgccaggcttgcctttgttttctaaactcccatccgggttatttttttttcttttaacgacttcctgctatttaaccggtgtgtggctttgctagggctgcaatgacaaaataccacagtgtgggtgactttaacaaacaaaattaccttctcacagttctggaggctggaagtccaagatcagggtgttggcagggttgatttcattcttgatgcctctctccttggcttgtatatggccatcttctctccttgtctttacatggtcttcctctgtgtgtttgtgtcttaatctcgtcttctgataaggatgctagtcatatgggattaaagaccccctttatgacctcatttgagctcagttatgtctttaaatgttctgttttcaaataaagtcacattctaatgtactgtgaattaggaccttagcatataaattggggttgggtgacacaactcagtccataacaataaataatcacaaatgttttttctctcatggagagtaactactccctgatggaaaactatgactatgctttggtaaatgtaagctatgttatgattatgtgaaaaaagatctcttttctatcacagaaaagcctttggatcactgtgttcttgggggttgcaggtaagggggatccctgtagcctctgaaggtccttctgaggctttcattggacacttgaattttaatggagtggactttagactggtatatgggtttctgaggatcctgaaatactcatgttgtcattatttatgttctaatacaacttggtagaagttaaagcagattatagtggaaagagcattaggagaagacagagaaaccaggccatcacttccactctgccactacttagctggtgaccttaggcaagtcctgtccatgtctgagagctgtggtatctacgtccacataggaagagagttggcatacatgcttgatgagctcctttttttctttgataactgttcatctgttaacatttcccaacgggaagaagtcatcaggagctttctgtttaactatggtctccactgtgtatcttagtgcttcaatatcagttttactttttccttaattacttactacttgcctgtagatcttccacaaacttttctaatcttcttttacattataggagtagagctgcatgactattaagacctgcatatacctttaatgttatttatcaactttcagattgtcacctcttcagtttacttctctatcttccatgttcctaaagcaaatctagaattgaaattgtctggtaggagcactactaggtttcctgttttactgaggaaatgtcgaatctgagaatgaccttaaactgaaacatgtagaaccataggcctgaatgtctttaaggccataaagttagtttcgtctttcagtattttatttatattcttgccccaatactgttcaactttgggagctaaaaaaaagtcggttgaaccactgttcttcatattttttaaaatcagaaaatatatccttaaacttaaatttactttctataacttccacctatagaatctgtcttccacgtggcagatgttttgttatttgtaggtaggggtcatgcctaccactcccccttgccaccttctgagcgttgtcacaagtcatctttaacacccctccctccctctttgagagtgcataccccaccccttccactatatttagtctttattcataagtcattttggtaccagataagccaaataggtgttatgtgatgcctcccaaatgttatttagacaaaaatcacagaaatggctacacatagactccttatcccatcactgtaaaaaattagttgtttttattattgtatgttctttttcatgttttcctatatttagacacaagttttacatccattccatttatttaataacaaatatttatttagcagttactgaaagttaagacactgtactagatgcaatttatgtaataaaaaacataaatagcgttgtgggacttatattttacagaggataagcgtacgtatctataacataacaatctaattttgagctataacaaatttaataaaggaaatgtccaaggtgctcaataaatgacagatcaaatttagatatgaggtgggaaaagataacagagaaggcctgcatgtgaaatggagggggtgggggaagtaagccctccaggcagacggaacaacgtgtgtgaacattatagcaccaatgtaattccccagtcatcctaaggaattgttatgtgtttgtttttttccttcatgcctgattgtttgtatacattctcacaacaacttggaatgattgtaccacaggtttcttgataatattccatttgtcacattttcttctattgattttaatgttttccttgccgatatggctctggatgggccattttgactatttgctgtctctattcctccttttctatcgttctatcatgtgacaaaatatccagacataggattgctagggcaaaaacaaaggcgttttatgatcctgaaaacatagtttttcccaaaggttgcttataccattattgactctgcataaatatgccattcatgcctctgccttaccagcactgagcattattgagaatgttttaggtgttacatatatacacagttatattttgctgtgttgaacagcagaacaggggatatgttctgagaaatatttgttagctgatttttgtcattgtatgaccatcatagagtatagttacatgaacttggatggtagagcctactacacacctaggctatatggtatagtctgttactcctaggctaccaacctgtatagcaggttgtggtactgaatactgtaggcaattatcacacagtggtaaggatttgtgtacctaatctgtctaaatatagaaaagacacagttaacatacaatataaaagatgataaaaacggtacacctatgtagggcacttatcatggatagagcttgtaggactggaagttgttctgggagagtaggtgagtgagcagtgaatgaatgtgaaagcccaggacattactatacacttttatttgtctgacggtgcataggtttgtttataccagcatcaccaaaaacgtgaataatatgttgccctatgacattacaatgacgattacatcaataaacaatagaaattcttgagctctattaaaattttatgaaaccaccatcacatatgtaatccatcattaactgaaatgtcatcgtgtgacacatgactatttatatacactgacaaacacacacaggatcacatctgaaaatatactttagtacattaatagtagttaattaattgtgcctgtttttttattctgtgatgtcaattcgtgtaggaaatgcctccactaccattttatctcttacatgaacttacatgtataaatgatgtctccgtatgtagcctggcttcacttagttcatttgaatgtggttgctctatgaaatcaaatgcaaatactacccattcattgtatatttcttttttcaggaacactacatattgcagcaaagttgcatttcccttggaagttgttcaaaaagacagctgtttcaattcccccatgaaactcccagtgcataaactgtatatagaatatggcattcagaggatcacttgtccaaatgtagatggatattttccttccagtgtcaaaccgactatcacttggtatatggtaaggaaaattagactacattttattctctctaatggcttataaaatgataatgcttatttgctgagttatatttataagcaaaggtgtttctcttcagattatctgatctattccgtaatagctttatggaagtatttcagcacgtcctcattttgtaccattttaaaggaagtggtgcacagtactttgtctcaggccactatttctgaaattattctaactagaataccaaaactaccttatttctgttaacttcatgtgaaatacattttaagaaatgctgcccacttctagttcctgcttagtgaagtcataagctgttaattcttgtggtgaatttcaattccttgattaatcagtactgcattttattatttatgtgtgtttttttctttgccctcatttgtgagcactgtccatctatggtcttttccacatccaagggatttggaaaatgtttcatcaaaatataaaagtgttggaaggtagcgcttgtagcagcagcatagcttttgtatcacttcaagtctccacatacaccaaagccgaaaccccacggccagaatttgcaacataactcagtgactagttatccataggaaccacctttgataaagttaactgagacaagccaccaacagcctaagcccatatgggatcagtgtttgtggggaaggaagcagatggaagtaacgtggtgtctgtcagacttgacaacaggagaacgccaaaagagccaacaggtactcactggaaagtgtgatgagccaacgtgagaccaggagctgaaattgggagaggttttgctctctaataaggggtagtgcaagagacctataagaagaagctctgaaggggtgggaaaagttgtagttcctcacaactctgaaatatgaccagccacgttgaggagaagctactgtgagtagaatcaaaagtaaactggatgaggacaatatataggaaggaaagagaaggactggtgaaaaatggatcaggagaacaaagccaggacgtcttaagaccaagacaccattgttttcaaaagatatcttggtgaagttagaaaatccttttctattttaaaattcagaaaaaactactatttcctaagtgagctaaatgacattttaaaatgatacaagctgtgaaagaataataagaattagaaatatccaaaaattatatatattatataactccatacaaacttagaagaaaataaatcattttagaaatgaagataatctaagaggaagatcacagaataaaaaacacaatagataataccttaagattagtagaaggtgaaagggagaaaaaattaaaattaaaaaaatgacaaatacaataagaaaattagaatggctgtaagaatatcagataaagtagacagtgaggattaccagagataaagatgacctttcataataataaaaggatcactttatcagcgaaacataaaaataacaaaagcttgtgtgcttaataacaatgcttcaaaaacatgcagcaaaatttggcagaactcccgagagaaataaaaaattccacaaacacaatttgttgtaaatttcaaaagctgaacattttaaattctgtctctgcttaagttgttaatgatacaatttgggagtcaacttgaagagtcttctgttggccaaagatgaacaatttgaaccgaaataatttgaacctaattgcaatggtttaaatcctatgaagtcagtttaaatttataagtttataatgacatttcacaaaatttaatgggttacatttggatgatgataggaaatcagtttattatcttgaaaactggtaaaggagaataatcaagtattcattctggttttcctagaagacatgtaacattgggtaatgaagtgttgtagagaagtgtgttttgtaaagtgtttctaatagtaaatgaaaatttaatgatccaattagaattatcatcaccttgcaactctcaatagattaataaatctaggcatctaagcatcaatgactgctaacatcacaagaggaaaaaccatcagacatgtttcttctgataaaagaagaaaatattacatattgattcatattaccaaattaattaaacctgagtcggattaagcctttggatcccactgtcattttgcaggagatatataaataacatagaaatacattgaactgcagcatgaatatgtcatccataaaatccagactatgtgaaactctatgggccagatgtgctgggtttttcaaaagataaattgtaagaaaaggaatgtcatgaagagggactgtatagattaaaagaaacatataagacatttaaaaagtagatagcactgtagcatctaagcatgcatatataggtgaaaagtatataaataaaaacaaggaagtgattttactataaaagtatagatagtgcctactttggagggtagtaaaggaggtgtgattgacatgggccgtgacgaaggccttcaggagggactggcaaagttcctggacctgactgatggttacaaaggcctttgctttataataactcattaactcttagatgtgttttgcatggtttttttgtatgtgctttattttacaataaaatgactaagagggatggagggagagagagaagaaaggtagaaaaggagtgaggaagagaaagagatgcagagactgatttaagagatttaaccaccaattgcaatgaatcaactttagttggatctttttcatttgaaaaaaactataaagcaaattatgaaaagatcagggaatttggaacatacaatactaatgttactaataaattattactttttaaacttgataatggtactgtagttatgcttgcagaaggagttttcttttttggagatactcaaatattgtttaaaataaaattatatgatgtctgtgatttgcctcaaaataatcttggggtgcagtgagtagctgtgcatgaaataagacatagtctcaattaatacttgttgaggctagtaaagatacaggagctcgttgtcctctctctgattataatttttcatggtaaaaaacctaaaagatggttaaaaaataatattaacagttttacatcaataagtgtaatataccttccagttaaaaaaaaaagtttatttaccgtgcaatctaggttttaatctcgaaccttatttgattttttagttttgttcccatacacatcctgccgttttctcatctccttttttcctcatgcatttcctctgcctagaatgtcctccctttagaacagaccaaattgtaccacctttattaattgttccttgttccctccagctggaaatcatatttctctcatgtattcctgtttatttatacctgtttcaatattatttttcacttctttatttttttagtcattcattcatgactacagatagtcctcgatttactatggtttgacttaagatttttcaacttgatcatgggtttattgggataaaacctcatggtatgtcaagtagcttcttatgatttatgatggggctatggtttctactgaatttttatcactttcacattatcataaagtggaaaaatcataaataaaaccgtcataagttggggaccgtctgctgtgttgtgagaattaaatgcatttttgacttaaccatatttttgacttatgataggtttgttggtatgtaactttcatcataagttaaggaatatctgtatactagctgaagattaactgtgatcagtgcaatatgccagggggttgagggaacaccataatgaataaaatatatgcccagagctgtgtagtcccaaatgacctcataatttaatacaaataactttgtaaatacaaagaatttctactcttatcaaaatgtaaacttctaagtttcataagagtgacaaggagaaaatactgttggttttaaggagagagagatatgtatcctagaagacagcatatttcttgagggcaaagctatgtaatgtcttactctgcatctccagatttctggttttcacgaaaggatgacatggtgctattaaccaaggtatgaagtaacagaggagaagcaggtttagggagtaagtaatgggttaggtaatgccatattaagttagttgctgatgtctgtgagacatctagctggcgggtggcagtgactagcaggtagtggttacgtgattatgagtctggagcttaggagaaaaatcagagctaaagacagaaaattgggtgcattcatgtgatagttgaagcacttaagaagactaaataaagtgagaagagaactgagctaatgccatactctggagatactattcatgggtaaatggagacataaattctgagaaggagacagaaaaagtcacagctgtaaaacaattaccatggccaatatccaaccatgcacaggtgactaaaaaaggcaaacaacatggccaatatggtgaaacccccatctctactaaaaatacaaaaactagccgggcatggtggcgcacacctgtagtcccagctactccggaggctgaggcaggagaatagcttgaacctacaaggtggaggttgcagtgagctgagatcgtgccactgcactccagcctgggcaatggagggagactccatttcaaaaaaaaaaagacaacaaccagtcatgttttctcttatttgattaagaagattgctaataatttctgatatattgcttcctgttcctctacctttgggtaatcaactgacacctttaatcctaagacttctgccatcttggaaacaaaacaaaggttcttggtcactgcatcctcctgtctctgtacagcagtgctaactttgccttctattttctgccttttacaatcatccccaagcatctacccggatgtcttggtccttcttcagcaattcttttttagttgttaccaacagaggttcctacatctgttggttcctacctctatggatctatcttttaatcctcatagacttatttgcattactaaaagagacatggtaaagatgttctcttttagtaatgcaactaagtctatgaggattaaaagatagatccataataataagtttcaggaaatttgctttcccgttatctgaaagatgaaagctgctaatcttaagaaagaaagaggaaactaatatttcttacatttcagtaatcacacggcagcgtgctgtgtgctttatgttcatatgtaacaccagctctgcaagggagataccatattttgacagattaggaaatggcgattcagagagataaacaataacagctaacatttactgaacacacgtattgttccaaacgcttgattttacttaattctgtcaacatccttatgaaataggctgtcatgttttccccatgttatcgttgaggaaccaaggtatagcgtggttgagaaatatttccaaggccacagaactaggagctaagattctaacctatgtaatgtaatgtgtcaggaaaccacacttttacactttcatatataatttactcaaaacaatgcagctactgatgggagagtctgggatttcaggccagttctgtgtgattacaaaaactctactctctagaactgatgtaaggagggtggtccagcctttacttttggagcttaggacattttggaagggcagggtgatctttgaacacatactggggtgtggactggaccgtgggacgtaggtgaacctgtggatagagggccctgagaaatcggaggcatctcagacaaactgagattacaggaaacagaaaaccaaatgtttacatttcagaattgctgaagaaatgggataggattggattgtcctcctccacatgccttctctttctcctcttttttttttctgcatggcggaaaaaaattctgccatgaattcacaattctctaattcaacattaggtattctagtttaactcctgtgagttaaactgatgttcagcaaatatttgttgaataagccaggttttgtaactagtctggaaagcaaaccatagtttgtaagtgatttacagaatttcaaacagctggcttataaaacaaattctgaaatataccatgtgtataaatgggagactgccttgtttattcacataggaacctccaaacatatagaagtaaagacacaggtaatgcagtccttttgttgttgcttttgttactgatgagattaatttagagtctttggcaggccatcctaactttcatattactgtattaattctcttccttatagtttgatatttaaaactttatcttttagagatgcttataaaagcatagacaattttctcaccgaggatcaaaagaaccattttattgggtgttttgtagattacatttatgacagctgctgaactactctcacctgctatttatcagaatagataatgacttttctattatctttgtggttgtaactttccacaaagctagttttccttgtagccacagtgattactaaaattgatatattacctccacttttcatttttattgtggtcaagcattttttataactatctcttagaaaataggaaaatatttgctcttccagactaagtgctattaggaaagaacatttctgaaaacgtgcctggcttggccttcttgttggcatagagatattgttgagaagttagttcaaggtctgtgtagtaagccttattttttaaatgcctgcttctatttgatttgacaacatagattggttctttaactcttttctttacctacacttcctatatagtgattggattttcaacctttagtgtgagagagtatgtaccatattttctttcagagctatacacatataattctatatgtgtacatatatgcatatacagataacatttgacgtaaggtttagggcctctgaggactcaagattcatgacttaaacacaaagccaaattcaaatagctatgaagtcttgaagccacttcaggccatataaatcacctactctgtacttcgatagcacttcattcatatcttgtctttattattctagagattttctcttttttctgtagtaagtagtgaccactcttttcctgtctctttctctttcccttcaataccaagcacacagcataaaactgagctaactatattgtacttagaaattgattaaataattgaatgaattagcctgccctgtaaaattccagagaataagcaccatttgtggtttttttttttctggcaattgtatagccagctcctaacccagtgcctggcccataggagggactttgtaaatatttgttgtgtaatcattgcatgacttaattctgttaattggaagtgactagtttatctaactcttctaagacttcatagcaaagtatgtgttttataccaactttatcttgaatgcaaaaacttcagtagatactactaacagttcaaaccttgtatctcaattaaactctttgtatctttacatctactttccctttccatcctacaacccaccatccaatgtcttatattccaaatactcatcagcacttatacactcgatgagccctcagctccatgccttttgggtcttggcttctctcattcatacctttgatcaggcaacactaacgtgtcgagcatttaccaagcaccaagtattgagcaagtttccgaccacgcagatatggaacttaaaaaccccactgtccctcatacaagttaattttccaaaggaggaactctgcatgaaaacagagcattataataatgtagtttaagtactaacagtcagggaaaaaaattaagacaatacaggtgagttcttcacgctttttcctgtgcctgaagtgtctacttcccatgtctaccttcttcctcaacagatgttaatattcttatcatttaagaaccagcccaaatctttcttcattaagtttttctaagttgttttgtttttatttcatactcccttgaccctaaatgccttttattgtgtttgttgcaatccttcattagaccatgaataactataagttagaattgtatcatttccattttggtgccttcacacagttctttacacattgttggtttcttgaatggaaacacttgttcttacttcatcatgacattcctccactgcacccttcccctccccacatgattcgtttcagttgaaagatcccaaagtcatttcttgtgttgttctttacctatatgttgtggtcggttgccacagcaaccatagcatggttgaaaaatcgctcttctatttaacttctctcttttgaattcagaatgaggaactaatgggtcaactaggattgtttgtcttctagtcagacaagtgtttgctttattgtggaaattcacttactgttcactcatttcttatattttaaagcaagtttcctattcttggagaatctaaatctttttttatgtttgttttcttctggattccaaataaatggttttgaaatcattataacattttcaggttttatttttatcaacagtttattatgtttaaaattatcctatgtgtctcaggtacatgtgttgtgaagggtctagagacagagttgctgataagaaagagagagctaaccagacacacagcaggttaatgttcatagacatttgtagtgtaacaatgccctgaattaccctcacacacgtattagaatgtaaaatattccctttatttctaaaatgttttaggcctaatagctttgaaacagctataaaaagtttctttcatcacattcttaaggaaatactgttgacaagttcagtaaaaataattgacttctcatcctcaaaagtgtgcttcctcagtttaccactgattgcaggaattagcctgttttaagtgatagagccacatcacgcttttcactcaggctggctccagggatggcacaggttcagggctgctatatggaatgaagagacactatcaggtgaaattaaaagcaaggactttgaaacaagtagatctgaattcaaattccagctttaacactgtctggtggtatgacattgacagttacttaacgtttctaggccttgttcattcatctataaaacggaggtaaaagcattacaaactttacatgtttggaataaggatcagacgagacagagtatatgttaagtgcatgtctcagtataattttttatagcctcaactcactgctgaggagaggtattcattcttagttaagaagctgatgaaagaccgttattcggctttctggaaaactgaatttcagctctctactgtgttatctagaatatctctgtctcattttttccgtctataaaattacagcgtatttagtctgatctgtctacttcacaggagtttcagaatagctaagctaacaaatgagggggaaatacctttgaactgtttaaatgaaaagtaccacaaaaataaaatagttctattgatactgtaaactcaattcaaaccaaatctgacataaacttataagaatacaggcctttgagaccttatcctttgtgatatcctaaggatattgaaatcgtttgctgacctgacaagtgtctacaagtattgcttatcttacaggagaagctgcgttgaaaaaaatacgttacccaagcttatagtagcttcctcttgatgatcttttccatgaaatggaagttcaatgctgttcttaaaatacacatttcctgtgacaaagcattacaaaatgtgcctcaatgtaactgtcatatttcaaagtacatgctccaggaattgaagaaaaccttaatcatacaaacattaaagatgaaatatgtgaataaaaaaaattgaagttacaagctagtagtagactcccagaaatttaaagatgtaaaaagccttagagataacctaatctttttgtcataggtgacttattgatatttaaaagaaaaacaaaagcttttctaaaagtaaatgttcaacatatatttttgtcacagatagtgtattgattttttttctcaaaaacagcaaaaagtaataatttagccaaatagtgagactgagaatttgaaacaggattctagatatgttgaatgagatagttgtggactgagatagttcaatttctcaattttaaatgtcaacagttatatgcaaatgtgaattaggagcagaaatacattcctagatcttgatcaggcccatgaagatattttatttttagtttctgaaatctgtgatactcagttataaaaatgggataaagttggtggctcatgcctgtaatgctaacactttgggaggcccaggcaggcggatcacgaggtcaggagttcaagaccagcctggacaggatggtgtaaccccatctgtaccaaaattacaaaaattagccaggcatggtggcgcgcacctgtactcccagcttctcaggagactgaggcaggagaagtgcttgaacccagaagactgaggttgcaatgagctgagatcacgccactgcactccagcctgggtcacagactgatgagaccctatctcaaaaaaaaaaaaaagtaataaaagaaaaatgcaaaacagtttggaaatatctgatacagggaaacaacagggtgattaaaaatgccaatcagacatctaaattggggcctagattatcagacggagtgactggagtcccaaattaatataatcagtgaagaaatattataaaaagaaaaagaattgctttctaaatagcaggtcttgcagttgctcaagtttccttagtcattatttcaaaactgtaactttgctttactatcaacataggatgcccagaatttgatcctgagacaggaagcctgtgtttttgaagtcacactttagtttagaattttaatttctcatgatcagaaaagataatgacaggtgtttcatttattcttcgcagaaatcttgtcaaatacttgaccaaaatagttttataaaaactgcagcatgaatatttcggtgttctgtgcaaaattagatgtgagtgtgcgtgtgtttgtatgttttctatgcatgtatctaaaaagtaaactttttttttttttactttttctagggctgttataaaatacagaattttaataatgtaatacccgaaggtatgaacttgagtttcctcattgccttaatttcaaataatggaaattacacatgtgttgttacatatccagaaaatggacgtacgtttcatctcaccaggactctgactgtaaaggtagtaggtaagcatgattagtgtccagtacacacaacaagcatgtgatcatcttgttatggtttttaatagtttattacacactagtatgtaaattgtataagaaaagtgattcatgttttttgtttacagtactgtctctagagccttcaacaattccatgcacatcgtaagcattcagtaactgttggtcaactgaatgaatatgtgaataaatgaatgaagtaaaggtagtttggggagggaaaggagcaccagacagatctgtgttcaaattctgtcactgccacttattagaaacatgacgttgaacaaggtccctgtctttatctgtactctggaactgcaattgattgagaatatttaaaaaaatattcatattgtattaatgcagtttcaggcaagcaatagagactcagtgcaacacttttgtcaaaagaatgttttacttggattaagtaaactctatttttctacatactgaaactgctgtacctattgctgaaggtatttgctggcaataatgttcaaccattattttgcactaagagaatagggggtgagaaactaggaaagtgggaaaggcaattcttagacagagttgacaaactcctagcaaacccagaaatagagaagtagtgtcaggatatatggcttttggggattacccctaaataccactgtgtccagtgtattaaaaaagatagcatctctgggtattgttttgtcataccccatcttttaatagatggaaacattaggctcactgacaagaagtaacctgtttagagacactcagtgagttacttgaagaagtaattctagatcccaggtctctgctcagggctttttctactggtctgacatgatttagtataagttagctacaaacagcctttcatatagtgcaaatagtattcaaacaatgtcgtaatcacttctgttctttttctgcttactttctaaataatgctgagttggggattaattcataagaaaaaaacagactaaattttaaaagtcaaatgaataatgtaaccttatattcatcttagcagttgtttctaatatatgtgcttaaaagtatgcattttggggaagttgggaataagcatactttgtcactctgattaacagatttaaaaattcacagacagatctgggcactgggggcttctttctcaaatttcaagcaacacaagtttgttgttttaaagctgcaaagtgttgagtatttattatatgccagtagcatatccttaatatatattccttagtttatttctcatagtgaaactgcgatatgagttttaattatcctcattttagagttatgaaaaattagcttttcaaaaattaggaaaaaccaagtaactttgcttttgcatttttatatggttaatatatggccaaatcaggattagaacttggttattaaatctttggagctcatacttttgaagacaatactaaaaactctactcaatgtattatttttaaaaaattaggagtactgaatattataaagagcagcaatctcataaacaaacattcaactggtaactagtcatcaagtagactaatgtgccggccttaacatcatgattgtgaattttccattgatttactcattaatgtaatacttatttaaccagcttccatactagacactttcggtaatgttgtgaagaaatacagagagaagaaacaactgactaaggcatgaaagcaattaggtattatgcaacataagacatctatctcatgtaagctttggaaagctttgctaagcaatccgaccttaagcatggagggtatttagtatgttttatttttttctttgtaaagcaaaaactatttttttctatgctcaaaacacttttgtcactaaatgtgtggctcttctatacaaagtaattctcaccttttctgaggacattaactgcatgtcctaaagtttaattcaatttgacaccagttatccagagttagcactgaccccacaggtgaaggactccttcctaaaagactgccccaccccctactttagattccagtcacaagcaataggttcccgcgttacccacaactctgcctgagttggctacaaacttaagattcctactacttcttcctcaggttctgtgatttggtataactgctcacaaaactcaggaaaaccttttacttacccttactttgttattatagaaaatattataaaggattcaaatgaacatccagctgaagagatacatagggggagttctggaagggtcctgagttcagagctccaccctctcagcttgtggatgtccttaccaacctagaagctctccgaacctcattgtttagggtttttatggaggttccgtcacacaggcattattgagtaaaaggactggaaatttcagccacactcccaaacttccagggatgggtgagaggctggagattgtgttaatcatctatggtctttctggctactagcgctcatccagaagctatataggaaccctagccaccaatcatttcattagcatataaaatccactcgttactccagagattccaaaggtcttagaagctgttgtgttaggaatttgggactagaacaatattaaaacaatagatgctcctattacccctgtcacacaggaaatcacaggggatttaggagcccatgtcaggaactgggagcagtcatcaaacctgtatttcctttattttatgctttgcttgttttaaatgactgaagtgcagtaattgagtatatcttggactataggccttctctaaaacaactgacaaactatgccaggaagttaggcaagattcagagaagagcagaatttttaataaggctgcctgatttaacatcatctcccttttttatttcctctaacacaggctctccaaaaaatgcagtgccccctgtgatccattcacctaatgatcatgtggtctatgagaaagaaccaggtaattacagctatgtctctgaatttcacttagattctcttaattacaaggaataaaatgtcatttaagttaatgcaagaaaatagacgactgttgtagagaaacacatgaattgaaactgaaatgtcagaaaccaaagcagctgtggagatcagttacttccctgatcccatgggcaactctagaattttttgcttcactctcggtatctgctcccttctccctctgctagccgtcttcctctgctgatgagtgatttctgtttgatgcaaactttagcttgcacagggctttggtttgccaaggctgcaacatgggcacaagatttagacatccttcaagctcctgctccattatgaaaggtcagtggtggatcttgaaggcaagactgtgaatataatagctaacaactgataaaactagtagacattgacgcagaacactattgaatgcttactgtggctcttcggttcttcttttagtttccataatttttcattatagccaaaaatcattgataactgaccaaatacgggataacatgttactcttttgactcaaagcctcccacagttaagtgaacaggaaactatagaaaattttaacattttctatgttgtatcacttacaatacatccagtccaaacccagtgagaggtgttaacctaaataacaacaaagacaatagctctccaaaaagaaaaggatttattcaggaatgaattgcagatagcaatccaggaatatgagtgctatggcatcccatgcgggaaccatagccatacccagaaagcataggaacataacagttttgaaaggcaaagtgaggaagattacataaagttgttctgaaataattatccttggttataagaaccaataacagggtaacatccgtccaggcttgactggcatttggtggtcagacctcctcacagaaatattatttgtttaagaatcgcgctggcctttgtgcaagatagtggtgctcagagtctttgtactagtttttataataggcatgtgtgtgtgagggccctttttatatgacctcccaactgtttttctttggagtgtgacacgagtgactccattttgactctgacagctttcacagaggtataaaagagcatctgtttaaaatgtgctaaagataatagtcagttgttaatgggtgaaagcaacggagaggatgccattcaataaaaaaaaaaggtggaaaaagaggtatgtagttgttcatggaaagctgacaaacacaggaactgtcaaaatgcatcctccacttgacacacctcttgtttcaggcagtgcctgttttgtggtcagtggggagtatgtaggatatgtatcagagaatgaaaaaaattaaaaagtttatggagtgggtgcaagacacatacagccctgatgcgtatctctgggccctatctaaagggtccctgaagtcttcagctcactttccttaagccataagtacaacttgtcggacatgcacgcagttgccaggcgggtcaagtggcagtaacttgagggtgatgtttccgagggtgctccctacccacactgcagcggggtcctcgtgtgctcgcggtgcatttttgcagctggcgacttgaactgggttgtgcacaagcaccattggtttgccaataagtttaacctggatgtggaacatagatgtggacctcttcgccatccagtgtttgggtgagcaccggaggcataaagctttatagaccttaaaacactgaccattataggcaatcttagggtgcattttgtgcatccttcttattatttctatttagttcctcttgccaataagcatcagaaaaattgtatggagtcctctttggggtagggatgctaagtcttcatgcagaaaagctgcatggtttctgcagagcacaattggctagaaaggctgtaacattaaatgtttatctagaattaacatgagtaggagtaaaagtggctgtggcatcagggcgggcagcaaagcattctggagcgagggggctagggtgactggggaagaggctgatgaaaaaaataaatcaattaaaagagttcagggacttaacaaaatgagatttgacctgtgccaaaactattttgagaattttaaatatgacatttttcctggtatgaataaatttatagcaacaaacaataataaagatacaattgatcttgtatgttatgtatgttgacagagaaatttgattttgctctaaaaaagataatagtgatcaacatagatggagaacaatgccaaaaaaaatcaagataagtttgaaaatatgacttgctttgtgaaacacagagaacatggtaagaggctgaatttcctagaattaggtatggctttatatagtcatatgaatactcttcctgctgtcagggtaaacccttattaataacataaatatatttgtctacctgtcaaactatgctgacagaaggattgttgaatccgtgttccctttatctttcttagtgacatacagatagggaaaactggagggaaaagacttaaggacgttgcaatgggagggtagatagagtatggccacgcagtcaggtaagcctaagttcaaattagggtgacgatataatttatcatctaaaccaggacactttctgtgagtaaacatagccactacctattaatataggtaaccaggaaagcaggcataaaacagaactgttctgggcaaactgggatggaaggtcagtctaggtcaaatcctggcccttcacttattactgatttaacttaggaatatcatttagcatccttaagcttcaccttttacatttgggaaacatagattttaaaaaataccttatggtgcttttgtaagattaaataagaccattaataaatataaatatttagcataataacttgtacaaagttcttagtaagtatgttgctactgctgctgttactactgttttctgcctagggatctccctaacctcatgttccatctcagagggatagcatagagttttctatttttaagttatcttaaaatttattgaatgcaccctgataggtggagcatttcaaggtgggcctcctcagccagatctctctgtgatggtatttccccatctttcctggccaaggactgaagatatggagaacctgtcctcagtcacccttcttgaggaaaataacaaaggagaagagcagtctctggaggtctagggctaaaaagaatattgtcagagacctttttttttttttttttttttttggagatggagtctcactctgttgcccaggctggagtgcagtggcacagtcttggctcactgcaacctccacctcctgagttcaagcaattctcctacctcagccccccaagtagctgggattacaggcggtgccaccatgcccggctaatttttgtatttttagtagagacggggtttcaccatgttggccaggctggtcttgaactcctcacctcaagtgatccacctgcctcggcctcccaaagtgctgggattacaggtgtgagccactatgcctagccttgtcagagactttttaaacaaatatcatcattttagaatttatttagattacattaaaaatggtcactctggtaattttatacaaagttgatggccttctttatttggtttcgcttgtttgttttggaatgaagtatggtgcattaccttatgggagtcgactagagaattactcataagcagggtttcaggtacacataactcgtagcttctgattagccagagagtagaaccaatatagccatgtgaaggataaacactaatgggctaactttgtctttgttttttgttttgttttgttttgttttgttttgttttttgttttttttgtttttttggttttttttttcaggagaggagctactcattccctgtacggtctattttagttttctgatggattctcgcaatgaggtttggtggaccattgatggaaaaaaacctgatgacatcactattgatgtcaccattaacgaaaggtatcatgggggccagcaagggagtgattaacctttgtttctcaacttaatgatctctgatgtgtgttctagtcaatgaaaataaaaattctcatttttccctatcactaacaaaaatcggcaagattttcaaatctttggtgattgcatcccaaaccagggttactgggctagcaatgcaaggaatagatgctgcctgatgaccagtggagagctgaattagaatgttctgaggctgagcatcttcatcagattgtccagaggacatgcaccctattgtcttaagcccagcaagattcacacatttatgatacccacatggaagtagagagaatacatatcttacatgaataaaaaggtcacaatcaagggttgtgggtacgtggaaacctacagtgtagttgtgttttttccttttctcaatcctagtgtctggccctatgtatttgtgccttaggtaattgtgttttgtttttttttgcattgcagtgagcatgcattttctctctcctcctctttcttatctcatataacctatagttacatttataattagtaatttttaatattaactaaatacgtttgtgtaatttaaattttattttaaaggtagatgggtagtaatataactcacttttaaaataaaataacattttattcctaaataaacctgattttttaaagcgttggcaaagtggaaagtgtgcgtccttgaagacagaaggttccactgcaaatgaagcataccattaccgaacagcagttggctcactgcaccaattaaaaatttgcagctggtcagctatatgacaaagtaatgtagctggaggctcacagggagaattattgatcttttttaggaatttttaacactttgtagcccatccttataataataatgaataaataacaaggaaagtcatgttgttccaccttgctgctgttgaaacgtactcagtgttcataggatagcagtggcgttaagcttaagcaaaaccaatcagagcccttaaccaaattctcatacctgacagtaagcctagttaaaaagagaacctagatggcagtcagctgtagcagagagatttttctctgcgataagtaaaggagttcaaagggattttaaattctgatcttggacccaaaacacttgatctctgattcactgagagttggatatatttatttttacaaagtttacgtgttcataacagctttctctttttatatgttaggatttaaccatgagatttcagatttctgaccacagtattctagctgtgttcagaatccatgctttgggaatcactgaaatgcatcagctattcctatgggataacagtaatacctacatgaatatttattaagcattattctaatattcatgccttagcatattcagtcctcagaattcctgaataaattaatgcatgtaatgcactgtgtgggcattatgacttccctcttttccaaaagaggaacctgagacctggaaagattagttatctcacccaaagtatatagccaggaattgacaaatcctggataaaaacccaaaaggacctggccccagaagcttctctctaaactgatacagcatcctggctcagaagtttaagcaaaagagacattttgttttgaagagagatctataaaaagaagccagtattgggatttggtctagacaatgggatagtgtgtagcgtagatggtatagtatagtgttagaatcttaccattaatactttgtaatcactgcattataggtggctcagcttatcaaccttcctcgccctcacctgtagtgggggtctgtggttgcttacttgtctgattcctacacagtccatagctcttgagtcactctcaaatgctttgattttcttctctctatttctagtataagtcatagtagaacagaagatgaaacaagaactcagattttgagcatcaagaaagttacctctgaggatctcaagcgcagctatgtctgtcatgctagaagtgccaaaggcgaagttgccaaagcagccaaggtgaagcagaaaggtaatagatgcggtcagtgatgaatctctcagctccaaattaacattgtggtgaataaggacaaaaggagagattgagaacaagagagctccagcacctagcccgacggcatctaacccatagtaatgaatcaaacttaaatgaaaaatatgaaagttttcatctatgtaagatactcaaaatattgtttctgatattgttagtaccgtaatgcccaaatgtagctaaaaaaatcgacgtgagtacagtgagacacaattttgtgtctgtacaattatgaaaaattaaaaacaaagaaaatattcaaagctaccaaagatagaaaaaactggtagagccacatattgttggtgaattattaagacccttttaaaaatcattcatggtagacttcaagagtcataaaaaagattgcatcatctgacctaagactttcggaatttttcctgaacaaataacagaaagggaattatataccttttaatattattagaagcattatctgtagttgtaaaacattattaatagcagccatccaattgtatgcaactaattaaggtattgaatgtttattttccaaaaatgcataattataatattattttaaacactatgtatcaatatttaagcaggtttataatataccagcagccacaattgctaaaatgaaaatcatttaaattatgattttaaatggtataaacatgatttctatgttgatagtactatattattctacaataaatggaaattataaagccttcttgtcagaagtgctgctcctaaatcagactgtgtctaaaactttctttgtgtctctcacctaacacagaatcccagaaaatcccttcaaggatgttttcaatggtcttgagaaaagtaatgatgagttatcacacatgaaatcatgaaatcaggtcattcagaatcctcctggctcctagtctatagagtgtgtaatatttcttcaaaagtgaataacatagcacataattgttacattttacagagacttaatgcttttttaaagctgatgaaaaacaggattcacctcaaactttcattacaactttaaaactaaatagcaaaggcctgaaatgtatatgctgcgtatgaagtactagtgaatcagttcagggtaattcattgcttctgctcctcagaagccagtgtgaaaaggaaagactgaagtacatgatgtaaggcagtttcccaaattgagttctcgggaacactactaagaatcagtattgtcctgcaatgcattattgtactctagaatcagagcacctgtgttgaaattctggtttctgcacatcctaactctgtgaaaagtaaatctctctgagccttaatttccttatatttaaagtagacacaataataccactaccttataaggttgttttaaagtgctcagcacagttattggcatatatacctatatatgaaatgctcaataaatatgaactcattatttccttaagattttcataggtgttatttgacaaaggcttttatcatcaaataagtatcatttatgtctggattttaaaaaatcaatcaagttactttagttaggacccattcaagtatttaatatgtgaacatttgatgggaatatctgcgggaagttggattatagtggcaggatgttttcatatgtatttgactccagatttcttaagtatggagctttttgtggggatcatcttctgagggatgtatcctggggaataattatggaaggtgacataaattaataacttattgtcaaatgaataggatcagaacaatcaaagcaaggtgtaatgtaggagtgaagcacaagtttgcctcccagagcgaccagagtagctccccttttacagaagcccctgctctaaatggtgtaataaggacagtgtcaggaatgtgaagtgacaggtggatcctctagactagatgatctgtgctgaaagctgatataaaatcactgtttggtcacacctgtgtatttccggtggtaccagaggagttgtggttttcttcacttggcttctattctgggccagctaatgctgaaattcagaggttatatctgagttcacattcatacattacatgtatgggactactctaaatttattagcaaagcattatatgaacttcctcaaaaggacatcaagaaaagactaaggcctggaatgagagaaagacactggtgtaggtcttattgacagcaaaatttcattatagtcagttaaagctaagtattaaagaggaggcagttgttttatttatattttatgtatttatttttatttattttttatttttgagacacagttttactcttgtcacctaggctgaagtgcagtggcatgatctcggctcactgcaaccactgcctcctgggttcaagtgattctcctgcctcagcctcccaagtagctgggactacacaggcatgtgccaccacgcctggctaatttttgtatttttgctagagacaggatttcaccatgttggccaggctggtctcaaactcctgacctcaggtgatcctcctgcctcagcctcccaaagtgctgggattacaggtgtgagccaccacgcccagctcattgttttataataacagcatgaaaaggactaaggcaaggtatctgtttaactttgtgagaaactgccaaacctgtttccaaagagattgtaccattttacctgtcctctagcaatgttcacaaattccaggcgctctatttcctcaccaatttttggagctgtcaaactttcaaattttagccatactgatggatgcatagttttattacattgtgctttaaatttgcatttattggatactaatgatgttggacaatttttcatagccttatttgtcattagctaatatatctttttgtgaagtatctgttaaaatgtttagctcatttttgttactggtcatttgtttttaaatttaatgtatgttaggatatagacacagacgcatatatatctcaaataaaagtcctgtgtcagatatatgaattgttaatattatcacccagtttgtgaattcattttcttttaaacagaatctttaaaactttgatggcatttattgtatcaatttattctatgcttagtggtttctaaattcagtattagcaatctttgcctaaagttagaaaggtattcaggttagaaaggtatccttctgtgttttcttctggaagactggtagatttttcttttagagttaggcctatgatccatttttttaatactctgaggtactgggttaatgtttagtgttttgtttttccacatagataaccagttgttctcatatcatattgaaaaatctttcctttgtttgttgaattgttcagaaaagagcccaaaaaattaattctatgaatatagatctatttctgcattccctgctctgttcatctgtttatctatctttagtccaatgccactttatcctggttaacatagttttaaaatttaaagtaagtcatgaaatcacatactatatgtcttcccccttttttctttttgaagattgattcaactattttaggaaccatatattttttttcgtatagatcatagtatcagtttgtccatttctacataaaggcctgatgatattttgattgtatttaatttataaatcagtctggagaaaattgaaatcttaacaatactgtattttccagtccatggatataatatatctctccatttatttagatcttaacttttttcagcattttttcttttagatttgagtgtacaggccttgcatatatattgttaaatgtatgcctaaatattttgtttttgatgctattgtaatagtacttttatttaaatttatttttgagacagagtctcactgtcacttaggctgcagtgcagtggcgtgatctcggctcactgcaatctccacctcctgagttcaagcaattctcctgcctcagcctccagagtagctgcgattacaggtccccactaccatacccggctaatttttatagttttagtagagacggggtttctccatgttggccaggcttgtctcaaactcctgacctcagatgatccaccctcctcagcctccctcccaaagtgctgggattatagtcgtgagccaccatgcccggcctgtaatagtactttttaaattttcattttccagttgttcattgaaaatgcaattaattgatttgtatatattgatcttgaccttttgaactttagggtggggtttgtttgtttagtttgttaggattttccatatgcttgattgtgtcacccatcatcaaacagatttttacttcttcctttctaaatttcataactttaataactttttactgtccgtttcactcttttggacctccagtacaatgttctgtagaagttttgagagcagccatctttgcattgtttccaaatttagagggcaagccttcaggtttttatatacaggatttttttgtagatgacctttattttcatgagcaattttttcattttcagtttgccgagaatttttttgtgtgagtatgttgagttttgttgaatacttaactggatctattgagagaattatatgtttttatttttaatctgtcagtgtgatgatttatacttactgattttgaaatgttcatccaattttgcatgtccagaataaaccctcatattgtcatgatttattgtcctttttatatattactggatttgatttactaatattttgtcacagatttttgttcatgttaagaatttttttttttttttttttgagacagagtttccctcttgttgcccaggctggagtacagtggcgcgatctcggctcagtgcaacctccacctcctgggttcaaatgattctcctgcctcagcctcctgagtagctgggattagaggcacccgccaccataccagcgaattttttttttcttttcagtagagattgggtttcaccaaattttgttcatatctttgttcatgaaggatattggtttgtttggtttgtagtattcttttcttgtaatgctgtgactaatgtgagggttatgctggtctcattacatgagctgggtaatgttccctcttttgtgattatgtgaaagcctatgggtaaaactggtattatttcttgctcaaaagaattactcatataactatctgggcctgttgtgtttttttttttgttgttgttttttttgagaaggagtctcgctctttcgcccaggctggagtgcagtggcgcgatctcggctcactgcaagctcggcctcccgggttcacgccattctcctgcctcagcctcccgagtagctgggactacaggcgtccgcctccacggccggctaattttttgtattttcagtagagacggggtttcactgtgttaaccaggatggtctcgatctcctgaccttgtgatccgcccgcctaggcctcccaaagtgctgggattacaggcgtgagccaccgtgcccggccgttgttttctttttgggaaagcttttaattatgaattcagtgtcctttttagttattgagattttctgtttcttcttgtggcagttttggctttcaaggcatttttttccatttcatctaagttgtcacattattggcatacttttctttagattatttcctattatccttttaatgtctgcaggatttttagtgatgttccactgtcactcctgatattagtaattggtgttttgcctttttttgtccttcatcagtcaagataagggtttctcaattttgctaattttttcaatgaacatatttttattgatttttctctgttgtttatatatttatttactttattcatatacttattttcctctttttgcatactttgcacttcattttctttttgtcagtcatcctaaaatgtaagctgtatcactgatttttaagtaattcttcttttccaatataagtattctgagctatgtgttttcctcataggattagtttaactaaatccaacaaatgttgaaatgtcgagtttttgttattattaagttcaaaatactttctaatttctgttttcatttctttttgacctaagggttatttcagtgtgtgttttttaatttaaacatgcttggaattttccagatcgttttactacattatatatgaaaattcatttgaattttagagttggctttatgttcactcttgatagttatttgtaacatttcatattgtcatttaagtttagctaatgtaaaaaattagaaaaaaagtctgggagcaggtatctccaacttagaactacctgagagaactacattacggagtggagaaacataggtttttgttctagatagacctgggttcaagttccggactcagtgctggctgtgtatatgaactagtacaagccttccttttcttatccttcaggttcaatttccagggtatctgtgaaaaccgagggaatggggaatgagagctttgccacagtgctgcacacttgattctaatttctaatcttttatttaattctgatgtgtccaaagaacatactttgcatgattttattctttttaagcttattggtacttaaaaaaaaagtatttgcagactgcctatcttggtaaatgtttgatatgcatttgaaaaagacatatattttgtagtttcgagtggtgtccagtaaatgtcaactaagaaaattggtgtcagtgttgttcatgtcttcaatatccttctgatttttccaatatactttgttattcagttattaaaagagagaatggtgttgaaatctttacatataatatggatttttccaattctctcttcagttctgccagtatttgtctcatgtattttggaactgtgatatttaatacatgcttatttaggattgacaagtctttttcatgaattgactcttaaattgtgaaatgtccgttttttctctgttaatactctgtgtctaatatgaatgtagccattccagctttctttttttttacttttttaattaattaatttttttttggtagagggacggagtcttgctctgtcgcccaggctggagtgcagtggtgcgatctcagctcactgccagctttcttataattagtatatgttttttccattattttattttacctatcagcatctttatgcttttatacttatactttatacttaatgtatgtatcttatttacagcatattattgggtattggatccaatctgatcatttctggcttttaacttgaatgtttaatccatttttctttaattattaatatgactgcctttaagtttaccatcttgctatttgttgtccacctgtctttatttttatctcctctagactaattggtattttcattgtattttattttatcacttttttgagcttttggctcttcctttttgtttggggcttgttttgttttgtttcctctagagtttataatatttttcctaaacttatcagttgatcttgaattaatcactttacatattttatgagaaacttactatggcgtatttccatttcttccctcccatcctttgtgttgtgctataatacattttggttttgcatgaattacagtgtaccaacatgtattgtgaaagtttggctttaaataactgtcttctattaagttaagaactgatctttttttaaatttatttgcttattttttatttctgacactatccattcttggtaacattttaatctgaagaactatttaatgtttctggtacatctgctggtgacaaattctctcagctttgttttaatctgaaaatgtcctatttcattttaatttttatatttcaaaactttactaagaaagttttcaaatatatggaagattttaaggaattacacagtgagcagtaatacagcctacctagatcctaccattaacattggttatctttgctttatcacatgtctattcattcttctgccagtatatcaatccatcttattttctgatacatttcaaagtagatgcagacatcagtaaacatttaagctccttatcattatcagtgttttaatatttatttgtaggtttcttttctaggtaaaatttgcataaagtaacaaattgcataattcaagtgtaccatttgataatttttgagaaatgcatatatatatgcattacctaatatcctattaagatatagaatattaccatcaccagaaagtaacattcttccccttatcagtcaatcctttctacccccaccttccccacctccccaaacaatacaactgtttttatttccttttttagaatagttttttttttatatattctagaactctgtgtatgtggacccatacagaatgcgctactgtataactgtaccttcactcagcaaatgttcttgatattcacccatgctgttgtgtgtatcaggcattttctccttttgtttgccatggagtggttttgttttgtttttgttttgtttaagaatgcagaatgatttgtttattcattctctgggtggtgaacatttgggttgttatcagttttggggtcttttgaataaagcttctgtgaactttcttatccaagtttcttaatggactaccgcttttacttctctgagatgaatacctatgagtggaattactgacttagttttatcagaaactgttagacctttttttttccccaagtggctgtatcattccatattccaccatcaacatatttacatcttaaggatttggtgttgtcagccttctttgttttagcaattataggtgagtgtatggtggtatcttactgtagtttaattcttcatttccctgatgtctcaaaatactgagcacttacacctcatgtgcttattggccatctgtatgtattttttgatgtgactgttcaaacattttgttcattttataaatagtttgtattttattattgaatcttagctgttcttcatctgtcctggataccagtcctttgtcagacacatgttttgcaaatacttttccccagtctgttgcatgacaatttgttttttcgtgaagtgttttaatgagcagaggttctcattttttatgagatgtaatttattaacttcttctttaatgattattaatttctgtgttctaagaaagctttgcttacccatagtcaggaaggttcacctttgtttaggcctatagtccatctcttttcttttttttcatgaatggtgtgtagtagaaattgaagttcagttttcctttcataccgatatccagttgttccagcacaattaattggaaagatttttactttctcattatgtttctctggtgcctttgtcaatattttcacaggatatgttgaaagtgtatctatttcttttctttcagccctttaaggtattccattgtctcctggctaatattatttaaaatgcaaacggggcagtttttgttgctgctgttgttcttgtttatttttgtgccctttatgtatttgttatgtttttctttggcagattttaagatcaccttttctttattgattttgaaaatcaaattatgatggcctgtggtgtcctttgtgtgtgtgtgtttcttacttagagtttattaaacttctcagttctatgtgtttatatttttcctttactgtgaacaattttcagccattttcttttcaaatatgtctagctttccccctcactctttctcttcttttagtactccagctgaaattaggatagaccactgctatccaattagtagtgccccacagatcactgatctcgttatttttatttcttcctttttcatccttttccctgctctgtgtttgtgtagtttccaatgtatgctggccattttctttgtgatgtctaatcgatagcattttctttatttcagaattgtatcttttagcttttgaatttccatatcttcattgaaaggtccctattgatattttctatttgctgttcacaatgttcatggttttaaaaaaattgaacaaatacacatagaatactcatttttaggtgtttatctgataattccaccacttttgtcaatttttgttctgttttgattagctatctttttattagctaatatagacttttttgcttttttatatagctttttaaaaattatatgctggatattatggatgttacaattttgagttctgaatttcgtaagacagtgttaaattttgttctagagggtaattaaattacttgcataactgcttgcttttaaaaaagcatcttatctttgttaaagcaggtctaaaatagccttttctgtaaggttagattggacctacttctaaagcatgtcatacctgaagtctctaattaatactggggagctaaacacagtctcttcactctgagtggcctgtacccaactgtctcacagcccttcatgtgctcctagagttgatctgttcccagctattctttgcctaaccttttaaagtattcccccaaatatgtgtagctttgtatttggccgaagactcgagataatcctgtgcagatttctagagttccatctctaaatagttctcttctctataaatgcaatctgactcaacagcagccttgaactctcatttctatctctttagctcagtgtgaccactttctcattttggctttcccttctctgtgccacagtttaaaaggtgcctttaatcgaaaagccagagtgatcgtagcatttacctcttttttgtcttttctctcacagatcacattcctgtgttaccagttgtccaactttttacaaactgtattttagatatggaaggaaggctagtccaggactagttactcctttaagaacagaagctgaagtccaaagtgcacatgttttaacacactataatagccaaatcagtaacatctgcgagttaatttagtcataggtctctgatttatcataattttaataaagcattccctttgtttacaactcaggagaatggtcattaccacagttccaaaaattatccatcagtcccaataatttagaacggagtagccatgggttctgtggcagggaacacttggaggtgcaagcagctggcatttagttgggacatgcagtggatggcaaggctccaactgcaataataaagatgacggaaatcactcagatttcctagagaaacgtgattgtagagcaagaactcaaaacagggaaaatgccaagagctaaccaaggtggttacctggaaatttgggctttgaagccagttatttacattgaactacaaaagggatggaaaaaatactgatttaaggactaacaaccatcaaggagctaaatctggctacatcctgaatcagaatattagtaaaatcaatgagagaagtttaggagtccagtttggtcgtactacatcatgtctttctgataggaaattctttttttatttttatttttatttttttgagacagagttttgctcttgttgccaaggctggagtgcaatggtgcaatcttggctcactgcaacctccgcctcccaggttcaagcgattctcctgcctcagcctcccgagtagctgggattacaggcatgcgccaccacacccggctaattttgtatttttagttgagacagggtttctccatgttggtcaggctggtctcaaactcccgacctcaggtgatccaccggtcttggcctcccaaagtgttggggttacaggcgtgagccactgcgcccggcctctgataggaaattctttagtctggcattgcatcagagtgaaatctttttgtcaaaacacctgagggtccagctaggcagtcagcaaatgtagtctgagggtcactctttccctgtaagccagcactgctttacctgaaagccctgtagagaacctcttgcatgtgacttaagctatttagaaaatccagctagtagattatttaagagttcgatacgttaagtagcattaatgactcctttttatcaagattgctctacaaaatacagtctgtaaatatgacaaatgactgtatgacacaaaacagaattaaaatgccccattagaaataaaatgggcagtagtaaaatgaatgaggcaggggaaatttatgagggtaattgatctctcggtcattaagcaggctctctattggcatttaacaaaaatccatttcaggtacgtgcagccagcaacaacctccacccccattacaaaatgttcatccagagagagccaaaataactgagcaaataatgaaaataacagtggaaattaccctgttgtactgttaacataacgtactcagaaataccaaggacacagtgattttcatgccagctatccaaatagatcttagtaaactttcagcaactgcactaacacagcttctggaatttatgatggagttttcttgttttaaggtgccattattcatggaaggagtagaagagtacctggtaataattttgcactgctaagtcccaggctatacctgtggcaggattaatatccccagtttaggataataaaatcaaaactctatgattcaccctttaataagagaacttcaggttcagctccaggctgcttaccattttctgctttgaatagatgcctttttaaaaagtgatttcctggatgtgaagctgatctgcctgcaacatctgtcaccccattgatcaccagggtagattcagcttatctggctggctaagcgggtgtccccttcctccctcactgtttcacgtgactccttcccgaagctgcgcactcagtggaagaggacgaccatctgcaatagagggggactggtcttttgtcaagggtataggagtagctgtgctcccctgctagaacctccaaacaagctctcaaggttcataaacgtgattctatttcaactgttgtatgatcaataattgagcttcatcgtgatggtgttcaaagatccccgcactttggagtcagggagcctctacagcaattccagcttggaatgagattcttctaagctgtgtctcagcaaacatttaacatctacaatgttctaggtgcttacagaagccttccctcaccaccttatgcagtacaccgcccttgccccagtcccacccttcaatcacctctatcacattaccatggtttatttctcttatagcactaatcactatttaaaattaaccagctgatttatttctttacatatttactgccctgaattagaatattagccacaaaagggcagagaccctttccgtcttattcaccattgtatccccagaagcttctggcaaatggtagatgtcaatagataataatcaaattgactaatacacaatttaagccactcctgcttcagacccagtaaatatactgttcctccttcaaacacttaaacttcattatcacaagctaataaagcaactaaataaaattgtgaaacataatttagtaatagacttctaaatatcccagaagtgtaaaatcttatatgtggaaatgttcattgagatactaggcattctagggatatcatggaagaaaaagacataatctctacctgaaagactgtaaaggtatagttaatgagagggagtgaagaagctgacctgtagacaaattacaatataataagtaatgctgtaatcaaatgataaacaaagggaagagtaaaaatttctacacgggagagccaggtttcaataaaaattttattctataaaagcttatataaaataatgatattcgagcatagacttggaaactaaaaagagaaaggacttccagccagaagtcacagcatgagaaacgggcatcatattaaatcttcctgatgtttttgatgaaaaagcaatggtaaatgagaaaggaaggaaggtggttagtaatttggttgtgacagaccttgattatagggctaatgagttaagatctggtttttaagtactggagaattacctcactctatttctgatacttccaaagaaactgcaaaggtgcctaaaatataaaaaataagtagataatgcagaaatctgttcacaatcagatattgcaagttcacctctagaatatgtactgaagaactgtgaacatgggaaataacttccagaaccaagcatattcagcatctggtggatgtcctttgcttttgcacagtgaaaataatgtttttgaggccgatttccaagtagaaaggaaagacaattaaattcctttcatactacactagacaagagaatgaaactatagtggaaaaatattgagatttttactcaaatcagctgcatcaacaattaaaattctaccaataccgtggacttcttcaggtagcaatgagaactccatcccaagatatggaccgaggatggaatgataattttcaaaaatatttgtaaggaggtttaggtgtcaaattgtgacttgaatttgatgaccttctaagcccttcctgatgttatgattctgttttaatttatatattgtcaaagactattcaaataaaaaacaccttctatgccaggtgctggaaacaaaaagataaacataacacagtctagtattttaaaatagtgctaaactctacaatgttatctctgattgttcatacataggcaggtgcatagctaagctgcttggcttatccagctatttgccgggatggtgggtcactgtggtcaccacacagaaatcaattctgtttctttgttgttcattccagtgccagctccaagatacacagtggaactggcttgtggttttggagccacagtcctgctagtggtgattctcattgttgtttaccatgtttactggctagagatggtcctattttaccgggctcattttggaacagatgaaaccattttaggtaagtaacagaaatttgacataaacctcttctactgtcatctttagaacatatgttgtaaaaaaaagaaaaaagaaaacatgttgatttgaaaaacctagattaactggaagatttaagcagattaactttaatttcaaccgttgctattagaaatctttccgaagattattattctattttcttggattaattagtgagtcggtctaaattaacaccctccaaatagaaatataatgcgagccacttacctacttaaaatttcccagtgaccacattagtaaaagtaaaaagaaacaagtaaaaataacgaattgactaaatatatttataatactattttttagcatgcaattaatattaaaaagctaatgagatattttagtgttttctttggtactaaaaatgttcaaaatgtaaaatgtattctactttatccttatagcacatctcaattcaaaccagccacatttcgagtgagcaatagactcgtgactcgtggctgctgtattggacagtgctgatccacactccttgtactcagatagagatctgtgaaccagcagcaacatatcacgtgtagcttattagaagaagaatcttagacctagcccctactgactcagaatctacatttaaaccatattcccaagtgattcatgtgtacgttaacatctgaaaagcacagctctagtgcaaatttgcttagtgaaaagaatagagcatttaaacatacaaattcataggtccaccccataaagattttaattcagtaggcttatggaagaaacacggaatcgatagtttttaatgagatgtgatttttctaattaagcaacttcgtgaaagattggtccattaaatctaattatatttttaattttagttcttttcagatataaataattcaggcagtttcacaaggttttactcaatttgtaattttaagatattaatgagtgataggcttggacaggaagttgaaattttctctacagtgttaattgccagtacctatgatttaccttctggctttgttaatttacagttgaatgggacaaacctcactctttttccactgtaaagcaacctgtaagatgagagttgaggatatatcagataacattcaaaattacatcttcaaatagtcgttttgcgtggagacttgttgcaagtagaaaatcgcactggaatctgtcacataatgaaaatgtctaatatgcagaagttagatttaagaaaaatgtaatggtattgagaaactttcctaatttacattgtatctgtgttccttttgctagatggaaaagagtatgatatttatgtatcctatgcaaggaatgcggaagaagaagaatttgtattactgaccctccgtggagttttggagaatgaatttggatacaagctgtgcatctttgaccgagacagtctgcctgggggaagtaggtatttcagaggagtacaaatgatgctaccttgaaaggcagacagaatcattagttttgcattatgggagagagtcatggcacagcatctttggatatttaatgtccgatgctctttgatgtaacagactcctctagaaataaaactacgttggaaatgtatactattcaactcagtttatggtattaaaatattttcccttgcaatctttcagagatgcatgtcagaaaagcatggaggcacagtggattagagctctgttaaagggccatagctgtaaacatcctgtttattcacatttagatttttcggtttaggctaatctacactggttggtctagaactgttttacaagactgagaatttttttttaaagcagttttattttggttttagaaagacagaggtttacttggttttactaaaagtgagtggcggaagagtgtgggtagaatttttccttatgtgattcactgataataattacagtattttcctgtggcatttgctcttttttttccccctcacttttcttttcaagcaaaatagtgctactcaaattccccttttccttgggtctatttcttcttcctgtcagcttatacatttgagggttactttaaaattttataatagccagtgtaactagaaggtttaaaaagaaaggaaatgcctaaattcttgaatgtgttaaaataaaagtacaactcctttttagatccgcacagtaacacacaaagtaatttttcattggtgtctttttaataaatatataagttacattcccaaacccactgttaaactttatcctgttgaaatgcttgtaatatatctaatcataagcaagacaaaccaattttactcctctaaaatcctgtctacattcatcatttaacagtttttttttaaatattgcatggataattgagatagacttgaaattttattctcattttgatttagttggatcagttattttatcttcccaatcatcaaccaaaagtccatcataagatgtttctttcagtataatttttccaggaagttatgacttaattatacagttaaaggataaattccactcattttaatacttaatttccccagtcatttattcacccatttatttgttcgtacagccattcaataaatacttatctaccacggaactgggtaagaccctccaataggggttgataattctttgaagaattcacattctgcataattactcttgcatcttgcatttgttagttagcttttgcttccttttttattctccctgccgctcttacccaatcttctttgactctgggtctcttgccatgcttgcacatgctcagcctccagtgccactgcttggaacacacaatcattcctggattctcccccaggctgtgcatgctagattttaatcacaaggctttccctactgtttctgaacctgtgaagattaaggggcaaaatgacttcataaaggaatatatcaagacatgatataagtttccacaattctagtaagttacctagagttggcaaccatctgaaacacaggtaaaggactatgcaatcctcgataagcaactgtgaggagatggattggttccaagaatttagtgacagaaactaatcagggcccttgacagcagaataaaattacatggcatttccagttttcctgctttttcttcttttttcgttgaagaaagcatttgcctgttagtgcaagtagacacatcatctagcagctgccgaaacacatagctttatagtaatggtcggagtttgaggagaaagatccagcgattaatttaggctccaggggagaaagaagtagaaagcccaccgaggatgtgttaccagccaaaatgccattcagttggctagattttgttaagcttctagtctaaggacatagtgatgttagagtcagagaggtatccaacaatagagagggactttcagaagatgaaggtctctaactttgttgtcctgtcctagcaaaagataaaattctatttttttgattatataacatatacctttttgagtgtccattggtactagagagtttatgcatggtgcatgggtttctttggtgaagaaagggctcatgagctgacgtggctagaccataagatgccacacactttaaagaaactgctttcagtataatgtgtctactccttgtgtctcaagtgttgtttttgaagatcaaggtcacaacactatactaccttttggcttcatgcctgtttggaattctttttagaaatatgtgtatatagtttctgttttccctgaagacagtggtatttaacaaagagagtttgcaggtataaggattaagttgttcacatttttgctggtaaaatgtttcacctcaattcttaggctggtaccctaagttccctacatttgctcctcaagcctcaatgcttttggggagtttttggccaacactaatccccatggttgttttctttcccagttgtcacagatgagactttgagcttcattcagaaaagcagacgcctcctggttgttctaagccccaactacgtgctccagggaacccaagccctcctggagctcaaggctggcctagaaaatatggcctctcggggcaacatcaacgtcattttagtacagtacaaagctgtgaaggaaacgaaggtgaaagagctgaagagggctaagacggtgctcacggtcattaaatggaaaggggaaaaatccaagtatccacagggcaggttctggaagcagctgcaggtggccatgccagtgaagaaaagtcccaggcggtctagcagtgatgagcagggcctctcgtattcatctttgaaaaatgtatgaaaggaataatgaaaagggtaaaaagaacaaggggtgctccaggaagaaagagtccccccagtcttcattcgcagtttatggtttcataggcaaaaataatggtctaagcctcccaatagggataaatttagggtgactgtgtggctgactattctgcttcctcaggcaacactaaagtttagaaagatatcatcaacgttctgtcaccagtctctgatgccactatgttctttgcaggcaaagacttgttcaatgcgaatttccccttctacattgtctatccctgtttttatatgtctccattctttttaaaatcttaacatatggagcagcctttcctatgaatttaaatatgcctttaaaataagtcactgttgacagggtcatgagtttccgagtatagttttctttttatcttatttttactcgtccgttgaaaagataatcaaggcctacattttagctgaggataatgaacttttttcctcattcggctgtataatacataaccacagcaagactgacatccacttaggatgatacaaagcagtgtaactgaaaatgtttcttttaattgatttaaaggacttgtcttctataccacccttgtcctcatctcaggtaatttatgaaatctatgtaaacttgaaaaatatttcttaatttttgtttttgctccagtcaattcctgattatccacaggtcaacccacattttttcattccttctccctatctgcttatatcgcattgctcatttagagtttgcaggaggctccatactaggttcagtctgaaagaaatctcctaatggtgctatagagagggaggtaacagaaagactcttttagggcatttttctgactcatgaaaagagcacagaaaaggatgtttggcaatttgtcttttaagtcttaaccttgctaatgtgaatactgggaaagtgattttttctcactcgtttttgttgctccattgtaaagggcggaggtcagtcttagtggccttgagagttgcttttggcattaatattctaagagaattaactgtatttcctgtcacctattcactagtgcaggaaatatacttgctccaaataagtcagtatgagaagtcactgtcaatgaaagttgttttgtttgttttcagtaatattttgctgtttttaagacttggaaaactaagtgcagagtttacagagtggtaaatatctatgttacatgtagattatacatatatatacacacgtgtatatgagatatatatcttatatctccacaaacacaaattatatatatacatatccacacacatacattacatatatctgtgtatataaatccacatgcacatgaaatatatatatatatataatttgtgtgtgtgtatgtgtatgtatatgactttaaatagctatgggtacaatattaaaaaccactggaactcttgtccagtttttaaattatgtttttactggaatgtttttgtgtcagtgttttctgtacatattatttgttaattcacagctcacagagtgatagttgtcatagttcttgccttccctaagtttatataaataacttaagtattgctacagtttatctaggttgcagtggcatctgctgtgcacagagcttccatggtcactgctaagcagtagccagccatcgggcattaattgatttcctactatattcccagcagacacatttagaaactaagctatgttaacctcagtgctcaactatttgaactgttgagtgataaaggaaacaaatataactgtaaatgaatcttggtatcctgtgaaacagaataattcgtaatttaagaaagcccttatcccggtaacatgaatgttgatgaacaaatgtaaaattatatcctatatttaagtacccataataaatcatttccctctataagtgttattgattattttaaattgaaaaaagtttcacttggatgaaaaaagtagaaaagtaggtcattcttggatctacttttttttagccttattaatatttttccctattagaaaccacaattactccctctattaacccttcacttactagaccagaaaagaacttattccagataagctttgaatatcaattcttacataaactttaggcaaacagggaatagtctagtcaccaaaggaccattctcttgccaatgctgcattccttttgcacttttggattccatatttatcccaaatgctgttgggcacccctagaaataccttgatgttttttctatttatatgcctgcctttggtacttaattttacaaatgctgtaatataaagcatatcaagtttatgtgatacgtatcattgcaagagaatttgtttcaagatttttttttaatgttccagaagatggccaatagagaacattcaagggaaatggggaaacataatttagagaacaagaacaaaccatgtctcaaatttttttaaaaaaaattaatggttttaaatatatgctatagggacgttccatgcccaggttaacaaagaactgtgatatatagagtgtctaattacaaaatcatatacgatttatttaattctcttctgtattgtaacttagatgattcccaaggactctaataaaaaatcacttcattgtatttggaaacaaaaacatcattcattaattacttattttctttccataggttttaatattttgagagtgtcttttttatttcattcatgaacttttgtatttttcatttttcatttgatttgtaaatttacttatgttaaaaataaaccatttattttcagctttgaattttattttgtgcatgtgttttatgtcatttggtcatttggtcatttcacatttggtcataagtgaaaacagaaagaatttattatattcacaaagaaatataataagttacattagttaagtgtctttctgagataaatctgagtaaaatgggaacttcttatcaagaacattttctttacatggaagtaaaagttacttaagtaaaatgaattgttccagaatactaggacatattttatgggtgtatatgtgtttatgtgtgtatgtgtatgtgtatgtgtatgtgtatgtgtgtatgcagagagacagaaagactgtcaaaaagatggaaagatacagagagacagagaaaaaggagagaaagattattttaatacaaaggaaaacaagcttattcctttttactcaacttggaacttaggtcgtttacaggaatatttttcatctaataggctttaacgcaaccacacggtagttgctttggaaatagataaaactaatgccatgactttagttaattgatgatcatttgaatcaaagatgcatttctgttacaaattttgaataaatcagtgattaatatttggaaacatattttattttcggttaataatacaagtccatagtgacagggatgcctttttgctttaaaaaaaaaaatccctggccaggcgcggtggctcacgctgtaatcccagcactttgggaggctgaagcggatggatcaagaggtcaggagatcgagaccatcctggccaacatggtgaaaccctgtctctattaaaatacaaaaaattagctgggcatagtggtgcacgcctgtagtcccagctactcgggaggctaaggcaggggaatcgcttgaacccgggaggcggagattgcagtgagctgagattgcaccactggactccagcctggcgacagagcgagacttcagaaaaaaaaaaaaaatcctatttgttcattttactgagccctgtaacatgctcagaattggttagcttagtaaaggttcttctactgaagaattaattttccttttgcaaaccagccccaaaagtgtaggcttaggatcaacggatcgaagttacaaggcaacagatttctgctcagttagaaaatagctgtaaagcagagttcgacactaatggaattcactatctttggaaatactaggcctgccattaccagaggtatataagcatttatttgatagattttcattgagattttgtatatgagttttttgcactggataagtggttttgagtctgaagttgtttccaaccctgaacgtgttaagtgacctactagaacatactggtgactctttggaagattcaacttcagcattttgcatatgatctacctggctgtgattaaccttccttaaactctcaagatttttttttccagtatatactgatgtcactagctctttaacgcaagtaaatacacagtatggtatgagagacgggtttagcaactagtctatcttatttctctgtttctactcaaggaatataaagtaaccttagtaatgagttaggagatggagtgttttagtagtaattttaatctacatctatttaaaactgaatagacagaacttttacacactattactcttataaatccacatagtaagatgatattttaaagttagcattaataattgatacagattcaataaacattagtccatatatgattttactattgtgttcactagacgttgagcaacagtaatttaatcaaagtgatttatgcaatgtgtactgtgtgctagaaattcacatgtaggcatctaatttgtttatcagccctacgagtttactttatcatatgcattttatagatggatgaactaggactcaaaagatattaagatacaaatagggataaatggagaaagcaatatttgaaaccacattcgtcttccaagttaaatatttccttttttctatacttcaagttttaatagagaaaatgaaagagacagaggtttgctgttcttttatctactaataactcatccagaggagaaaaaaaaaaatgaccatcctagttttcttctaagtgaactccatggaagttatgacttttacaggcaagagtattcttgagtattgaagagttctcagtcatacaacatgacttcaaagccaatttagtaccacacaagaaaacaaatctcattattatatggccatacctcattttttgagccaaacagaataaatgagctaaattactactcctccaagtaaactttagcattaaaaataatagctcctgtcctcaaatatgaagttttggcaatatagaaggtattttaaaaatatgcaataaagcatgcaactccctttacagtattaagtgaagatccttcggtatagcccaggacctttctgagaagcatctcctacatgtgtttctcaacgtctaaaattccgccactcttacctgcatttagcattgtcctctttcaaatctaaacttcctcactttctggatggagtaccaataaaaaaattaaagagcaacagactcaaaagtcattttttaagaagatctggaacagtgtttgttgtattttaaacaacaatattcctattggcaaaaacatacattttcctaaggtgactgttttgaagtgaaacatcatatcacacacacacacacacacacacacacacacacacacacaatttgcatgagttctctttgttgacaagctagccatgttgccttaaggttatttcacatttctcaggagccaggagaagcagtagacttcccactttcatattctctgatttatgagaggcagcctcttaagattctgagtaggactagaggggactgaggagttgctaaaacacatgcacatgtgcacacactcgtacacacagaagggttttaatgataaacgagaatttaaatttatctcttaagaatgaatgaaacaaaatgtctctaaaaacatttttgcactcctgcttaaaccaatcaaaagttctcaaaacttgagcacgtgtctctccaatttcccttcaaattcatgttaaatccactgattgaaaaaaacaaaactataatctgtaagaagcacagctcccttattccctgtcaagttcacaatgaccaatgcaaactttcagtctgtcttccaaggctgaaaactctctccgttactgtttcgtccctggaccaaaagcagaggtgttcaccctcacacggtgactctggcacatgttttcaaagttataaatggctaggatttacaattttgaacctttttccttcaggatatggcatgttctaagctcctaaatctcacagtgagttaagcattacatttatttgaagaactttcccttgggatctgtccaaatccactttgataccattagaatcgaatggtttgccagaagtcttagctacttgactaattcttacccattttcattgtttttgcccctttaattccaattcttcacacacagacgcacacacacacgcaccacacacacagaaaaaagaatttaattgataacaagataaatactatgaactactatgaactgtccgatgttgtgtccaaaaatgttaagtatcaaaggatataactgagaatcttaggaggtgataattcctgttgctctttgctgatcagactatgtcaggagcattatgttcactcctgttcataatactactcttagaagacacatctataaactgaacattatccagaggaaaatggtaaacatgcagaggagacatgaggccatgtcatttatggaataagagaaatatcctgaaaatatttaatccagacataagaagaaaatactacaaagatataaaaatggttttcaaatattctaaacatttaaagactcaagatctgaccaccagataacatttgcgaggaagaagatttcaaaacaagaaataatttgtaaacagagctgaaatgacttgcttttgatggtggctaatattttgagggtagttactcaattgcccaccgtgtgtgtgtgtgtgtgtgtgtgtgtgtgtgtgtgtgtgtgtgtgtgttttaagaaagacttattgaagaaggagactactgcaatgagggttttgcagtaggagagagagactgagctcaactaccataccatccttgaaggcagtaaattcttagcaaccattgacaagagtggtgtagatttttttgactgggtaaattattcagcactgagattctgtcatctcaagtgtttgttcattccctgtcctctggaggatggacaataacgaactggaatatatgtaagttttcactatacattgtcctatatttccattttcctatagatacagtggaagcagtttttgatttcattcagagaagcagaaggatgattgttgttctgagccctgactatgtgacagaaaagagcatcagcatgctggagtttaaactgggtgtcatgtgccagaactccattgccaccaagctcattgtggttgagtaccgtccccttgagcacccgcacccaggcattcttcagctcaaagagtctgtgtcttttgtgagctggaagggagaaaagtccaaacattctggctctaaattctggaaagctttgcggttggctcttcccctgagaagtctgagtgccagttctggctggaatgagagctgctcttcccagtctgacatcagtctggatcacgttcaaaggaggagaagtcgtttgaaagagcccccagaacttcagagctcagagagggctgcaggtagccctccagccccaggcacaatgtccaagcaccgagggaagtcctccgccacctgccgctgttgtgtcacctactgtgaaggagagaatcaccttaggaacaagagccgggcagagattcataaccagccccagtgggagacacacctctgtaagcctgttccccaagagtcagaaactcaatggatacaaaatggcaccagattggaaccccctgctccccagatctcagcccttgctcttcatcatttcacggacttatccaataacaacgacttttatatcctataattactgtgtgtggtgggtggtggctactatctctaccaaccctctgtatgtcatgaacctgtgggaaaatctgacatttttatcatctaatggactatcagatttctgtcccctttattgatttttaaaaactatttatttctaggagacaaaagacctgaaggacctgaatccagaattattgcctctaaaggcctcagaagagcacactcttcttgggccctagaaggtcagtatgtgaaagttgcctaaagtctgatcctctatcttgtccaatggtttaaaactgagctaagaatttaaatgtgtttcttttcagtgagttgatcaacctcacattataagtcagtcaggtgtacttgggctatgatgcttacagggtgtatgcattcccagggagcagcatggaaaggagctggttctggtggaagctgtaggacgaagctcaacagaaaacctacagcacatttttcctcaaagaaccaaacatacccacccagggatacatggcgttctctgtctcactgtaaactagtgttctctaaactgcctaacattgttagcatcaataaaattctatttttacgtca

SEQ ID NO: 26 - DNA, 11057 bp, Homo sapiens
gcatttcctattgagacccccaagagttcccctggccgtcggctccagctcggacttcaggcctttttgtgtcctgtttgctaaaggcatgcgggctacagcattcaagagagggagtcgttaacaaagggaaagagataaatgtaaataagctcacatttacagaatgagcggtttgcagtaaaaagctgcggcagcccagagtctgctactttaggctgggctaacctttccctgtaaaaaaaaaaaaaaaaaaaaaaaaaaaaaaatggataaaaatatgcacttccaaagggcgagttgcccatttacatgtttattagctaattatctacaggcatcagcacattctctcatctagcacactctttcttggggtaagtttctcttttaaaaagatttgattttggcgtttgggggtgggggatagcataacaaactacagtggaaacactgatgctttgagagtgtaaggaaagaagttagacttcaactctgaagtactgaacaaggatcttcgtgatgaatggtaaaaaacgagaatttccattgttttggcaataatattgtttccgtggaagacatacaggattttcaggctgctgtttcatgtaaacacagttgttctaaagagctaatttaaaatcacagtgtagaacaatttagaaagtatgtcgactagctttgtatttctttggtttacagtttattgtgcgctaacgtggcttgtattatgatgaggtttcttctagtaaaactatacatgacatgtctttgatgcttaattgatttatggagaatgtgacatttgctatattgaataattcatgaacttgcccataaaggaagaatcatgtttgaatgaaaaactctgtcataaactgaatttgcaattatatgtgaaattaattgctgtttgccatacaaatgcatcaatgtgtcatctttaaactctcttcttgtaaattttaaatattttcagtaaaaaggtcttattgagttgctaaatacagtatttcagttaccttttaaaaggaaattcagcaatgtaatttatcattatttcagtgtggaaaagaccagacaaattcaaaggttagaatatttcagagcttggtggggttattcactttgctaccttacaaaattataccatctttctttatcttgactaacataaagacaataataataacctgagatccagattacccaatggctttgcaacacgtttatttttcagaacaaaattcccaacatcatatcccatcaacatagattataaaaccttttgccttgtcacagatgaaaagttgcactcttgccaagaaggatgagttcacctgataaacttgatggcatctacattctaaagtctctcctgccaatcagagatgggaatgaaagccttattggaacaatcaggccagtctttcagaatgtgtgctctctgcaagttaaagggagaaccaggaagatgcctcacagaaacattcaggccaagcttagctaaagcttgatctattcaattgccttttgggaaaatgcagtgagaattgttgcccttgctgtggtttgttcagcgcctaattgtgtagctaccttttgtctgtgtatatggtcatcacatatagtctgcccttggccttcttgttgggggaagaacaaaacctgtaatgtgtttgcgaatattagtactgaaaattgggagcccaataaaaggttacctaccactgggaatccacctttactttaagcggataaataatcagttatcagaacaatgtaacgggtaaatgatctaatgattctacatggttatgtcctgaaatatgccgataacctcatattctgaggggtgaagtgaccaggaaacaggtgggaagggttgagggttgagacctaaacaattagaggtgatatgcctgctgaaatgagcacaaggacagaggatgaggaaaataagggaatttggaagactttaggatattagtggcatctttctctgtgattcttagcttccggtattaattaatactatttatttctaatattcaaataaatctagcaatcatttcattaagtctaataaaaattaatgaccctccttgcttgcagactttgaggaaataaaaaatgttttacagtggccaatgtaagcaggtgaaaataaatgatggaaaagaacagccagtaaggccaccagcatggcactcattgaaggttgcttttctgtcagtcaagactgaagattaaaggagaagagaaactgagactcagaaatggactgtgacttgctctcacagagctcgtgatggggctggatgtgtctatatttaattaatatcagttataaaaacttctgggtatttgaacttcctaatttgcttggattttgaataaaaggttttttgtataatcgttatcaactgtgaaaggcataaaataatgttaatgcttctgttttcctttacgataaaccaataaaatggaataaaatattcatttcattccaggaagacagatttctggaggagtgtgaaaatcaactctccttaatattaaggtgatctcaatgtatcttaaattatctaatcattgtacttattttgtttttttagattatagaaaaatcatttcaggagagttgtaatactatttagaagtttgctttgttttaggctacctctgtttagaaaaggatgagatgtaacaatagtgtacgtttggagctaggggatgattctactttacagatggaagcactgtaatgggtaaattctaaatgcggttgctactcctaagaattccatcgcagagtatttctggttttatacaaatattttgtgcagagtttgaattggagatgttacagacatgctatattgggtaggcctaggacatcctggtaaaggtgcagtgattgtcagtcagtgtttgaattgaagccttgatcatatcactgtagttcagtggagagagaaattgtgtggggtgtaggtaaaaaacaagacagtggagtctccacctgttgttccagtcatctttcctcttccctcttcccttattaaggaccctgcccaatggtaacagttgttgccaagaaaagaaaaaaagaaaaaaaaaagacccaatgtaagttcatgccaaaacaaaattctcctttgttttggtatttttaatgtaatgcattaccttatggaagtggaggaaatatttttatgtcttttgtcactcattatctttaaattattataggttaccacatatggattttatgcactagtgtttagtcaatactactaaaaaaatatagcacagcagtgacaggttggaaaatacattgttatctgcaattctgtaataatgaaatccaatgcatgtaaataccattttaaaatttattgggtctcatttactctggtttatatcatataatactttttctgtcttatgatcttctataagatcattttattgaaaatatacattttattgaaaagctatcagctctctttatggcacactattatgactatttctatttcacagcacccattggaggaaatctctaactacagtgcctccaggaaactcattggttattccagtcttagataaaattggtgccaggatttggttcgaactaatgtggtgagtcctaccctcctgaaaattactgaaataataataataacctgaaaatgtgtagagaaactgcaaattcctaatttaattctccaacttttgttgtaacaaatagttccaactttttaaagattgtatcatccgaagatctagaatggatggaggaattgtaatttgttataatccaggcaattttgatgaagatgaatattgattctttagctcaacccctctctgccactgggatttacctttagatatgggagactctttttattgctattatcagtttcagtgtctaagtatatcacatgaattggtgtccaaattgataactgatttacctgttcaaatatatggaataatgtcaaaatcctggctggtatatatgacccttacagaaattggaaatgagttattttgggaacacccaaaaattgtccccaaagatctggggcttctgctgagatgagatattgagtctcaagactcaagacaattttataatattaggttgagcaatttacctgtagttttcttactctgtaactaagtactagggaaaattctactttagtagggctgatgcaatctttggccccatcatgttgagcaccagaccacattatttcccaaagattggactgtgttatcaagtgaagtgttaataagagactgaagtattttttttcttttttgatgaaaagaaaaaaaaatatcaagttaatcactgagaacaggattttatcaaattgaggcccatatcagtttcctgttttcctcaaataaaatggagagacaaagcagccttaataatcttagtgaaaaccagattaggtgtagataagccacttttaaaaggctatttcttgcatcaaaaataaaagaggttgatttagatcaatttcctagctccattcttgagtgaaacatttatctatggttccctccatatggaatgccataaagctaggttttgtttcaaaaactattatgaagcatcaaccaatgtataggaacactgatataaaacctgtatgagtgtgacctatgcctgtgacttgacctagagtcttatctgttagaaaccactaatttgagaagcaacagtctgaacatattccctatcgctccagcaggattgttttgagctgtatttttcacaacatttgtgtatttttaaatctgcttcactgctaagtatctatacataagaacacaatagatttcatcttcctctgaaaactattgtgtcaactttcataaactttgaccagagtagaacaaggaaatgctctggggatcagaagcactctgacctggcctgcgcttattaaaaatggagcaaagcaaaaataattttagtatactctgccttcaaggccttgtcttcctgagctctggactgtcctctgtagggagcaaaagcaagtcagcttttctagggtaccgggcatatttatgccagaagttggagctttgttttcaatgtatgatctgaaagtttagcacttcatgaagtgaagtgatttggttatttatccttatagggccaaaaggctaactttacttcttccaggagccttaaggaccccaaatatggtatacctgtattttactatcattagaaattttttaaaaaagaggaaacaattgtggccactctgaattagctccaggtgtagattgaagttaaaagttgagggtcagatttatttttggtcaacctccacgggacctgcttcctgtccattgtcaataaaaatgcagctacccaacactctctgacacccttaggtgattaattgtcagaataattgggagcagaggtttgcagaagacagtagtttaatgctccttgcagtggaaaatgtaattaactgcatcagcatatatttttccttcttcatttcatctgaagctcaagtgttggtcctttgcctctatttagtgcacaatatgttggctatttaggaagatctaatagttagaaatgctgtttcttttagtcaaaagaaaggaagccagtaagaaaagaggctaatattgattcttcttcagaatcatctcaagagccaaatgtctttctggttttttaatcatacctgtatgggaaatattaccttgagggcacactcctggattgtcctgtttgagtaaattgtgtagttaaggctgaaactcaaggggagctttctgaggcacaaggtatacatgacactagaaggatgtgttcctaatgtgaacttcagtataccaaaaaagacagaaatataaagttacagttgtttcaggaagggaggaagaaacaaacttacataatgtttctctgtagttaggtagggccgaatactagcaagctcataaagcaattcacaagccctattgaatcttcctagctttagctgtgaggcttagaggtaaagtttatacaaggaagagagagagtatagccaagttacagagtgaaccagtgtctgagtcagaaatagaactccttgcttctaatgctgtgttaagtcccagcgccacaccctcacttctagacggcaaaggtggttgtgtgttcaagcaatgggagctatgaatagggccacagtggcagttttcccatgccctctcttcaggattgagaatgtaatgttttcttgtctgtcctttctctcccacaaagtttgattactcagagcagcagagcagaagtgccaggcatttgcaggctgcttgctgtgggtgtaatatatatgttcctggaaacataaaactgaagtgaggggatggatgtgttaattagcttgacataatcacctcatgtagtatacatatattaaaacatcgcctcgtacttacataaatgtagttcaattatgatttgtcagttaaacataatgcaaataaaaaataaaatgattgaaatcataaaaaatctgaatggaaaactggggagatctatttgaaatgtatcaacttgagactcacaaaataatatatagccagtgagctagaatcatgctgtgtaaaaggatcactagtgggcagactggagggactctgggcagaagggaaaagccttccattataaaagcattttccaaataaaataattatactggcagtacttattgtagaagataagttcaagccgatcatagtgaataaagcctgactttaatgttagaggttttgcagtcccataaatgctgttttaactatcattttatatttttggactcttgagtgacctacaccttagttacatttgcaatgctatagtattgcacttattgtattgagtgtgagctttcctgctcctgcaacatactcttgtagtacctttaaatatataatagatgttcaaaaaatacttgtcaaaccaaatggaatgtgcatgttttcttccaatctgggtggacagaatatcttattacacagaaatcatggatggaaggcaaatttgattatttgttccatcttgtctctcataggaggaaaatatttcctaccggtccatagtgtcagagtggtgaacccctgcagccagcaggcctcctgaaaaaaaagtccatgggtgacagaagattcattgacttccaattccaagattcaaattcaagcctcagacccaggttgggcaatgctactgccaataatacttgcattgttgatgattccttcaagtataatctcaatggtgctgtctacagtgttgtattcatcttgggtctgataaccaacagtgtctctctgtttgtcttctgtttccgcatgaaaatgagaagtgagactgctatttttatcaccaatctagctgtctctgatttgctttttgtctgtacactaccttttaaaatattttacaacttcaaccgccactggccttttggtgacaccctctgcaagatctctggaactgcattccttaccaacatctatgggagcatgctctttctcacctgtattagtgtggatcgtttcctggccattgtctatccttttcgatctcgtactattaggactaggaggaattctgccattgtgtgtgctggtgtctggatcctagtcctcagtggcggtatttcagcctctttgttttccaccactaatgtcaacaatgcaaccaccacctgctttgaaggcttctccaaacgtgtctggaagacttatttatccaagatcacaatatttattgaagttgttgggtttatcattcctctaatattgaatgtctcttgctcttctgtggtgctgagaactcttcgcaagcctgctactctgtctcaaattgggaccaataagaaaaaagtactgaaaatgatcacagtacatatggcagtctttgtggtatgctttgtaccctacaactctgtcctcttcttgtatgccctggtgcgctcccaagctattactaattgctttttggaaagatttgcaaagatcatgtacccaatcaccttgtgccttgcaactctgaactgttgttttgaccctttcatctattacttcacccttgaatcctttcagaagtccttctacatcaatgcccacatcagaatggagtccctgtttaagactgaaacacctttgaccacaaagccttcccttccagctattcaagaggaagtgagtgatcaaacaacaaataatggtggtgaattaatgctagaatccaccttttaggtatgagaaatgtgttcaggtccagatatggtttctcctataatttttcctatgctataaactaaagatttgaagctaatgatactgagaataatgcaccaaatccagtcagatacatttgtttgaaggtatactgtagagtttttattgctgttttgttcagtaattataggtcaaatctaattacaacaaccaagatggattgccaaactcttctgcttggttggaatttcattgtatcgcattatccaggtggctagtggcatttgataatatagagatgactttgaaactttcaaaaaggtatttctattccaatgatatttggtaattaggttgggcctataaatatagaacaaattcagggatttttaaaaaattgtgttactactgatatatgctagttttattttatttttttgaactgtcattgagtttattttagcacaagaatatttttagcctaacattattaataagaaatgtgtcaaatttttaacattggtaaaatatgttatgtgcattttgaaaacagaaaacaaattgcgttggcatgtacgtgggtgggaagaaaaagaaaattaacaggatttacacaattataatcaccagcagtgtgagtttaaaaaacttcgttgtttttacaccaaattaaaattttcatgtcaaacttcaaagccagaaagctgctaaatacgtgtctggcaggtaaaagctggaaaattacttaaaacaggaaagtgtcaataaaaaaacttgagcaacaccaacatattttttcttaaaatgtcacgttatcttcattttgggaaactaggttctataaaatatttatcctccctgttatactttggagcacagcacagccagaaaggggctgcatttgtgcccaggtcaggagcaaattgaaaaaaaaaataaagtaatacaaaaaaatcaaactataaagcaaaaacatttattaaaacctgaattaatcctttttggagggaggagtagagatatataacctgaaaatacttattctttcttatcgaattttggagcctaatatagccaggagctgctgaatttgtgcccctggattggaagcaaataaaaaaaaaaaacaacacataaactaaaccaaaccaaaacaaaaaaaccagagaaccccaagaaaaataaaaataaaaaaacctcaacaataatttgtaacactttcattactatttgttgaggttctgtaaatgtaaaaatactatgtcatttgcataacattttgaagcacaacgcagctaccaagtggctaaattcgtctcctggttaggaacaagttgtgggaaaaaaaggtcaaaaatcaaactgcgataaaacaaacaaaacaagcacaaacaaaatttagaacttgcattttctgagcatctgcgaaacttacaaaacactataacattcatataatgctttggatcaaattgcaactaagaagctgctaaaatggcacccagtttaaaaggaattaaaaacagtattttaaaatctacaaaaaaagagaaaatttttttataatttacttaaaccgcaaaaatctttaaaactcttactagtttttaaactaaagtggatatttaagaatattagaacttgtaaatataacttctgagcttgaaagatgctacatttgtgctcaagtcaggagcagtggaaataaaccctcgtatacacacatacacagcagcagcaacaacaaaaaccaaaattaaatgttaaaccctgaaaaacaacaaaaatattttaaaatgtgcattaatcaatttttaaaatatttggataacatggcaatttaaaaatgctaagaattttaaaacaaaacttccaggaaaaatgtatcctgcaagttgctgaacttgtgccagaaagtggttaaacaattataaagcacagaacaataacaaaaaagtaaaacttctaaaacaataagcaaatttttaaaactcattaacttgtttttctttctgatgatatgcagacttaaaaatactgagacttttaagtaaaaatctgttagcataatgtaactttaaaaactgtaaaatctgtgtctgggttaggaacaaagtgaaaaaatgctaaaacaatagtaaaaacaaattcttaaaactggcattactttttcccaatgaaagtcctaaaagtaattatgcattatgtagtcttatgaaaagaggctatagatggaatatataaggcattagattcagttaaataaaattaggttaagataagttcagttgttagattatatggtaagatcaaatcagtaataaaagcgtgaataatcttttgtttctttcagtattcatgtttttccatttcttgttaagtataaaatatatgtgaacatttgtttgtgcccttgcttcttaacattataaaattttatgattatgacaccaaaccatttaatgggatattaactaagttgaaataaaatatattattaaatgtttcttgtgtaatttccatgtttagttttaatttttttatatttcacttctcaaatttccatttttatagttaatataaattgctaataataaaacttgtcacattaacaatgtaaccaagaaaatgtaaagtataactaaatataaaagtgactatgttacatcgaaaggaaaagcaattttgcagctgtaattgcaacttggattttaaatgtttattaaatgtaataaaatatatttgaatta

SEQ ID NO: 27 - DNA, 64272 bp, Homo sapiens
cgataaagcccccgccgccgcggcagccagcttgcgctgtggggctgcccgggctgcgcggcgtctgcaggcgccaccgctgcctctttccggctgtgaccctcctcgccgccgccgcttggctgcgtcctccgactccccgcgccgccgagaccaggctcccgctccggttgcggccgcaccgccctccgcggccgccccctggggatccagcgagcgcggtgagtacaggctgcgcggtgagtcccgggcgcggccggcgctgccctcggcgggggacgctccccggggctccgcgcgccaccggccctgctccctgaccttgcgcccggccgggaagctgcggggccagcgggaccctggggcgccgacgtcggggagcagagaactttctcagcctcccgcgggccgccttggccggggctgggtgctcgccgggcatcccggtcccgcccgccgggagccccgagcgggacccgggcagggcaaggcggggccgccccggggtggcgtccagtgatacccgcagctgggagcaccggggccggcgtggctcctgcccggccatccgagccggccctgaccctgaacctgaggtttccagctgctcgccggcaacccctaccccggacttaggctgcgcgccgccggatggggagagactggcgcactcttacttgttacctctgcctgggcagagggaggtgacgcgcggtgtggggaaagcctttaacttggcctctggcagccgatttaacccgagcgagcaggtctttgctattttcatcatctgtagaaacgggagttgcgaggcggatgagtgactgcaggtaaaatgaaagtacggtactcagaaattctggaaggaattaggcatttaatgtgtccacaaactgagcggggaaggaaggcttctattacataagacagcactccaccttcaggtattatggaagatgctgttgaaggttttagtgttttaatgaacgaaacacattctttgtgtgtgtgtctctggagaaatctcgaatgctgctgtcttgctttggctactttgcaggggacgttcttatatttagcatcagcataaaaaggtgttcgaaggtgtgacttcctctttcaagccaagaagccgtttatttgtctgaattgttgtggaacaatatatgtgataattgtgtactttgaagattttatatcaaaacttgagcacagataactggaagaattgtcaacattgctaatttgtatatcctaaaccacacttcgaaaattgaagacagtttcaacactatctgaaggtctaaatcagtacttatttgctatttgcagtatttcaatagaaaaatttttggctatgcaaatgaaggtactaacctgagtaatctaaggtttcttttaacccccaaattttgattctttgttaaaataatgtttgaaaatatcgtaccatgcagggcaattactgaaggtcatgaaaatgtcatcgtattttattctaaaaacaaaaatgaatctatgcagaaaatttccgtgtcccatgaacttcatattagtttaattttaaaagtactgtctccaaaaaaagctaattttcacttccacacaagggtgattaaataccagtcagagattgtttgaggtggtagagttggaaatgaggtggtgacctggccacgtccctgggtgcatctcagccttgctgtcctcttccagccagttcttttcccatcgcatggggactttggctcttgggctatttctcctcctctagacctaaagtccatgtgggggacgctctagatgcgcacttccttgactgtctcaaatccagtgtcttccatgtactccagctaccaagtcctctaagtacctccaagtcttgccctctcttgagatgctcaacttctgaaaactcttagtgcctccaacccgcaagctccttccttccgggttgcaaaccggactcccactgtaatcttcaatgcaagcgatctccaatgcttttcctcttgcgggtttggcaggtgactttgtagcccattctaccaggagaatagaggtcataagtatctcctcacgtcctcccccatctcccctgtacagacttttctgtgtttacccagtcatccaataaatcttcttaagcatctactgtgtctgggtactttgttggatactcataggtggtaaatagagcagatccttgctcgcttgaaactgtcattcttgtgggagaaaaccaactaaaagcaaacataatatgttgtaaaatgtatgataaatgaataaggtagaattataaagaaaaatcaagttagactgagaacttagagaaatatagagagatggcctccttggggcagtgactaatgtctccagctgtgtcctgaatcccaactcccagtgcctctctctccttgtgagtgttactcccttttcttacttttatcttcagtctctccctgtgagcttttttcttttttagtagtattttaagaatgccttaacctcccttgtccctgcatcctcagctcacctgtagtgacaaccacgtctctccaggcttcttaaactggtctgcccttcctgttcagctctttgcaagctggccagagtctcctcaaagttcaaggcctgtgacttcctgaacaagcaatcttttttttttttttttaatttttattaatatgctttaagctctggggtacatgtgcagaacgtgcaggtttgttacataggtatacacgtgccatggtggtttgctgcacccatcaacccatcacattaggtatttctcctaatgctatccctcccctacctcactccccgccccccaccacaggccccagtgtgtgatgtttccctccctgtgtccctgtgttctcatctgaacaagcaatcttatggatacccactaggtttctccgtggcatttgatgaggttcttctattcctttctgatggtttttttttttttttccatccctggttgccaccttctggttttccttattcctccctggcatctctgctacctcttggggttacccagggttcgctgtcatcccttttgtgctctgtgtatttgggtgaaccatgttcccacagcttcgactctcaccaatatgaagcgagtcccagattggcatgttaagctagcttgagcatgctcctgtgttccaatcagttacctgcagtctggtgcgcttacccgtgccctttaggccaaaaaaacaccccaaaataaatccaaaattgattttagttttcaccacccaccccatatccgcttcattgttagcgaagatttgtccgtttttttttggcagtggttccaccgttcatggagatgttggagcaggggtctcacggtgatgccaggctcccgcactgcccacatgcaggctgtcaccagatcctgttgcttcttcatgctgtgaaattccacaaaggtccgctctagtcacgctggccttgccttgctttagagcccaaaagtggcaaaatggtggccggtgtgccacttctagcagtaggcagcagtgttgttggcctgaacaaagtatatacaacttgagttaatatttagaaatctggagatgccacttggatgtatagcttctcctaaaagccagaagacctggatgaggcagtgcgtggtggctcatacctgtaatcccagcactgtgggaggctgaaccaggcggatcacttgaggtcaggagttcaagaccagcctgatcaacatggtaaaaccgcgtctctactaaaaatacaaaaattagctgcgcctataatcccagctactcgggaggctgaggcaggagaatcgcttgaacccgggaggcagaggttgcagtgagctgagatggcgccactgttctcgagcctgggtgaaagagtgagactctgtctcaaaacaaaaacaaaaacaaaacaaaaaaaacctggaataggaagcttacattcccatgtggcaaacctcagctgctgctgggtttccagtgcctgaatacactggaggtaggttgctttctggttcccccagacctgtgacccttgcttatagtggcgttctggctcccatgggcttcagagctagagaccctaggctgagacgatcatcgacagcctgggaatgcctagtgcttactgcacagtgtcgtgcacctcatgttgcatcccttctaactctcttccatgttattgctggtgtgactttcctcctgctgccccaaatccaagtcttcttgggtccctcctaataaaattcaatggctccctcttgatctgggcttaaatccctgactctaaaggagtggccatgtcatatcacaagtttggtatctcaagattgaaagatgagctctccgctatctttatacagtgttgtacccgagtttctgaagatgcttttgagcttctgtagggtagttaatacagagttctagtgttgatgacagtcctgctgtttacaaagcatttctacaagcctgactactgccccacttcctcgcagcccccctgggtggagatagggcagggtcgattctatatcccaaacagcagtggggagtctgtaaatatggaggcataggccatcccagggagtcccccacccttggaacatggggaaccttgttttacatgtggtatccagagtcatacagtgtgttcctgaggtcatttagacaccttagggcagagtcttgacccagaactcagttcctgtcagcatgcagccagggaactttccacagtgctccatgggctcaccaggctgctggccatttgtaatgacccaacagagtcaaagctttcttcactcccttcccatctccttgccttgtcccctgcctgaaacattcttttcttgcaaaactgaacctcccgtaaactgcactggtaccgcccagtgcttttctgcctttgctccttctgtacctctgcctggaattccctttctcctcctgtgttcattgtctggctgatttctcctttttcaagactcaggctcaaaaaggccttgctggcagtcaccaccccagccctctgtggcacatgtgcagtgtacacacacgtcacccctccccgtgcctacctcaatgatggcagttttttgtgttgtagcaacatgccctatccagtagactctaagctccagaaagacgtgcctgtgttttagttttatttgcaccagcggtggtgtgtggcccaaaggcaattaacagatgtctgaactaaaccatattcatattttttgtaagtttactgcatgctttatggaagagtgtttgtattccagactcaaaggggagctctctctgccagacctccagccctcattttggtactagcaaatttaatatatatcctcagacattttaaatttttgattaaccttgtcttttgagataaaacattacttagagaaaagcggaagtctaatacagaagcacttgtgtgcctgtgttcacttcagttatcctcatctgaacctccctttggcatggttctgccctccttgaggtctgttggctgggctgcactctgcatttcgtggttttacagggtaggagaatgcattttggtttatttctattaactttggtgatggtgatatatgacctcttggtgactttttttttttttttgccatggaacttttttggctggtatcgtcagtcacatttggtggaaagagcaggctgggagagggtatgggctgcaccaccaatagagcgtgtaggttaccatctagaactcagtttccttgtctgtataatgggtatattgaaataaatgatctaaaaggtgtcttatttttaaaacctataaattcttggctcagtttccttttgatgtggctttctcataagtgttaagtctagataaaattttttcgtaaatgcattatcctgtgctcatacaccttaaagttcttgtctctcacttttttaagcctataaaatcattcagcattatattcagaaacagcatcatgggccaacatgaagatttagtttgtattcccacttagagcatttataaaaattttaaataaattaggtcccatatacttgaatcttgtcaacctgttctccacacataaatgtgcccatcttctctttgcaaaccatctttcctcatgagtagattgcacgcctaatctgaaaaccaatgttgggtttttaaaaaatacccttagatacagaatggagtcaaatgcaataaactacatctttaggttatctcttgtctgcaagttcccaatttaagaatactgagagattagtatgattttatttctcttttgagaaataccacctcccatccaacaggccaagtctatttctacagtcagtgagtcttgcctttattctgctgttagatttctaggtctggatgtaagcccagtccagggaagtcggcatcccttctgggattctttctgtgcatgaggatggccactgagcccaagcaatcctctatttgtaattccactcgtatgttttggcaaacatgtcctaggattcctccaaaggttggggtggacaccctagttcaagattagatcaggaacacccaggcttttgccacagtttgacgtaagacattatcctttgcttcagaagatcatttgagaattggaatttacatccattgtgcctttccatttttcttatttaattctttgaagaataatatgaggagactttaatataaaagaaaaaatcccatcaagagtcagaaaggatttcctgttacggctgcaaatcttggtaaatgcactttgtttttgtaaaccgtgccccacccccaacccctagtgtgaactcgtaacctggggaatttctcttgagagcataccaaaaatagcatcagtgccttctcttacccctaccccaactttcgccctccatgtagttccagcaaatatagctatagaaaaaataaccacttgtttttatcctaagtttttatgggccaaatcttgaaggtggatgtgggtatgtgaaagagtttaatgccaaatacaaagcccactcggaaatgaataaggtgactacaaatgaaaatggatgtttctttcttcctttggggaaagtgctatgtaaataaaggcaatgtttgcttcctctactaaaatttatttctgcagtttttaaataagaaatccactcaagaagttattcttactgaggatttggtcactgttaagattataggaactattaactactgcattatcttttgcttacaagagaacaaacccaaatcaaaataactcggaaacaaggcggagagctgttggctgacactgcccactcaagcatgggagaggtgactctggccctgaagatgactggaaccaaagactgaggacttggaggctttcttctctttctccttgcctctcatctctgcttctgtctgctgattgtggttgtcctctccgggaccatgactgtaggtagctccaggcttacctccctacagcctcctcagtgaggaggaaagaggggcttttcagccagttccagccggcggggggggtggggggtggaaatcctagggaggaattctgattggcttagtttcagtcacatgctgttcgctgtaccaatggctgtgggcagaggagtgaggtcctatgattggctgatgctaagtcacatggtcacatgctcgtcccgataccaatggctgtgggcagaggagtgaggtcctgtgattggctgatgctaggtcacgtggtcacatgcccttccgtgtaccaatggctgtgggcggaggagggaggttctatgattggctgaatcccaaatcacatggtcaatccttggttaggaggaaagggagtggagaggaccgtgctgcctggcgttccccagctgcctttctttctgttttccccccaacggaatctctatgtggtctcctagagcctcgtgcctgcctctcagctagatgctgatatcattcccactcatgtagttgggaaggaagggtgtggcagagataaagggtccacggtcacgcagtatgtggggggtcacacagcctgtatgccaaagtggcacaccctgtgaatatgtagggtcgcacagcctttatgtgtcagtgccagagcctggacccgggtctgtagatgtgtgaaccgtgagctgataccatggatattcaaagatttacatcccatcaatgtttataccttcttgagaagaaatttgtgtcaaagcacactcctcctttcaagactacctcctcgccgtgctgcgtgatagccctagtatcacaaccaaaacacatgatacagaaagaggccagtatctgtgtggtacgtttgaatcatggttttatgcctttggccccctagttccttcctcagacacttgtttttttctgggactgaaatctaaaattagtactgacctttggattgagaaggtagagagatttacacaagagtccaagcgaataacttaagctgagctggataaaactcagcagaatcacagaacaagtgtgccatgacttttcaaacatgcctaattgaactctgtttgcgatttaacttctttttcaaaggtttatagttacctttatttcaaaatttgtcattttaaaatatgtgtttcctccttttcctccactgtatagtaattaagagtgtggaggatttggaggccagcgggctttggtttgaatctagaggctacatattggagggtatgagccaaagccaaatttctaaacatctccaagcccatccgtgagttgggcctaaaggtgtttaggcttaagggccacccctgaagtgttgtgaggatgaagcgaagagtatatcttaggcgctaagcacagtggcaggaatggagctgactttcgggacacgaggtggctgtggttgtggcattgggtaatatttgtcacagaagtacaggtgagcacttctctgagactcatgtcttcctcgtgtctttggcctgatgaatgagtgacttgctctgtgtctttgcatgctttgtttccagacacctttcctgctgcactctcagtgggcagtactccccaatgatcacctggtcatctgtcctgcccgcaggcttcaggctcttgtgcgttggccatgaagcaaaggaaggctgttgcatgaaataacctccttctgactccacccttgcatttgtgagatgtaaacagcagtgttaccaagaggtcttccagggaacacgttgcaggtagccctgtcatgctggctgcttttttccattaggttagttgtgaataacgaataaatgtctatgcagggccagacatgtctatgctggctcacgcctgtaatcccagcagtttgggaggctgaggtgggcagatcacttgaggctcggaattcaaaaacagcctgaacatagtgaaaccctgtctctactaaaaatgcaaaaaattagctgggcatggtgacgcacgcccgtaatcccagctacttgggaggctgaggcatgagaatcacttgaaccccggaggcggaagttgcagtaagcagaattgtgccactgcactccagcctgggtaacagagggaggctctgtctcaaaataaaacaaaacaaaaaatgtctatacagtaggaaaaataatctatttggtttaatatttaggtctctgcaagggtagcatccagaggcttctcttttcattcttgtttttctgactgtgaaaaaatcattctactgtgtccagtgatgtccagataccaagaaataactattttaaacatatggtgaatattgttaaagcacatggtgatggtcatttaattatgatttgattccgtcaatatgcaaaagagttctaagaatgttgggttaaccttagcaagcattcccagataggaaatgtgttttctgctaccattgataggatttttttaaggattttactggcagttatccactttggacttcatacagcagtctgagtatatgcccacacctgagttgttgctctaacagtgagattaggggatgccagggagaatctgtgtgatgacttaattgtaagggagagctttctttctaaaggtgtggatttttctgtttgaaatgtgtatactaaaagaatcctattatcttatgccaaacctgtgctaatttcttaatgacatgttagttaaaataacaatttggaggattggctaaggatgccacagtattcataataaatctgttcttgtgcagcaaggtggtaaatcatgaatatcaaagttctgatcatactaatttgaattaatttagcatagtggaaagtatgaagacatagtttttccaatgcatatgtcacttcttagcctaaaatttctacgagtggggcaagtacattttttacatgtacagtggcaaaattgtgcttgtgtactgctctctaccttgtgttctggttctgcgtgtgttttctctgccctgttaggaacctgcaagtggagtatcttattcttttgggctcctcccaccatagctggcacagaggagcccaaaaagtacttccaaggggagagggaagtggaaaattatgcatcatcagtgtgtcaagtactattaggcatcttttatacacgatcctgttgaatcctaacaacccttgtaaggtagaaatcattcctggtttataggtgagaaaaatgagattcaggtgtgtagaacacccggctccgattcccactgatgggatatagactccgggtctgtgtctctctgtggtggacactttggatcctgaaacgctatcttcaggaatgattgaggctaagccatgtggctgagcagtgatgcacggcctcacagattgaaggtcagagcattgctgggcagaggatgagtttagaggtcaaacaaacttggtttcaaaccccaggtccacacttagtagtgtgtggctttaggcaaaatacttccctctctgtgctttatttccatagctagagaatagagaatgatgaggatattaccctccttgcagagaaagatcacagtgtccccagttaacatgcagggaaatgggaaataggaaatacagtgactcaagttgcttggcaaaggcagggctgtggcaggttgagaattcacgtctttgactcctgtcacctgttacctctccagatgccaagtctgggtacagtttgatgacagaactgccatcacctgccactcacccttggttagcccttagcggcccacataacttggtggctcttacaacccgatcctagagtcccatggctgattcatgctctttttctctattgtgtcgtctctgtattcactcctgtgttctcgaggaagattcattctagagggtaaaagagagtccacaagacttgttcttaatgtatacaccccacacaggacaagaaggaagttgaaggtggcagcctgttgtatttgggtgacgtgcagctgaagagctagtttttgagcacttactctgtaagaggtgcttagaggggcacagaagtatctgcaaaacaggccaatctttgaggggtttatttaggtagaaagggcacatccatgatatttaataacaatttgagatagtctagaacagtggcatatggtatgggggagggggaggcaatcagggagcattgtctgtagaggatctgaaagcaaaaatgaaattacctcagttttttttattatcatggtgataaaatattcctccaccagacccaaccacttctaccactcccaccttgtccctaagtcctgtactggatcaataatcagttgccaaaatgagttgataccagtgacatgtttgggaggtcaagctggcagtggtcagtgtggactgaactgttggggaaggctgcgtggaagtcccctcccctccctctcagttaggacaggacaccaggagagcagtctgtgaccctgaagactgcagcagtccctgatgcccatgcgagccatgggccaggaaagtgctttctgtgcattgcctcaccacgtgagaggctgatagcccaagatggttctgtagctgaggaatctgggtgagtgacaggtgtcctcctatgcgagattaggggagtaacgcccagctttcagacagccagcaggggggctcagtagtgctaatgccaagcccttcatgcagagaagtgacttaagtgtcagttactactttgtgccagaggtaaatctctctgcagagggaaatgttggcacatagctggtaaacaccagtgtctaggtagccctcctgggcacaaccgtcctcattttttcttttacttgactctccactaaatcctttttgcccgaaactttgtagaattggtatttattgatttgtaccagctaagagttggctatttagtctctgacgtgctctttatggctgaagaaaaacaggtaactccttcacagaggagagattaattccctagaaaggaagacaaaagttttcatggacaactttggaaaggtgtgaagcattaaatatctatgacagcaagacacgggaatacacaagcctgtgttaaggcctgatcccttctgggccaggcacataagctgaaaatggtacctgagcaatttctgagtatgtcacgaaaaggcactgaaatacagaagtttctctatggaaaagagtgtcccggcttggaaactgtgtctgaagcaaaaaatttcctcaaaattgttcttcagaaagggagttgccgtctagtagggtccttacaaaatcattaagagttcgcaaaaaaactagatagatgagatccatgagtgactggctgagaacagatggggaaggcaaattcgcctgaaattctctcagtcaatgcatattatgaatgcttatcgaggttgcttcatgaaaaggggttaaattttaaaaaagagaggcaaagaaattgaatacagatttagtacttgttcttgaggttataacttcagagttgccagatattgaacgttgaattagttaaggtagtgctagttgttgtaacaaataaacccaaatatgtaccgtgactcaaacatgatggaagattattttccacttgtataaagcccgaagtgggcgtgtttatgtgaaacctggtgatttggcgacccagcctcttcctgtctgtggttccactttatttaacaggcagctgctaaggtcacgtacttgtcagcattgaactggcggaagcagaaagatcatggaggactgcatatgggagattttgataggctaggcctgggagtggaatgtgtcacttctcctatttcattaagaacagttcagccttatggtcacgcccacctaccttgaaggctaggaaatgtagcccagctctgcggttggcaagaagaggaaatgggtttcctgaagagctagctgccctctgtcatttgaaattttattaagaccattgaaggtcactttaaaagtaacacgatcactaatatgctgtgtggatcgtcaatatatttttgcctctgagggcaactttcttggtcactctgaagggcttctgatggcctagggtaggtgtttcagtggcagtgttgcacatcgttttgaaaagtgctgtgtgataggcaacttggaaggtaaggaggtgctgtgcttagaagaatggttacacaactcacaaattgaggacaggcatgtggacactacctgggaagactgtgagctaaattgcttcatggaaggtggacatggaatgaaaagtactatttctaactcatagggtatgtgatttcatgtgagtcataaagtttatttgggcagattgaccaaaatttgtagggggtagggattttctcattgggaaaagaagagggctgtcttatctgggggatgccctatatccaagcatgcatgggaattagaagttaatcaaagaaataaagaattaacgctggaggaggggagcctcactcttgcaatgtgggagaagttggtcagatgtgctggaaacacacttatacatctgggaggaaaaagagaggtgaaagctggggaatggggttagtgccaatcctgcactctgagggaatgaaaagagacccaggggactgggcaaggggcgggcaggtgacctgtccctgggagaagcccttggccgtgccagtcttgtggtgggtacccccgtgtgctctcttttttttctgtgtgatgtgggcaggttccccaacctctctgcatctctgtgtgtaagagtctgtgaaatgatgtgttcacagagctgtgcacatagtaggggctttatgaaagtttcttcccccatcttctgtgcagctactcaccagccccattgttggggatcattgtctccataattggctgtgagtaactggggagatgttctcccctataaaatgcaacttcatgacaaaaagaagctcagcccccttcatccctaaagattcgttggtgcagtttcttataccagaggttagataaagctgagaaggagaacttccattgtcattgacttttaattctagaagtccctgttctcctatcttagctttggatgttggcagcagggcagcaggcgggtcttgtgaagaaaagttctgtggaacctaagagttattgacttgttcttcagcatcttcgcgtaatcctcatagcagctctctgaagttcattggtggggaaggaggcttatcactgatcttatagatgaggaaactgagttgcagatcaggtatgtgacttacccattgcaggcaggcccaggactagacaacaggcctgttccacagtagtgttaaatgggcataggtttcttctgggaaatagcaaacgtcccctggcccttaaatcccttcacaaggcattagcatcaactgtagcaaaggaaatggagtcaggttacaggacgaagctcagtagctgggtgactaaatccaggttcggaaccatgtttcccatcacttaacatggtttctgagctttgaagaacttttttcgtttgataggtgcttgcttggcaggaagaggtgggcagtgatcacctttttacaaaatttttttgagattttctttgcaaactctttgtactgaaggaagaaagcaaaaggcgcaaagagttggagataaaagcacaggaacctttcttaaagtggaagttgtcttctcatatcttccccatccctcattcccttttcctactttagaagtatttctataccttgtgcctacagatacatatatttttatttacttactatattttggaaaatggctcatatcatttttccccagaagtcaaaatgtgggaaccagggaccacccacctcttgtacccagttcaaactctttctgggtcactgttttatgtgtaattcatgccaaaaagttacactgaaggatatggatggaccaaagctgcatgggtttcttacaacaggcctgggtagagaggcttggtgcaagaaacccaccttgattacaagagccagaatggagaactgaaaaagaaaagaatgtctacccagtgtcacaggattacttttgtgggtgccaaaacatatctcaaagtagccctttagtcacctaataaaagatgggaaatgtttagtccatgtgtactactggaatccatgtattttaatatgacacctttgatatatttggagggagggtaggaaagatgttctctgttttatttcttctgaacctttttaaaagtttctgaactgcttaaatgaacctacctgtagacttaaatgtgttaggaagctgatttagctgcactgagctcttcctttcccttacttccttctcaggttgtagaatacaagctcagcactttcctggcttccctctattgctctgggaaagatagtaagtaaatagtgtctgttgccaaagggagaagaataaacataggctggatcaccaaatggtgctgcattttatttgtatggtgtcagagacactggctgcttagatggcatcactgagggagatccccagcatgaagcagagaagacaaacttgggagtttgtcaggatacccagggtcattgcaggtcagagagactgactaacaattaccagactcacaagagacggataaataacaagagggtcctctgaccaataaggactttcctcaccttaacaaaatcttcatgggaagcccacttgttataggaggcttgattggtgtattagtctgttctcaccttgctataaggaaatatcccagactgggtaatttattaaggaaagaggtttaattgactcacagttcctcagggctggggaggcctcaggaaacttacaatcatggtggaaggcaaaggaaaagcaggcaccttcttcacagggtgacaggacagagtgagtgcaagcaagggaaatgccagacacttataaaaccatcaaatctcatgagattcactcattatcatgagaatagcatgggggaaactgcccccatgatccaatcacctcccacctggtcctgcccttggcacagggggattatggagattataattcaagaagagattttgggtggggacacagccaagccatatcaattggtaagtaccatgtgaaagcaagttaatggcccatgtcatagaactaaaaccatttgttttagttctgtgttgcttgtagggaattttctagtcagttagcacaagaggtttagtggttcagccaagtttcacatactaggtcccttcatttccagagattgggagtgtctaaaggactaattttgtaatgtcagataatgtaagagaatagcccctggtgacaggtgattgaaatagataatttctgagtcctttcattatttcctatctgtttcttaattcgtgaaataaaagttaagggttatctaaggaagaacactaagttatgactagtactttcatttgttcaataaatacatatctggtgttcattatgtcatttaactttaaattttttttttttttttttcttgagacagggtctcactctatcacccaggctagagcacagtggtgtgatctgggctcactgcaacctctgcctcctgggttcaagtgattctcccacctcagcctcatgagtagctggtactacagacgtgagccgccacacctggctaattttttttttttttttttttttttgagaaggagtctcgctctgttgcccaggctggagtgcagtggtgtgatctcagctcactgcaagctccgcctcctgggttcatgccattctcctgtctcagcctcccaagtagctgggactacaggcgcccgccaccatgcccggctaattttttgtatttttagtagagacagggtttcaccgtgttagccaggatggtctcgatctcctaacctcatgatctgcccgcctcggcctcccaaagtgctgggattacaggcgtgagccaccacgcccagcctaatttttgtatttttagtagagactaggtttcgccatgttggccaggctggtctcaaactcctgacctcatgtgatccacccaccttggcctcttaaagttgggattacaggtgtgatccactgtacccgccttaactttaaattcagatacttttaattctttggttatggtttgttggttgctaccactgtgggtcactgtcttatccttcccagtagggatagatgtggctgctcttctgattttcacctcctcttactaatttaccctgtggtgggaaacacatcaactgatagtgttatttcatgttaagtaaaggcaaatagccaccttcctcatttgactgaaactcaatgtgtcacattctacctcttttcttagtccttaaggatttctgtcatctgttagtctgcaggctcttaaggtcaggctctgtcttcccttcatctttgaagcttctactcttgtgcttccctcttgatgtaggccctgaatcactgttttgttgactaggagagcacatgaactgtttgtgcaacctctcaagctccgtttgaaatggaagatgatcatacatcttgtggcacccctttttcccagatcccaagcttccgggcaccctttctttcttcacctccacagatgctgccttcacccaccctttgatgaaccatcttgatcaactgccaagaatgtcaagggcatttctaacgccagggcaacagctatgagcacttatgagaccacatcaggtttgactcctgaacgaaggatgtccttatccatggtctctttttcctggcaggcatcttgctgttattttggaaattttctctgggccgtagaggtttgaaccagtcatgtctaggagcgtttgttttctcaggaaaagcaaccctgttaaagccattgttttaaaaagtcacttggagcattaaaaacctttgaccatccattcatagtgctaaaatttaggagtggggcttcaggcaagcaatattgaattaaatgtgtggagcactttaagacagcatttgattgtacatttaaaatagggaatgcaaattgaaattcctcctgggtgctttaaatcatgcattatatgtgcagtattttcaattagctgcagaaaaaaatatgttcggtgtggctgtatttttacagctgggaattgctcagagaacacaattgactatttcatccatgtgagatttatttaaatgactcgtggggcatttgcagtttagccaataattgaaaatattgttgcaatgtggcaggtaaaactaggaaatcatttcgcattcctgcagaggtgttccaagctcagcagcatattatattagttgaagaggggcaaacggagtgagatcagtgttgagtcctagtctttcacatttcattcctgggttttgccccaccatggaaatatatgggatggtgctttccagaaggacctgaaacgctaaggtgttatcttgtttctattctgtttttatatgccaaacacaaatgaatggtcagaccagatatggaaagacccatctatcccccaactctcttctgactcctatacctttctttctattcttcgtaccatttcacttcagacgtcacctggaatactgatgcaggaggctaagctgagtctctcagggtagacagttcaacctttccatggttgttcataaatattactagggatttggaatgcatgttcccactaaaatgatgtaaatgtggttaagtgataccatattaaaatgcatcattacttgtgtgattcagacaaagtatgggttaactaggcattttgaaggcagaattaaaatactaaccaccaccactttctctgtaatagtggttgccaaccaggggtgatccttcctctctccttcagggacatttgtcagtgtctccagacatttggttggtccatctgggtggggtgctattagcatctcttgagtaaaggccaggaatactgctaaacattctgcaatacacaggatagccccctacaatgaataattatccagacccacatggcaagagtgacaaggttgtgaaactttgctctagaaatgtgtacattctttttttttttttaaaaaaaaaaaaaaagacttcctcaaatgctttagaccatacctgcttataagatggtggccactgtaattgaccttaatacatgatggtaatcaacagatcattgaaagctttgctttttcatcaatgcctccattatatattgagcacttcagtgtccatgtgccatgctggaggctggggtgccatgctggaggctggggtgccatggtgaacaggatgaacaaggtccccagtgggctcacaggcacaaagacaagggaagatgacagtgatccagttagagggaacataggcatgaaggcctgaggctaggaagaaccaaccacgttctgtaaactgcaaggaggacagggcactgtagtctccaccttattggtggcctaagttacctgcagtctgaaaattggtacatgcagtacagtaagatgttttgagagagacatcacattccaataacttttattacagtatattatccatatgtataatatataaaaaacaatatatttttattattgtactattgttattgttcatctcttactatgcctaatttataaattcaactttatcataggtacttatgaacaggaaaaaaacatagtgtatatagggttccaaattttccatggtttcaggcatccactgagggtcttagaacgtatttcctgcagttgagggggcctcctgtctgtggaaaaggaagccaaatccagaccagacaggccgactcagagcctatggagagagggtgctgaattttcttgcaagagcatggagaagtcatcatagggattgactcagattttagagtcactggggcagtgcaggcagagagatgggtctaggagaccagtgtcctcctccggagatgttggtggcttgggctggggatagaggagcttgagaggggtggatcattcaaacaatggagagcttttccttgttgatggttctgtgggataaaggaaatgatgaaggacagtttccagactttggcttaggttcttggatgaacagttggtggtgtcacttagaaagatatagaacctgggagaacagcagggttggggtgaggagtactttttcttctcatcctggttttctatgataaagggacttctatatatctttctaccccttttattattttattattattttttttttttgagaagtactgtgttttagagtctgcttgcaaaaatggagggtttttctcctggattacctcatcttccagttaccattgttacaggctttccagtggagctcagatttatttctaaacgatctctttgagcaatgatcaagcattttctatatgaggtatttcatccatctaaacaaaactgtgatgagagttggcctaaactctagacttctatcatggaatgtgttgaccactgaggcagggctggtctggctttaacacactaaaacttcttaaagaattatgttagtataatcccaccctatttcagtttcaggctggtaggaaaacacttccttattcatgaggttggcagccttggaaagaacacaaggaaaatcgccagagcctgacgcccatttcctcagtcgccagtgaccatcaatcatttcctaagcccatcatcagggctgtcgatggagtcacagggctgagctgcttcccctggggagggcaaggcctctcaagtcaccttccctgaggacctgtgaccagatgtgaaagtctgataaagtcacatactagagacccttgactccctctaataacaaagaaataaaggaaattgaaaaaagaccacaagtcttaaaggcagctttaaacatgtgttttgatttttagaaattataatatttgaacattttgcccttgaggaaatgttaagctggactgtagtataggccttcaaagcctgaagagaggaccccaggccttcgtgatgatggtggtaaatggggtaacagcagaggccagcttcgagtggggcctcaagaactgtcctaagaacctgagacatagtactttttaaaatccttataacaactcttaaagtaagaactactattacaccgattttcagatggaggagctgaggcacactgaaggctagcacttgtcaaaagtcatacagataattggcagtggaggtgacatttgaacttgggtggtttgtcttaggaacctgcaggggccatgtatagtgtcctaaatccttttgttaatttcttatagaataagaattaatactgttataagtcaaataattatgagaatgtacaattatgcaagcaccctaaaactgtagctattctttttgaaaggaccaaaaatattacatttttgtgtgattgtacatttgcagtacagggaaaaagtaagaaataaaaagatctgtcttaaggtacattggcatttgtttgctgactaaaattttacagtagggtttttttgttgttattttgagatagttatatagattcacatgcagtcgtaaaaaaaaaaaagtagtaattcagagagctctcgtgtaccctttacctggtttcctgcaaaggcattatcttgcataactgtagtacagtaccacaaccaggaaactgacatcacacaatccacccaccctattcagatttcaccaggtttacaggtactcactggggtgtgtgcatttacttctatgcagttttatcacatgtatggacttgtgtgggcaccaccacaggcaagatacaggacatttccaccacagggacccctcatgcctcccttttatcgtcacacacatccctttccctctcttgttctctaacttctggtgactactgatctattctccatctctgcacctttgtcatttcaacaatgttatatacatggaattacacactatgcatctttttgaaataggcttttccattcagcatagttctttgaaatccaaccaagttgttttgtgtgtcagtagtttatttctctttattactgagtagtagtctgtggtgtggatgtaccacagtttagccattcacctactgaagaacatctgggatgtttccactttgggactattaaaaaataaagttgctgtgaacattggtatacaggtttttatgtgaaatgattttcatttctctctaataaatgtccagcattgctggattatacagttaagtgcatgtttagttttgtaagaaacggccaaacttacattaaaaaaaaataaataataaacagaaactaccaaactattttttttttttttttgagacggactttcgctcttgtcgcccaggctggagtgcaatagcacaacctcggctcactgcaacctccatctcccgggttcaagcgattctcctgcttcagcctcccgagtagctgggattataggcacctgccgcgacgactgactaatttttatatttttagtagagacagggtttcaccatgttagtgaggctggtcttgaactcatgacctcgggctcaggtgatccgcctgtctcggcctcccaaagtgctgggattacaggcgtgagccactgcacctgacctaccaaactgttttctagagcggctgtgccattttatattcccaccagcaatgtgtgagtgatccagtttctctgcatcctcaccagcaattggtgttgtcactagtattagccattcatctggacatatagtgacatctcattgtggttttaaaaatttggatttccccagtggctaatgatgttgaacatcttttaatggacgtatttaccatttatacatcctctttaatggaatatctatccatgtcttttatttcctaatccgatttttttttacagttggggtttaagagttttctgtgtagtctagatactagtcccttgacagatacgtgattggagaatattttctcctagtctcttcatcatctttgcaggatcttttgcagagtaaaacttttcattttgatgaggtccaattgatcagtttttcagtttatcagtttttcgttttatgaaactcaggcttttaatgtcaacttagggttttgattcctgcctgttgtcatgcgcagtgccgggtggtgagaaagagagccatggaacaagatagacactggagtgtgaatgattcttccagtttctgtccggttgggttctgcagtatgtcttgatgagctgcctatttgttggagtcatggacacagagttgcccttgtcttgcaaaggctgtaaggtgatgatggtatgaaaggaaaaatatttccagaataatccatggtacctcccaacacaaggtttgtttgcacttgagagcttctgtctggaatactcttccttgcttccatctctccgcccctttgtccagtcacttccagtccatcctccaatgtctgcccatgtggcccttcccaggagcacttccctggccactgcctctcaccctggcccaggtgtgcctctgcttccattcttacacactctcctcgatgtcagagcatttgtaaagtaaatacgtgaaaatgaaagtaaatatcaagtaataagacgatttgattaaggtctgtttcccctctagaccaggcttccccaaccttggcactactgacatttcgctggataattctttgttgcaggcggctgtcttgtgcattgtgggtgctgctcagcagcacccctggcctccccccacctagcagatgccacggcaccaccctccctggcccccacctaccagatgccatggcaccaccctccctggcccccacctagtggtgaaaaccaaaaaaaatgtcttcagatagtgccaaatgctccctgagcgacagagtcacccaggtggagaaccatgccttgagactctgagaggtgggagggcaggtaccaagccccttttcatgcctattctctctctagcatcccagcgccaggcctggcactgtggtgcttcattaatatttgtaggataaattaagggataaaccaacttaataggggacacttgtttacacggcagccttggaaatgctaccctgacttcaaaggaacaaagtgggttttgttgggcacttgagacccaggagaatctagagtcttctgtattcaggtggatatgggtttccttatgcagtacccaagacagcccccacactgaagagttatgtcagtagtgccgagataaagaaagcctgctctagggcacaagagaacacacattcccactctcgccccaggcgccacacaatgatccctctgactttccctctgactttccttagtttagaatcagagtctccgtctgaagtcctagactgtttctcatcaatgcaatgactgcattgataccaatttacctagtggttctccctggaatttttctttttttctttttctttttttttgagacagtgtcttgattgttgctcaggctggagtgcagtggcatgatcttggctcacttcaacctctgcctcctcggttctagtgattcccctgcctcagcctcttgagcagctgggataacaggtgtgcgccaccatgcctggctaatttttgtatttttagtagagatggggtttcactgtgttagccaggatggtctcgatctcctgacctcaagtgacctacccaccttggcttcccaaagggctaggattacaggcatgagccacctcgcatggccactccctggaattttcaagccaaggcttctctatttgggagaggaaggaatgaggccagttacttttgtgtatcctagaagggaaaggatgtggtactggtaattgaagctttggcctgccagcccaccttatccaatttgtcagcccaggttcatctacatcctgttgagaagtttggcagctggaggtggacatgcacacactacactgaacctcctgcaacaagcactgcggaaggtgtgaaccccaggctgagtgactgggcagctgttcctctgcaggaatagaggagccccagcctcctgacacggtgcacctcctgaaacccacaaagcagcagtagggaaccgtggatgacattaccagtcctccccacctaccgcctggtcactccttacaggctgcctttttcttcctaagccaaagccagctctatcattcaggttcaggaaacagaacagccagccactgagagaaaaacctaaaacattcatatataatctaaattattcttacaaccactgttcttactccctgggagctttctaaaccaattttatccagttacctgcttagctaagcaaaacggagcccaaacccctgcttccctcctcttcctcgtgaaaagggagcaggacccagctagagggaaagtgcaagtgaacactgcattaggtctccaaaccgccctgtgcaagtcaccccagaaaggccacctgaaggagggcctgtcctgtctgctgggaggccctctttttctcacaaggagagtccatgccttatggataaacagagatgccttttctaggctgtgagagcaccactttggcagtgttcatggaggatatggggttttatcaggcaggaactcagcagctcccacgttcctatttcagtgagccggggagaaaggcaaggaaacccaacatatattgagttactactatataccaggtactatgctaaacacagagaataaaaaaattaagtcataatccccaccattaaatatctaatatgtagatttggccacatacataggtcaaatcatgttcaccaaaataacaccaccatttactgaaaaaactcaacatgaaatggtctgtgggttgtaatggggtgtaacattcatcttagtgtatataaaaagattccactttattatttctcaactctttctccttttccagtaaataccatttttattaaagttttatgatcctttggtttagccactgttgtgctccataaccttctctgctcccctttagaacacatttcagctattccagagtctcagttcctgataaaaggaaaagggatgcttgttataagtggtgatttcattacagaaattttgaaggctacataacggtatacagaataataaatattcatattcccaccatcagaaataactatatagatattttaatatctgtcctgttagtctttttttgtgcctgtgtataattttttttttttttttgggatggagtctcgctctgtcgcccagactggagtgcagtggtgggatctcggctcactgcaagctctgcctcctgggttcacgccattctcctgcctcagcctcccaagtagctggcactacaagcacccgccaccacacctggctaatttgtgcctgtgtataatttttacatagttaattataccatacttttttccagttaagatatatccagaatgtattaccatgtctttaagttttcttcagagataggttcttaacagccaaaggatattgtgttggatggatgtcattaactgttccttattgttggacattttaggttatgttctcccagaagcaatccctgagccaagcataaagtgcaagtgattcattaggaagtgctcccagttgaaatagtaagggaaggggagaagtgggaattagaaagggaagaaaccaagcaagaaataccaggtgaagtcccacactcagagctcatggggagctctggagagtcagttaacaagcagaccagtagtcaatggctgttagtcctcagggagggagtggtgtttgtgaactctcaaccacttagggccaaccaagaaagtggccttcaactcccactagtaattgaccgaggtaacaggtataaaccattagcaacaaagcagataaaaactaggagataagtgcacaaagctggtaaaaggtcacccacagtgtcccctccattggagatttaatttgcaattataattgctattgcaattatttattgcagagaatattgcaatacttttgctactgaaaataatagtaaacatttttggacctgaatcttttttattatcacattaggattgattgatagaaggggtattactgttccaatagatagatacattattaagattatttatgcgtactagggattgcctttaaaaaagatttttaaaaaatcaatttacatttctaacacttgacactcattttttaattggcaagaatccagagagtgttagtttctcgtctctgaattggaggcccataggcatatcagggttattctaaaggatcagagaaatcatgttcatggcccagttttgattatagattgataaataatatctcaaaatatgatttcttaaaatgtatctaggtactgataaaaagaatttggattttattgacatgtttaagaattcatggttgtattttatgtatttttaccaatactaaaaacatggtcatgaactatgtgtaatattttttatgtctaaaaaaggtacttccatgtctcttgctgaagagagaaattaaaaaggtacttccttgtttttaaagattgagaaccattggtcaatgtcactataatgtcttgggtcacctcttggttgctggattaggaaatcagccatttggaccattacgtcttaaagacatatcaaaaagaaaagtctataggacttgatacataggtaaaccagatttaatgatctgagtcagcagaccgaaaaacatatctcagcactattaaaggttttctgggacatactcacccctccccctccattcccacagtaatggacccctcagttctcttacagagacggcaaaacgcaccagcattgtcttaatttatttctgagtcttaaatagtctaaggaagttataaagatacagacaaggctttatcaaggtagcagtgtttgactgttttcttagcttgatccttgagactttctaaatggttgctgaaatacaaatcagagtatttcaggtcttgagcattgaagaggaccagaagaagagagccagcatttactgaacacttgctctgagccaggtattaggctggttactatgtctttcagtttgcacctattgaatttccatggccacccttgagatatgatttctaatatggcagaggacaaagctaagacggatgaagattgtgacttgccttggatctcttggttaatgggtagtaggattggaatttgaactttaggtgaattttcccggaaacttagaggaaaatagaatgaatatcctgtaatcttgaattttaaaagacagactgctaacaaagctctaatcccctccttccccctagccttttcccatcaacccaaagagatttcagaatggataatatatggataaaaggcacttgatgtcagagtgtactttataataaaatatgtgtcttttcattgaagggaccatttggatgttgctgccatacttttcagcggctgaaaaggtatttcctaaacatttttaggttcctttttggccaaattaattagtgtcatagaatgagcatacactttgaaggcagacaaaaatttaagaaaaaattcagatgtctctaagtctttctccactaacctgaaaaacacattttaaaactaccaagctgctgtccccttgataagttggcatttcctgtttgttctctaaattttaaagatgctgagtcattttgctagtacttagtacacttcccaaggataaccaagatgtactttagtttgcttgttcacctgatttggtatcataagaaaatgtggtagatgtttggaaaatgaatacaggtcttggtggacattatttcagtaatgcttatacagatttgagagacagagaccatatgtgaggcttaaccccgattacttgtacattaacaattactgtcatcttacagagacagccttaatctccatggctcacctcctgaagagtttctagaatgcctcttgccaaacaccgttgagtgttggcaaagtactgatgagaaatgtttggtctgaatgctggacagcacgattttacttaaggccattcagaagtctcagtttggcagccacaaaccttgcctgtacatttgttttgttgttgttttttttttgagacagagtctcactctgtcacctgggctggagtgcagtagcacaatctcggctcactgcagcctccacctcctgggttcaagcgattcccacacctcagcctctggagtagctgggattataggcatgtgctaccacacccagctgatttttgtatttctaatagagacagggttaagccatgttggccaggctggtttcgaactcctggcctcaagcactctgcccacctcggccttccaaagtgctggggttacgggcttgagccaccgtgcccggcctgtacatttatttctttgggaagccctggcaggaaaagctgttgagagatgtcatgattcggacaaaacatacctgctgtttttctctacctgctgtagcccctgtagattaataaggggccttaggttccaagaaccaggatcctagcaacacagagactagaaggatggcgagactttcccagtgcctgagaaggtgtcagctttcactgaggggcggggaggggagaggctgagataaatccggggactcaccttgccgtgctgtgtgtcggttgtttgtcgctggcatctgcactgttaggattccatttttaggctgggcttgattcaggaggctcgctgctgtcacacgagggcaatccactttgattctcccagcccagcttttaatgcccagcagactcctttatcttgtcatcatccagcgagcctccctcggtctagatggccatgggaggcaaacccgttcagtgtcagcagctggtctttcataatttgattttccagtgatgtttgagccatcggtgtgaaacagtcaccagtctggctctcataatttgaatttcagtatttggatatattccagagagtggtgtaaatggactttggattttccttatcactgttgctcagcatttccacagtttaaaacatttagggtttattagataagggtgctcagtgctactgtttctcactaaaaggaaccagagctccctggagaagtggctgattccatctggaacagaagatgtataaaatgagcctaaacatctagtcaaaccggaaagcaaggaggctaacaagactgtagggttgtatcagaaggtttaagaacgagtgtgaagaggctcattttgagcaccaataagaataaatttgcagtggatcgagacccttaaagtatgttgaaaaacacgagtttatagtgatacagaaaatagaaccctctggtcaatcaacctattttgaattattttgaaaactgttggatatgggaaatgaatgaagaatttgtcctgcccttgtaacacaaaataaacctcagggcaaccaagtagttgattatggaaaacttctttttatataaatattctaattaataagtgagggaggaaagttagaattataacagcacccacatttggtaactcttaataaaacagtgcacttaggcggtcatcataagtagcttgctaacaccacaaaaagagacagtcagctaccgtctactgatttcaccaccctctacggcacctctacaaaatattcttacaaaaagagaaaattgacttgaatctgatcagtccctacagctggggtcagcaggcttttcacgtagagggccacataataactgtttttggctttgcaggctataccgtctctcttgcagccgggcacctctgctcagctccctatcatagcacagatgcagccataaacaaagaaaaaagcgtggccagatctggcccatgggccgtagcttgcagacccctgctctagctctaacagtttacaggaaggacagaagacagagaaacttgttgaacagcatgacattaatgcagttagcaaaatctaccctggggaaactctacagggcaaataacctgtttttttcaacagaaaaaattccaaggttaaaaatgaagcaactagtggaagatgaaacaaacaaacaaccaaaaaaacaaaggcaagaggtgtaaccagttgcaatgtatggagcttacttagatcgtaattcaaatatactataaaaaatgcgaacatggactagatatttgacatgttaaggagttattttgcggtgtgataatgatgtcatggatatctattttaaatccttaggctgagtctatatgttgaaattattttgaatgatattatatgatgtctgcagttaactccaaaatcatctttgatttgagtagaaataaaccaagccgtgagttaataattgttttttctggatgttgagtatgggggggagtattaaatatttgcatatgtttgatatttcccatgatataatgtttttaaaaatatatgtatgttttataaaacatgatcactttaaaccttttatagagaatgagagagcatggagaacttttccttcattagacgcttctgtgtcctcccaaaataggtgtgcaccatccagctatgaatggacccagaagagtctttccagtggtttttcccaccaagctgtctgcctacaacttacttattatgctacatagagcagactagtgtcatattatttatcatttgttcatgcactatatgtaaacttttatttcataaaaagaatttattaggtagaaaatgagcttcatgttttgtgtctggctatcctagttgccactgttcagttgttcagcactggttccaggctaaggggtctcgtcacaggtgctcacacagcctggagaggtgatggcagtggcggccatggcagggtgtgaggcagcagggagcagcgggagcgaggcacgctggaaagtgggtgcccagcccataaggggtggcgtctgtgcagaacatttgccatgggggtgagggtccagtagtactagaacgtccactctttttcatttttcctgagaataaccctaatctagacttgtgacattttttgacttttagttgctaaaaatatttttagaatactctgtattgcacatcaaacacttgctggattagtcccacgggtcaacctctgattttgtgtctaccaatgaatggtaaggccctaaactgaccctgtgggcaccaggagtctacagtccctgctttccgtgagcttccagtctacttgcgaggaaagaaaacatacttggaaaacaactaaaatgagacaggcaaataggaaatgctataggaattcaaagaagagaataaagaacctcatctttaacaatcaggaaaaacatcacacacaccgtggaaggagttgggtagaagtgtcactgttgctaggtggaggctaagggagagaagcagaggctcgggcttgggtaagcaagctctttcaacagaaactatgattcttgaaaaagagaagagttggtagatttttggagactagtacccctccccaccagtggataatttttctgaacgatcaagtgaaaacaggtagcaaactgttgaaagtatagcactgcaattcagcagagagtttgaggatttgagctgcatatttgagcatcacctgtgtagaagagatggttgacgccattgggtctatagagagtgggttcctctaatgtctgctattggcaagcagtctatttataaatgttagggttatattttgagtctggcatttgcaaaactaccatcccattatttactacgttaaatcatggttaaaactcaaagcagtacccagctatttcataaacattccccgtattggaaaggagaaaggtttgaagtaagagaaactagaagaacatagggaaggagatacctggcatttggaaggatatgcctgtggcgatggctctactgatgggcttatgatcttccctccaatgatggcctagagacctatttttactgttgtgaaacaatattcaagcaaatgataatcttccatcttgttgctatgcagtacatttgggcagcactcttatttctctctgatttgaaagtttaaagtgtaatttctcttaaaaaggaaaataaacaggaggtttctatgtacttcccattatggcatctgcttgttccagagatcaagcatttcaaagcttgagaactccaagttacttcatgtaaacgattgtctatttggacatgagtgtgtttcattgttaggaattatgcaggcctaaagtaatttatagatcaacacccactctcctggctactgaactttggagaaaaatgaaagcttattcttagacacgtatataagccaggtgagtttagacgagtgagcatttggcctaggaaaccaaggccaaggagaagttctgcccagcacatcaatcaaaaatagctctgattccaagttctgcacagctctaacactgtcccagtgcacttttatgaaactgtacatagacagctctcaaaaacttcccaagtccaagaaacccagaaaaacacccataacagctttcttccgtgtcataggaaaactgttcttttagcgaaaatttataatgaagcagaattctgctaaataagatggctgtttatttgggagactgtccttgtgactttaagacattggagctgttagatttctcactgtcactgatcctttcaccctgtttttacaatgttttatatatatatatatatatatatatatatataatatatataaaatatataaaatatatttatatattatataatataatatataatactacatatatataatatatatgtagtatttgagtctatcaactttaagctaccagaggcaaaaccagtttaatgttcatgtcttctgaatccaaattctaatatttattcaaatattcactaatctaggagcatttctttggggaggcttcaggagtacagattatagtgggccgaatgtagacaccagaatagactataatgcaagagacaacaattgagatggatgaagttggtcactgcatttggccatttgtaagaaagattgtacacaatgttttatacttatgatgactttgtgctatattaaattttaaagaggatatttattgctcaaaagaaagaaaaggcaagagggaggaaggaaggggagaacacagtttctagtttttagatggaatgaataaagcttccacggtcatgatttggacgctctccaaagtccagtaggctccaggaaactccagggattgtcgtggcattagagccagtcctaggtgccaaagtcaaaataggccacgctggcccgttgagcccaagcgggagcagcgtatgtaggtcacttacatgttttgaatttagacgggctgagttgatacaattgttttacaatgaagctctggagaaacacggaacattctaaatctttagaaaagcgcttgtttcacaacatataagaaacttgcaacatcagctggaaggatggcctcagtggttcacagtggggccctctgtgtcggggggccaggcagggagttctgcgtgtgcccacagtccttgctcgatgtgatggtggctcttccctcagagagtgtcttgagctgaccgtgaggatcaggattaaacacaagcgttttcttagccacactccataaacgctgttgtgatgcagggaaagattaattaataaaaataggaagtatttatgagccatcggattaatctcacaagtgtttattgaacatctcctacgccctagggtgggaagcacagaaagtgtgtagaaaggaaggcaaggagacaccaaatacggggccagttttgcctaacactgtggttgtgcccatgctttcccccagagcacacagagacatgatttccccctccctccaggtcacctgtctcttaaaaggcccccttctgttttattctctgcagtcacccctaacctcccacacgtaacaacagagtgggacacattggctccacgggagactgtgcttagcaggagcttgggcctcttggggaagaactgaattagcaacatcacgaatgctgcttttgttttaccagctgccactgttaagttcttacttaatgaaagtatttgcttttccataaatacatgtaaatttcctacctcttacttgtcatagccagagaaagctctgtgagtggtaattaaggaaggaagcttctttaaaacaaatcactgtagttgagaacatccgtgtaagcaacaccatcctcaaaattgatgaatttaccaattgtcctaccctattgtaactttaaagcagtcacttaagtttattttaattaataattctttaattttaaaagcagtgtgcttatggtaaaagaatcaagcgcttgtggttataagataatcagagcaacccgagggattcactcccttgtttgaaatcctccaggggtttcttgtaacccttggagtgaaatcccagtgcctttccaggctctacaggaccttaccagatctgaactctccttcggcttcacccacctgtctcccttctttacgaccttgatttcacatccacactggcctctaatacaccaagtttattcccacgtcagggcctcggccctgctctccctctgcccagcgtactgtttacccatcagagtgtggctggctccttcccccattcaggtctcatcacgatgttcctgccatagagatggctccctgatcaccctatctaatgaccaccccccgcaccctgccggcccctcatctgctcgcatccctgtattttatcattgtgctctttatccttttctgaaaatgctttattgcttgctggcttattttctgtctcccttctagattgtaagctcagtgcgggtgagagtcttgtccattcagttatgtcatatgcctaacacttagaaaagggtccgacacccagtgaaccctcagtaaatattggcttaattggatgaagggcacttatgagaattaaataatgattaggctgagcatggtggctcacgcctgtaatcccagcattttgggaggccggatcacttgaggccagacattcgagaccagcctggcaaacacagtgaaacctcatctctactaaaaaaaaaaaaaaaaaaaaaattgccagacgagttggcgcacacttgtaatcccacatattcaggaagctgagacgtgagaatcacttgaacccgggaggcggaggttgcagtgagccgagattgcgccactgcactccagcctgggcagcagagtgagactgtttcaaaataaataaataaataaaaataaaataaccgagaattaaataatgattagtataggacctggcacattgtaaggacccaagagatggaagtttgcttcctttccctccccacctccccagggtgtgttttgaaaactgatttaattacactgttctgtcttaaatatattcacatggcattcaattatgctgagtacagtcaagcatactaggtgagtacaaaatggcctcgcaggccaggtacagtggctcacacctgtaatcccagcactttgggaggctgagtcaggcagatcacttgaggtcaggagtttgagaccagcctggccaacatggtgaaatcccatctctactaaaaatacaaaaattagccgtgtatggtggtacacgcctgtaattccagctactcagggggctgaggcaggagaattgcttgaacccaggaggcggaggttgcagtgagctgagatggcaccacttcactccagcctgggtgaaagaacgagtctctatctgggggaaaaaaaaaaaaagtagtaaagtacccatttaagtataatttaaatattttttaacttacttttccaggtcgtccttggtggaaggaaccatgaactggcatctccccctcttcctcttggcctctgtgacgctgccttccatctgctcccacttcaatcctctgtctctcgaggaactaggctccaacacggggatccaggttttcaatcagattgtgaagtcgaggcctcatgacaacatcgtgatctctccccatgggattgcgtcggtcctggggatgcttcagctgggggcggacggcaggaccaagaagcagctcgccatggtgatgagatacggcgtaaatggtgcgtgtgcacaattgctcactggcggagcctttgcctgagagtcttgtgacaggagggtttatggcttggtttttgctgacaaccccaagaagcagagcagccagaaggggatttgctggtgccacttggggcttggggtcagtctcttctaaagaacaaacactgtggtgctggcagttaggagaactagactctggtcccttttttgtacttttggagcttggggtctgccactaggtctcctttcccagggctccagccctcgttccagcgagggggacacttcctggcttaccgcctccatggcgcccagggttgagttgcgctgtgatcgtagatgtgcttgtgaagcctgtgagaggagctgggaaggggtggctgtggagggcccaggggcctcgtagtgatggagccatcctgggtcttgattgtggtggtggccacacaaatctgcacaaatgataaagttgcacagacccccctccccaagcccacaacaggagtgtatggaaaatgagtgaaatctgaatgcaccctgtggactgacctgatggaaatttcctgatgcaacgacggtaccactgggaagactgggtgaaaggcacgtgggacttccttgcatattgttttgccacttcctgtaaatctataattatttcaaaatataaagctaagcaaagacttggaaccaacccgaatgtccatcaatgatagactggataaagaaaatatggcacatatacaccatggaatactatgcagccataaaaaagagtgagttcatgtccttgcagggacatggatgaagctggaaaccatcattctcagcaaacgcaggaacagaaaaccaaacacggcatgttctcactcaaaagtgggagttgaacaatgagaacacatggacacagggaggggaacatcacacactggggcctgtcgaggggtggaaggcaaggggagggaaagcattaggacagatacctaatgcatgtggggcttaaaacctagatgacaggttgatgggtgcagcaaaccaccacgacacatgtgtacctatgtaataaacctacacgttctgcacatgtatcccagagcttaaagaaaagatacagatagatagatagatacgtagagagagagagcgagctaaaaaaattgttttaaagtaaggcccaatgaaaaagatttagtttgagttaaagaaaaacctttcttaaatgacccatttaactgcacgagcttcatcctctggcactgttttacttcagctgaggggtcttgcccagagccatgtcccacctgctgtctccataaatgcagtgctcaggggagcaggactggctccccccctcttcctggccaccagcaccctctgtgaccttgcaaaagtcacattcacatctaggtctgctcccttcgttggaaacaagggagtcttcctgcccgtgttcttccacccaggctggcccgaaagttctgagaatcttgactgcactggcgtcgtcagctggagagtaagatcagtgaggtggcgatttgtgtccttcagtgcctcgctctgcacccgcctccgactctgctcagcgtggcctccagggctgccagcaccaaatgcctaatctcactgctctgttgatgcagcattacacttctgtacgagtttgcagtttgttcacctgttggaagcatggaaggactaaatacttggaacacactcttctgccccttgcttggaagttcagaaaactcctggtgatttataacttcatggtggatcactgctaaaatttatgacctttcctagtgtgatccaggctgtgtcggccgagacagttccaaaatagcaactggacttttgttgtttgttttaatgctgagccacactgattttaagccattatttctgaagttctaagaatattggcccgttggccatccaccactgcctcacccctaccccaaaagggccaggagctggcagttggccttggaattgtctttcagcctccaaagccggccgttttcttacttgtagaatgggcctgcaccatagaacaattgtaaggtgtggtcatgggcatctaagagagggccatgcacgttgtaaagccctacacacgcccctgtttgtgggccctgagaagactgcccccctcccccgtgtaaaaggcctgaagaggacgcacattcagagtgacaaatcggctctttagaggaccatcaaggtgactctggcaggatgttttaggacagtgccattttgaagagaccccaagcgatgaagaaggatctgtaatttgagctctctttagaaacacatttcatccttataacttatttgcctctttttcaccctctcaaactaaatggagcatgtatgaatggctcatgtaaaataaagcttacgttgccataaaattaatctccttactctttgagcttgttaccaagtaaaaaccacattgttctggatggtggcccatggtaattttttatagtctttctaatgcttattttattcattttttttccaaaatagaaaaaaagaaattacattgttaaatctttggcaagaaaggaagtagcacttaataacgttagacaagaaagagagaaagcattaggaagttccctttgatttgttcccccttggctatagaactgaggactgtgccagcattcatactgacctggtgcccagaaaggctaccatgagaatgaggtctgcattgggaaggtggtgagaacaccttgaatattcctgttttgatgcagaagcacagttgatttttgagagcttcagtggttagactttaaccccactccctccttttcttaagaaataggcccctgagagaacagaagacttagtttcttgctactcatagctatcctgtttatactgttctgttatttttatttttgagacagggtcttgcttagtcacccaggctgtatgcaggggcccgatcatggcttactgcagcctcgacttcccaggctccagcgatcctcccacctcagcctcctcaagtagttggtatcacaggcgtgccaccacacccagttaattttgtatttttggtagagacagggttttgtcatattacccaggttgttcttaaactcctgagctcaagcaatccacccacctcagcctctcaaattgctgggattacaggtgtgagccactgcacctggcctatactgttcttacttgctgcaacataaaagattttaaaaacttttctagattcttatggaagtattgctgtatcttctgatttctcttttaggagttggtaaaatattaaagaagatcaacaaggccatcgtctccaagaagaataaagacattgtgacagtggctaacgccgtgtttgttaagaatgcctctgaaattgaagtgccttttgttacaaggaacaaagatgtgttccagtgtgaggtccggaatgtgaactttgaggatccagcctctgcctgtgattccatcaatgcatgggttaaaaatgaaaccaggggtgagtggccgcagtatgtcatttgattgcatagtttgtgaatgaagcatgagttagactccagggttcaaagtggtgtctgcaagtccaattcaatggcctgtgggttgagaaactcctggaccaaggaagctctattcagtctccctccttccccttcaatctgccattgctcactgtgctcctgggaggtgtttctcctgtagtttgggcaacagaacagaatccagcccctccactgtctcctctccttgccatatctggtctccagcatccttgcccacaggctcttgttgattttgaaggttttcttgctcattccttcctgcttttgcatctgcctctccctttacctggaatgtcctcctcatccttccaggttgattgatctctttgccttccatgcctcttgcttctgccattgccaaagacataggtaccctgttgtccgttatgattggcacatgattacaacttttacacccccccgattacagccctttccacatctcaaaatgattactcatttgtaagtgtctcttctcccattaaataaaggagagtctaacgttggtgttttaaaacttaatttgtaggccaggtgcagtggctcacacctgtaatcccagcactttgggaggccaaggtgggtggatcacctgaggtcaggagttcgagaccagcctggccaacatggtttatcccatctctactaaaaatacaaaaattagccagacatgctggcgggcacctgtaatcccagctacttgggaggctgaggcaggagaatcgcttgaacctgggagggggagattgcaatgagccgagattgcaaccctgcactccagcctgggcaacagaatgagactgtgtctaaaacaacaacaacaaaaagaaacaaaaaaacaaaaaaaccttaatttgtaacgtggaggtccagttggaaacatgcaggaggagctgtaggtctggaacaacaggagaatgtgaaggatgggagtacagatttgggaccttttttttatttttaattttttggagacagggtctcactctgtctcttaggctagagcgcagtggtgcaatcatagctcactgcagcctcaacctcctgggctcaagtaatcctcccacctcagcctttccggtagctggaactacaggtgtgcgccaccatgcctggctaatttttttattttttgaagaggtggggtctcactgtgttgcccatgctggtctcgaactcttgggttcaagcagtcctctcgcctcagcctcccagagtgctgggattataggcatgagcccctgtgcctggctatagagccttttttcatagaagggagagagtcaataggaagaagaagcccaaagacaaaacctagggaaactgtcgcctttcaggctatgtttcttaaaagtgtggttactggtgtccctgcatcagaattatctgggctatgtgttgagaaggcagatccctggagcccagcccactgcattggaatcgccgagggagtggctggcaactcccagtctgcctctgcctcccatcaccattcttacacacccagatgttggagacccattagcagaactagtgaagaggtggacaaagaaggctccagggagggtggaggagaccccaggtgacttgggtaaattcgtggcgtcccttctcagtggggcctggaccatgcagtctgggcgcccttcctaaaaccataaaccatcgggaggtcagcacacatgagggtgttcagtggagtctccaggtgtctggcatctgtaggcttgtgaagagtggtcagaagcagacgccctcaggactggttcttggtcctgactctgtggctggaggctgtgtgactgtgacatgtcattttgtcctcttagccgctgccttgatctgtagaatggcaatattaaaccacattagttagaccatgtgacagtcttcagagcacctggagaaaacccccacgtgtgctgggaagaagcatggagactcctgcagcactttgcagccctgtcagccccagctcctccgtttgtaacaaatatttttaatactctctttactattctgaaatgaaattcatacatcatattactctatgcacacacacaaatttttaaaaatttgagacagtgccaaactgtaatacaaaggaaaacaaaagaaatgtatatatgtagttcaataggtaaacccttgggtacaactacactcaaatacgtaataaagtagtcagagtctcagaataattgtgaattgacagctacaaaagcagacagagacaggcatgttgtcctggtgactcataaacatgagctgtgttaactattgctgatgcaattttttctgaaacggtgcaagacttttgataaatttctgaacaaaacaaagcacaggctctgcttgatttgcgtgggactcacattcctggcaaattcagcatacatgaaaaggatgcaaaaacaaaaacaaaaacaaaaacaaaaaacccaaaacaccctgtgtttacacacgaaaaagaacgaggttctgggctcagataattataagtaggtgtcctaccaatgcagagatccggtggggtattgaaaagccacgggagaagcagcacaattcttcattgggtgggactgttttgaacattgcaggacagatagcatttctggccactgcccactcaattaaaaacatccctgccaaattccaaactgcctttacctgggggtgaactgcccccactgaaaggtacatgaccacatggtagagctcagaagtgacttggagctcaactgtttgtgtctggaaggttgctgggtctgtctcacggaaatgatagttccttccctacagagagtgggagagcccaacgcgcaggccttttgcaggaggagacccatcagggatgggtctggcctgttgacctctgcagactcactcatccttgtactctatgttccagccacacaggcctcttcctagtccccttacccaccatcctgtctcctgttggagaaccgcacacatacactcctgctgccttctctccctcttccctggttaaggccaactcatttctgtaccataccatgagtggcaggcatgaacattaaaagcacacattctgagtttgaatctcggttctgccacatactacctgtataaccttgggcaagttatttaagcttgctttgcatcagcattctcgtctgtaaaatggagagatgtaatagtgatacctattcaaataattctaacaacaattaaggctggtgtgaggatgtgaataatacatagaaagcatttagcaaaggactctgcacttagtaaatgttcaaccagtgtgagctatttttatagccatttctgaggtactgtccatctcagacctcaccaactaggtcaggtcaccttcttagccctccatagccttgagtaattccacttccagatatttatttaaattgcagctgtatacttttccaagttattttatgtcagcctgcacctctctctcattcgtagtttttgagaccagatttccttcttggtttcttatttaagagagtaccaggcacatggtaggcaggtaggtatccaaggatggatggatggatggacggacggatgatagatgcatgtctgtggcagttactgatggcaggtttccatgtgcctctttgcctctaaactatgcattttctttttatttcttcatgtccccttattatatcttagtcctcccaggggcagttggaggcattatttgtctctgtaaaaaggggctaaggacatttctacagacagttattgagcactgcctgtatgctccatgtagtgctaggagtaagcaaaaagtgaatggcagagtctcatgcaggtctcagtgtagctgagggagacagacacattaaaattggctagaataaaatactgcaggtgtcatggtggggccaggcattgggctttacagaaatcgggagcagagacatctcttaggaggtggcgaggatgatcagagaagatttagaagtccaggggaccattgagctatgtcttaaaggcaagtaggaattgaactgggtaatgttcccagcagaggcaagaaacaacattcactattaggaagtcaattatgagcttgctagtgggatggcataaagttctaacttcgctcccacaggacagtctgtttgcagccagctttgtgttgagttgaatgatgtctgtttatggcttagatattttccttctttgtcctgacttaaggtggcgttagtgcccccttgtggaagtagtgagtggtgatggaactgtcttagcagcacgctgtgggaaacttcagtgtttatttatcatgatttatgtaaacacttgtttactgtacatcagaatcctcttgagtttcatttaaaaggacttaatactctcacccctgaattagatattcttgcttcttcaaaagctgttggttttactctcaccatttaaagtagtataacttgtatttatattatgtatttatacacatacacacatacacacacacacacacacacacacacacatatatttgagctaataatgcagtgaactaagttttaatagctttgggcattactgatccctatttaaaaacacacatacatacagacacacacacaactgaaccttcaaagacctcagaataattgtgaagctaactgtataataactgtataataaaaggaagctaactggaagaccaaaccttcagccacaggtagcattttggaaggctctttcagccacgggtagcattttggaagcatcctgaaatgagaagaattgtgttcactccttcactcctgatacaagtaagacggaccattcccaacgtcttgtaaagagcattttccttcaaaattaggagttctaggacagaccttaattttttctgtctttttaaagatttattttatcttattttttttagagacagggtctcattctgtcacccaggctggagtgcagtggtgcagtcatagctcaacacagcctcgaactcctgggctcgggcgaccctcccacctcagcctcccaagtagctgggattacaggtgcatgccaccatacccagctggctaatatgtttttaatttttattttttctagagatggggtctagctatgtttcccaggctggtctcaaacttctagcctcaagtgatccttcctcctcggcctcccaaagtgctgggattacagacataagccactgtgcctgggctttattttatttttcattgacccataataattgtacatatatggggtacagtggtaatgctttgatacatgtatacaatgtgtaatgatcaaattagagtaattaacatttcagttacctcaaacgtttctcatttctttatggtgggaacattcaaaatcctctcttctgttgtctctaatattagcaccttgcttgatgcctgacccataaacaaagacactgattttttgtttcctttcttctttaagcagttaggaggccttgtgatacccagagattccaaaataatgtttgatgtttctaaaatcttaagagaaatgaagcattcacccttaataacatacaggctgaagtgtttatttttgactgggattgaattaaaccaagtggagcaaaacaaaacaaaattgtttatcttgtactgaccagaaacccttactatcagtcatttattggcaaaaaaaagaaaagaagaagaagaaataattcattatcaaatgtagcttatttggatgagtaagatttttttaaagcctggacttgcagggaattgataataaaagaatttcttgatgaaaagttttgtaacccctagctaggggtttctaaagtcttttctgtttctcttttaacttctttttaactttaatatttagtgggggaggggaacctagaaagtacaaaagggtagtttaagaagattctctttaacactccttaaaaatcctttgatttttcagtctacctgatgacagctgccatttgccctcaagccggccaccagtcctgaggttatttttcccttgtttgttctttggcttcacagatatgattgacaatctgctgtccccagatcttattgatggtgtgctcaccagactggtcctcgtcaacgcagtgtatttcaagggtctgtggaaatcacggttccaacccgagaacacaaagaaacgcactttcgtggcagccgacgggaaatcctatcaagtgccaatgctggcccagctctccgtgttccggtgtggtgagttcatgctcagcgaagcctgttctaggatgtgctggcggcagaaaggcccttgagtgctttaacttaattccagagcaaatctaacttttcatcttttaaaaaactggggaacagagcagggtgctgagaggcaggatttttataaagctcatgtaaatctgtgttatgtacaaaagttaccatgcatagcataatatgcataatatatgcataagttatgtacaaaaagtattaatgcatggcgtgtgtagtaggctttttggttgaaaacttaaagatgaaaggacaattcatgaaatgagtataagtgagcattaaacacagcaactcattagcagtcttacattaccaaattaaaaattggatttctttttttacttagcagatcagcaaaaattaaaaacattggtaaaatccttcggtggctttggtggggaggaagcaggacccttgggcactgttcgtggcagggatctgtggtccgaggacttcctcggggtcctggctccagcagtcccgctccagggaatttatactgtgaacataagcacacaatgacaaataaatagaagccaaatacaaatatacagtggaacgtatgtgatcatgagacttagatttatataaatggaaagattatgcaatatatgattgatttcagaaaacgagatataaaacagcagatatcaatctcgcttatgtaaaattcttttctttatattcacacgtcaatagagataggtctcagaggatcttcagtaaaaaatattaatggtaggatttcagaaaaattatttctgaatttgaaaaaactttttcgagatagagtctcactgtgttacccaggctagactacagtggcacaaacatggctcaccgcagcctcgacctcttggactcaagctatcctcccacctcagcctctcatgtagctgggatcacaggcatgcaccaccacggccagctaatttttttactttttgtacaaatggggttttgccacgttgcccaggctagtcttgaactcctgggcctaagtgatccacctgccttggcctctcaaactgctgggattacaggcatgagccaccgcaccaggctcaaatgaacttctaaaatcactttgcctgggatatgagccggtggccgtgttagtgtttcaatgaagtgattttattttaggtcaatcttttgtacacactttatagtccataaaaaaataaaataaaaagtgagggggccctcatttactgtatgtttctcttgctgaaaaaaaaaacaagttaatagttcaagattaaaatgcaaggattccattaacattcctatggaagattttaaaatgtttgtttttacagaaatataacatgaatttcttgagtaaacaggctattcccagagagttacatgtcagggtagcttttcatttggaaactgatttgcctaggaatatacatgtgtgttttatagaaaataatgcacaaatacattcttattgtcaaagatttaaaccctacagaacccccacagtgtgttggtatcttccctccactttccccgattcatgcctctcttctttacccgcttccaccctgctctgggcccccttgccctctctcttcttgctgggtttgctgctgggagtctgcaggcgataggaaggacagaggagaaaggggtcagggtactaacttcccaagcccccccttacagagtcatgggccagctgcattcctctaccaaaggtttcagcttctgccagggggtgtgcccaagagctctttctctctgggtcaccacccctctcttcctccctcccagcccaaggctagccatggtgcccaccgtttcttgtccagggtactgtccatcatgtttctctgtatcctgtctatgctttacaactggtccttcatcaaattctgcttaaatggcccaatttgatgtcttatctgtttactctccaccctgactgatctgtacctaattcggaccagaaaaagaaagtccgctgctcactcctgttctcattccctcacaagtaaacacggcgaacagcttagctcacccttctcaccctcctttccatgcctgtcatcaggtttcactgaggaacctggaactggatgcgactctgttctgggccatgcagcagggcatgagagtgtcataagttccctgttttcttgccttggccaaaacccagcttatcatgataagatagggaaggattgtcttgacagggctgtgaagaaagtaccgccatttgtggtgtccccaagtggctgattgtttccatttccacagactgtccgtcattttctgcctgtttcctcactctgacctgcaggagtggcccagctcgagctgctgtgtccaaactcacagggcccagggtgccacctgtcggatgcttcctgggcctcagccacgcctcactattctgggtcactttgccaaaacattgtcattcagtttatctgccttcttgactgttttccccaagatatcattaagagctctgagaatatttgcttgataacaaaaagagagtgaaaactagaagagaagaaaacccttctgatttatgccccataaagtagaagtacttcaagggtagaaacttttctattaagaaaaagagaagccttaaaatcatttttagtagatttatatttcatgctcattgcaaaatcctcagtatacctccatgtacaatatatatggcagaaaccaaaagttcccctaaaatcctatttcctaggataaaattccctattaagtatcaagtttgtcatttgagaacctttctaggtatatgtaaaatatgtctatgaaactttttacatacataggattgtactgtagtttctgttctataatctgctttcattagagagtggacaactttttgtgccaattcataaggatttacttgatccttttatcagccacataatattccataatacaaatgtatcatgctatcctatggaaagccatctgcttttttcctataacaacactgcagtgagtattcttgtacataggtttttcaatatttgcatcagtaaatttctaaaggtaatttcctgggataggaataggaatggaataggaatctccaagtcatagttgttacaaatgttttatggttatgaatttagacatttgagactttattttggaaaaaaaacatgaagaataacaaatttatatttccatcttcttttctcctgagtttctaactcatacctgtctgttcacattacgtcttaacttggttgcctactaaattctagttgcatagatgaaactcatttatgccaaggcaccatggcacacacctgtaattccagcactttgggaagctgaggcaggaggatggcttgagcctgggagttcaagatgatcctcggcaacatagcgagaccctgtctctacaaaaaaatgtttaaaaattagccaggcatggtggtgctcacctgtggtcccagctgtttgggagtctgaggtcgggggttcacttgagcccaggatgttgagatgcagtgagccctgatcacatcactgctttccagcctggggaacagagcaagaccctgtctcagtaaataaatatatgtattgcccttgcccatttagttctcaacccatcgttccttagcagcaaatggcaccaatactcacccagttacttacgccacccctccttccccagctactgtccccgaactccctttggactccagcctagaatgtagagtattgcacacgatggagcattttgctgttgtttttccaaaatatccatttcaatttctactaaagtgcagtctaaaaagtttcttaagtcctcaggaaatccatatttacttgtagtagaaggtaattagagggactttcatctataaaggtttcctgatattaaatatttaagataccctctttgattttacagtgtgagctcttaacatttcagtgagcctagttacgtcttccctagtagcacttaaagtggaaatcagattacttcaggggctttctggaaaaactgggtcacccaaaacaccacttagagaaagttctaaatctcctccacatttttaatgcttgattcttcacttattgtctcccattagaagttttgttgaccaccattcatctaagagaaaatccttattttctctttttcacctccgctccttttcagaatgaatcaacctattatacttacgtttttatacactgcagaaatgacccttgttaaagaatactcagtctgccttccagaggttaaagaatagagagcatcgggtaggggattttaaagggaaaagctctgggacgatgagaggctccatgctctgacacaaggctcccaagtccccttccttacttgattcattctgcttgggagttgtgcttttatcagctacgtaatattccatgtagtttacctgggtgggccgattttgtgtttagactgtgagcagggacctcacattgcaagaagtgaggtattttacaaagcttcttacatcaaaagacggcagtttttgctatgggccagcttatgctgagcactttgtatgtgttgtctcaatgaattttcatagctctgtaaagtaggtgctattattgtaggcttttacagataaagaaactaagacttggagtcaaggaacttgccaaagtctcagagctagtgtgctacaagtgcaggatttgaatacaggtcttataaccccagatctcgtggctttggcacgtgtcctctataaaaggatgcagtacttgagtgaccaggtagaaagacagaaaaggtgttattttatctcccagctcctcaaggcaccaaataaaggtaagcatgcgtatgtctgatgcaccctggctaccactggtcatcagcttctgtggtcagaagcagaaggagtggggggaaatcagtcatcaagcagaggtgactggatgcggttcatggttattaatattactgatcagttaataatgggtccagccaaggatggattaactggtgaagctagatgatctctctcctcccttgaacacattccagctcataacttttcattattcattacttcaatcctccttaacagaaatagtaaacatttctagaagcagttaacacctccaggtccttatttcatgccctggagcaatcacttattaaccacttcccatatttcacagtttctgaaaattagctccgccagaatagagatttaatgttttcttcaaggattaaagagctcattaggaagtgatttttttctcactttcccattgatttttccgtttctgctgagaccattttgttatgcaggctaagagtaaagacgaagaatcctctctttcattcttaggttgccgcaagacagaagccaggcttgggtgagagttcaacacacatgggagctgaggcgagctgcacccgggttactgaacagccctgcaggaaatgcagtgtgctaggaccaggagagccccagttcctctgccagttctctatgttgtttcttccttagggaaaaactgtagtgtcatcctgtggtgccatatattctaataacctcagtatttttatgatatttcagtgttcatcaagtacactctctttccctctcttggtatctttctcttcatctctccctctgtccatccctcccaaccctgttctatggagaactggcatattgaagttccctgtctcaaaggcagtgattggcacatgtcatctccaaagaaaagatcagtgaaaatcgtgcaagaaacttgctttctctcttcttgtttgctgaactccctaagatgtggaatctgttttgtctatagagcatcttgcaggtagactgttctccaaataacatttgagaaatgctggcttaaattattcttgggttttcattagtaagtagaagtaccataaagtatctaaaactccagtggtgattactggaatgggtgaagagtgaatagggcagggtggtgaagtaggaggaagacaatccttggcattagactctcctggctcctcacttcttagccgtgcatcctttggaggttacttcatttctctaaaggtggctttctcaactgcaaaatagcactgcttacgcctaccccgtgaggtgctgtagatcctcagcctgttgaagggttgatatgggcctggcacagagtgagccctgtggatgctctgtatccctgtctctcttcacctgcacatgtaggcttatccaaaatgaggactagaggtaataaaattgcaccatgttgggattcctgctcaatgagtaaattttagccgctcttgtcccaaaaacagcaaaatgggtaattatgtgagataatggatatgttaatttgctttttcatagtaactattttactatctatatgtatcccataacgtcatattgtgtaccttaatatacacaatacactttatttaaaaaaaaaaaaaaaaggaatgattctaaggcagcttgaatgtattcttttattcatgtgagggtcaacttcttgcaaagcactgaattttaagcactttgtgatttagttaaattctccttaacagaattaaagtgatttcagtgattcccaaaggcattctgtctagactgaagaaaggagaattcttcactggggaaggaagaaataattgtccttgtctttgtccttctaaggaagctatttgtggaaaagggaagttctccaactgagttgctctctgaagctatcccggtgaccagcaagcactcatcctgcttctagaagtcaacaaggatacactgaacctgcttctgatttctttagggtcgacaagtgcccccaatgatttatggtacaacttcattgaactgccctaccacggggaaagcatcagcatgctgattgcactgccgactgagagctccactccgctgtctgccatcatcccacacatcagcaccaagaccatagacagctggatgagcatcatggtgcccaagagggtgcaggtgatcctgcccaagtaagtggccccttcccctcaaagaaaacagtggcattattcaatcagcaggtgttatgtcggacaccagacaacatgaggcgaaaatatggcacatcatgaagcctgttctgttctgcagaaatttcatggtgggattacgaggccgtgcttttctaaacgcttttattcaatgcctgtgcttcctgtatggtaagatatggatcataagaaaggagagagggcaaccttggtctctaaacctccacatgagcataagcagttcatggtactgcaggggctttttgacatatctcattgtatttaaaagactgaaaacacacgtgtgtcatcatagtatggatgaaagtacagtgaggtttaatagaactccatgtgctttcataaggagcttcattttagttatttatttatttaactagaagttcatgaagaccaaggcagccagtttttctattataccctaagagtaagacaaagatggaatttgagctgttatgacttgaagccatgggaaaagtaaccccaaatcctgtatgaatcttcatgttctaacaggtcagagaatgctttgtccagaactgtgaagaagcaatgaatgttgttccctttctatgaacttttcaacattgctgccttcccaccatccagagcttttaacaacccaggtcttggtggtagtggagagttctaatagcttttgattctttggtcaccgagttaagtaatcagagtaagacattcacaataagtattactaattctctcaagattttttttttttgtaaaataagccttcaagtaggcaatgcttgatataaataaataaataagatggtggcatcgtaggcctcaatgggtgaagaacaggttctttaccattatagcccatctgtggtgagaatctgcccacgtctccttagtgctcttccacaggatgagatcaaatctgataaagcatcctctgatgacagtaactgacatttacacacacacacacacacacacacacacatatacacacatatatatacgtgtgtgtgtgtgtgtgtgtgtgcatatatctccatatatccccaaggccaagtaggtcacaaatattcaagaaacctatattatacccaaatataataccgtgtcacctatgcctaatctttgctcctgttttaatagtaaaatactttcagaatctcaaaaggggctgggcgtggtggctcacacctgtaatcccaacactttgggaggccgaggtgggcggatcacgaggtcaggagttccagactagcctggccaacatggaaaaaccccgtctctactaaaaatataaaaaattagccaggcatggtcgtgggtgcttgtaatcccaactacttgggaggctgaggcgggagaattgcttgaacccaggaggcagaggttgcagtgagccaagattgcaccattgtcctctggcctgggccacagagcaagactctgtctcaaaaaaaagaatcccaaaatgaactatcaggaatgtttctcctctcttttgaccatctccaatcccaataaggatggcaggtcttagagcagccaagatggatatggagaactttagttggatatggggaagaataatagatattccagagtactaggaacttgttaacactcaacctccacgtcagtataaaagaaagtatgtttgtagatcttcctaagtattggaacagggggcccattacacctgagggtgggagcgcctattcttgccgttagtacatatgactcattttgccagctaagtgtttgagagaggagttgtcctttacttatctggtatttaaatttggaattcaaatttaagatgcaattcagatcggtattcagatattaactttaaaagaatcagtttgtaaacatgcaccgactctatcatgtagcatttatagcctcgtgattttttttctccatttctgctttcatgctaggttcacagctgtagcacaaacagatttgaaggagccgctgaaagttcttggcattactgacatgtttgattcatcaaaggcaaattttgcaaaaataacaagtatgttcaatttaaaatgtatttgtatacttgaagaaagtgttacaaactgagactgatttgtgcagagaaaaaggatcagaattaggaatgtgttgccctgaaactgtacaaggtttcatttgatacattgccaaattatgctattggccttcgtttatttattgaccttcatttatttattttttccttttatctttttatttcaatagtttttgggatacaagtggtttttggttacatggatcagtttatatagcgatgaagtctgagattttagtacacccctcccccgagtagtatacgttgtactcaatatgtattaatagatttttagctcctcaccaacccaccctcctccttctgagtctccataatccattataccactccgtatgcctttgcatacccgtagcttatctcccacttacaagcgagaacatacagtatttggttttccattcttgagttacttcatttagaataatggcctccagctccattcaagttgctgcaaaagatattatttcattctttttatgactgagtagtattccatgatgtgtacatacctcattttctttatctagtcattgctcttgaccttcatttaaatcagcgtccccacattttgcacgtacatttcatgggaagccccagtgactacctaaaggagtatttcatgtattgcttttatgaatattggctctgacttaggtgttgtcgctctgttttcaaatgccaactttttccttttgcttgaaaaaaagtcaagactgcagtcattcactgtacccagatatgtattttggcatttcatgctcattaatatgaaacgatataaattcaaatgaatctgattaaaactttcctttgccaaagcaattaaggcatgcttttcatttgccagcagtatatgtacctttttctagagttatgtttgaatggtcagtcctttgttctttaaatttagaacatagcaatctttccaaggaaaagccatggcttgaacattatttgcactccagtttgcaaataactttgagtggtaagaaattagctcattaccagcttcagttgcatgctagtaaacacctagtacctgttctggggacaaacatgactcccctggtgaacctgcagctccatggatattctgatagccgttcatccctcatgactcaaactcaggcctccagcccagcagcattagcatcacccaggagcttgtttgaaatgcacaatcttgggtgtaacccagacccactgaaccagaatccattttaacacagtccctcagcccagcaaagactgagaagcaccattttcatctgcacttttcccttcaaggttgttcatggtagctgaaatactaaatggggggtgttcacaggaagaaccaggtgccccagattctcctggaaagtcctctttaacactgcatgtgacttgggccctataaatgtgcatctcagtcacaatttggtcatattagagctgggcattggtgcagatagttcacaagcagatgacacaaaaagcacattttccctttgcatccagacctatgtcccatccagactaatatcaacttaagtttttcattctctgtgaaagctacacccagtgggtgttgctggaatggtcagaatttgctgagaagtaaagtgagttcaccagaatgtccctgaggcacaactgcatttacacatcggcccttccaggaaaatctaaactcttctcttgttcgacactcttctcttactagcatgcccatgagatgagtggctgttgtgaagagccaggacttactctgccactaactagccgtatgattgcagggaacattacttaacgttctaggcctcagtttccccatctgtaaatgctgtctgaaatcccttctgcatctgcattctgtaactgaaaaataatcttgttgccttgctgcttccagaaaaccgggcttcctttttaaagctctgctcttttcatttttaaaaaacaattctagtgatcagaattgaattgatagaggcactaaatcatttgagggcctgggcccttctccagaagtgagtatcacagttcacttagcagggactgaaattcacaagtaacagctgtctgcagccttcaacaccaggactgtcagaggtcatgtcttctgacactttaaaaattggaatttgccatggctttgagctttgaggttacttccccaaccaaccaatggcctgcctatcaaacaaatgctgatactgttttattttctggaagcagggtcagaaaacctccatgtttctcatatcttgcaaaaagcaaaaattgaagtcagtgaagatggaaccaaagcttcagcagcaacaagtaagcactgggtcacgtggcagggcttcctctagcaggggagcaaacacattcctgtatactcattggttgagcaaatatgtaatgcaccctctttccagccaggcagtgtgtgtgggttaaccctcaggagacagcagtgagtacagacagactgaagacctgtaaccacaaagctcagaatctgtttcattaaagaaaagcatttcagtgagagaaattcctctaggacaggagtcagcaaacttctataaagagccaggtagtatgtatttcagatttgtgtgtcataccatctccattacagcttcttagctctttcactgtagcatgaaaacagcaatcaacaatacaagtaaacagatgtggctgtgttccaataaaactttatttataaaaacaggatttgtcctggtagacttgccttgaggaaaatagtttgctgacccctgctctcaggaggataaaacatgttctggcttcttactggcaaaaaagaccaatcttcagatttgaacataaaataaacaacaagtacttaaaggaaaataggcaatcaggtctatccaggataaaccgaagaattcgccagcatctgttgaattgcggcaggattgctgtacagccttccttgataattagaacatccacatctgcttcctcctcagtggtttacataatgaaggagaaaacagaacaatcgtaagtcagttttttcacccctcattatccgtaggaaaatagatgaatagatttggccaactctgtgagcccataaagtgaaaatcttagctacacttgcagctgggtcaaatatctctggtcattgaaacataccagttatactcacaatagatgtgttattgcctttctcgaataaacgttttaaaaattcctttaaagaagcatttaaaacaaagaccctgaaataagagggttggaaattttaagatgctttttgtcttttctaggtaattttaagtaacatctaaaagttattgaccagttttgctgagtgtaactatcaggaccagctacatagtttgtggggtcctgtgccaaatgaaaatatggagccccttgttcaaaatgtataagaatttcaagatagcaacagcagagtattaaacccagtgcagggccccatgtaaccgcccaggtcctcctgtcttagtccgcctgggctgccatgacaaaataccgttgactgagtggtttaaacaacagaactcacacttctggaggctgcgagttcaagatcaaggtgttggtgttggcaggtttgtttctcctgagatctctggatctccggaggtcgccccctccctgtgtcctcacatggtcttttctccatgtgacacatccctggtgtctctcccacttcaaataagggcaacggtcctattagaatagaaccctacttaaccttcattacctcctcaaaggcattatctccaaatacagttacgttaggggtttggggcttcagcatatgaatttggggggagacacatttcagtccataacacctgctatttaatatttgtttttaataaccctgggtaaaagggcttgccccagcataactgcagctgtttcctttataacatcaagcccaagtgttcaatacttcatggggtttgagcaagaggactgagctattgcaacaggcatgtggtagtaatgccacacacctaccctcccgtgaggccctggttcaggcttattaaatggaaacaagcctggcagacgaggaatggccaagacccatgaggctaaagaagtttgctttccaagtcagatgcctacacctggtgagtggaacagcagtataaggtagtaggtcccggatgagtggtctacattccagtgcagaggaaacctaaataatgtgccaaaggagaaggcacagacacaaaagctaagaattggactgggcctttatatacagaaaagatttagagaagctaaacaggaccaggggtcgggcgcggtggctcatgcctgtaatgcccgcactttgggaggctgaggcaggtggatcacttgaggtcaggagttcaaaaccagcgtgaccaacatagtgaaaccctgtctctaaaaatacaaaaattagccaggcgtggtggtgcatgcctgtaatcccagctactcaggaggctgaggcaggagaatcgcttgaacccgggaggcaaaggttgcagtgagccaagatcgcgccactgcactccagcctgggtgacagagtgagactccatccccaaaaaaaaggactgggggctttatcagcaaagcagatggtgtgaataaaaaatagctaataacaataaatatgcattagatgtgtttagtggcaaacactgttctaagagctataatatatcttatgtcatttaattatgtcatttaattctcatcaaaactctatgaggagtaagtatgtttatcagagatggtgcttgtgtagaagacatgagagagtaatgtaaagggcctggcccaaggtaggcttagtaaatggtgaccattgagcctgttgtaacatggccagcctatggaacaagcatgaagtgtgtcttcagacaccagcctctgagggtccatgaagctagctaacttgctggccttatgcttacatggtctcatgtaatgtgcacaacacattttccttttcttcccgtagctgcaattctcattgcaagatcatcgcctccctggtttatagtagacagaccttttctgtttttcatccgacataatcctacaggtaagtgactctcctcttccatcatgccctctctgttagaatttcaaaaggtatattgcactcttcattatatccaacagtggtgcccatagtccatttccctaatgtcaatagttgcagacactttgaataatataaccacccatgttaaagagataggaaaataaaggctgtgtttacagatgtgatggaatcttttacacactgacaggattttaggttttgcggattgttgtttttaacagagaggctcagcatccctttggaacacttttgacatctattgacttttccatatttatataaatgtggtggttcaattttgctagaagctatataacttcaacttttgtgtattagtctgttctcaccctgctatgaagaaataccctagagtgggtaatttacaaggaaaaagaggtttaattgactcacagtttcacatggctagggaagcctcaggaacctcacaattacggtggaaggcatcacttcacagggcagcaggggagagaatgagagccgagtgaagtgggaaaccccttataaaaccatcagatctcatgagaactcactcactatcacaagaacagtatgggggaaactgctcctatgattcagttttctccacctggtcctgcccttgatatatggggattattaacaattcgaggcaagatttgagtggagacacagagccaaaccataccactttgtaagcccactctattgttataccttgggaattgttaatacagtagatttttgctctgtgagtcatggttcaaacttggctctggccttaagcctcatctttaaaatgaggacaacagtagtgctgactgcttattacaattatgaagtataagttcatctttgtagagaggttggcttcttgttggtacaagagtaggcactaatatattttagcttttactattttatttaatcagtaatatgagatagttccttattctcttatctcattgcatctgtgatgttctaattggcatgccccagaactgagccagccaatgaggagcttctggccacatgtggctatttaacattaactttaaaaattcaatttctggttgggtgcggtggcttatgcctgtaatcccagcactttgggaggccaaggcgggtggatcacctgaggtcaggagttcgagaccagcctggccaacatggcaaaaccccatctctgttagaaatacaaaaaattggctggcagtggtggtgggtgcctgtaatcccagctacttgggaggctgaggcaggagaattgcttgaacccaggaggcggaaattgcagtgagccgagatggcgccattgtactccagcctgggtgacagtgcaagactctgtctcaagaaataaaaaataaaattaaaattcaacttctaagtcacactagccacattttaagcactctctggccacatgtgactagtggctaccatgctagacaacaaagatatagaccatctctaccactgcagaaagttatactggacactactgagcaagaggtcaaacatgattgtttcccttcccttaaatagaataccttccatcttattttaaggattattaatttacagagtcatgcattgttttcttttaattctgtaggtgctgtgttattcatggggcagataaacaaaccctgaagagtatacaaaagaaaccatgcaaagcaacgactactttgctacgaagaaagactcctttcctgcatctttcatagttctgttaaatatttttgtacatcgcttctttttcaaaactagttcttaggaacagactcgatgcaagtgtttctgttctgggaggtattggagggaaaaaacaagcaggatggctggaacactgtactgaggaatgaatagaaaggcttccagatgtctaaaagattctttaaactactgaactgttacctaggttaacaaccctgttgagtatttgctgtttgtccagttcaggaatttttgttttgttttgtctatatgtgcggcttttcagaagaaatttaatcagtgtgacagaaaaaaaaatgttttatggtagcttttactttttatgaaaaaaaaattatttgccttttaaattcttttcccccatccccctccaaagtcttgatagcaagcgttattttggtggtagaaacggtgaaatctctagcctctttgtgtttttgttgttgttgttgttgttgttttatataatgcatgtattcactaaaataaaatttaaaaaactcctgtcttgctagacaaggttgctgttgtgcagtgtgcctgtcactactggtctgtactccttggatttgcatttttgtattttgtacaaagtaaaaataaactgttatgagtagtaaaaataaagctatttctctgctatttgaaaatacaatagaagaaactgagccttttagacattcgtcagcctcttctaataaacctttgtactatgtaaacatcaggaaattc

SEQ ID NO: 28 - DNA, 152112 bp, Homo sapiens
cctccgccccaccttccctgcccgatgaggggcagtggctgccgccgtcacgtgtgctggcagccgccaagtgaggccgcttttgcgacgcggtgacagccaaatggtgcgacaggaggagctgcagccgcggccgcagcgcccgcacggagaggcttgaggcggctcctggcgtcgcccagagggagcgactagacgaacagtccggtgagggcggcgagaggaagcccgctacgagtgccctagctccccgccgctctcgatgaaccggacggaataagccgcgcctccagcaggggctgcgcctccatgaatccctagttgtttttttttttttctttctctcccctctcctcacccccaccccgagccccgtcccgccttctcccttcgccagaggcggccgcgtccaggtgcggagtccataccggagcgcaatggcgtccaaccccgaacggggggagattctgctcacggaactgcaggtaagggccgcggccctggtgagaggcgctggcggaggagacagggagagagccccgcgcggcgtcggggaccgaggaaagccctgcggccgccgcgcccctagcccgctaagtgcggaaactccgggatgtcactcgggaaatgcttccctcggggaaccgcttccctggggagccggaccctctcccccgccaaagccctggcctgccaccgctttggtttgattctgcctaccagaggggaccccatctctgcagccctgctgcagcgggagcctgctctcgcctggtccccggagaggccggcccgtcgccccctccctcggtgtcagagctacccgcgaacgcccctgttgccccctcccttcgcgcggccgggccccgccccgcctttcctccgtacaccgctccttaaactcctttgaatgactcccaagctgttttcttgtccctccccctcccctcagactccgcacaaagagcgcccccataacttccagcccctagacaagtttttttaaaaaacgagtctcaccaaatgtttgcttcacttcagcagccctcttcaggtgacagagtttctttcctctattttgagggttatctttttcttttcttttcctttctttttttttttttaaccgagtgataaatacagggtgcctttctctgctacccctgcccagatccgggagctcagatgctgatgcttttcagactttcattttccctctcatttgagcaccagagaaagagctaataagttgtttactaatgagaaagcagtcgactaagggaaaacattgggcaccacatgtctgcaaaagatgagagcaaagtagatcgcttagttaagtcatgtcgagtagcaatgttatttcccatttccagataaatatttgataatgtaggcacgattttctttagatctctatggtgtacatggggacttaagctaccctgtcgggtttttcattacttgggagtgttccagagatgtttgttttttgacttaaaagttattttgctttattttaatatagttatcttttagctactcaaagattgtagatgggaattaggagaaaaaaatagcatgcctgcatttctttttgtgtgttggacagttaattttttttaaaaaaaagactaaatcaagaaattctgaagagttgatgtcaaaattaagtattgcaactgcatctaaatttcttgtttaaatatactttttaagaaatctctttataagtttggtttcttgtgcagtcagacgtaagcttgaaaactttggtataatggttgatatttcctccacaaaaatagagactttaacaatgtatatcaatgcagtgttgcacatttagaatcctttggtaatgcaaagctgaatttcatataattgaaaatgttgctatgtagtattttaattacagttagccttttataagcagatcttacagcataccacatttgctaaatgaatggaatttactattttattaatagtaaataatttacatgagcttttaaaatgaagatgatgtgaggcaagtcagaaatactttacattgcctggtcttgaaccatgaaaaacatactttggttttgattgagaaagatgatagggtcacttttcttttgaattgagcagtgttagagttacaatatatttggcattggtacttgtatgttatagaaagttggcataaaagacacctactttggcactggaactgaaaatatattttcatgtgtattaataacatttaggatcttttaattaataagatcaattttgataataacaaggaagcaagcaaagaaggaagaaattttaaatatgatgacctagaaatacgaccaaaatagaggaatacctaaagttaagcttctagataaactgaaatataaccccttccagaaaaagaatagtttttattaagtgttaccttataggttgtcatatatccaagtcattttcttggtttatttgactcccagttttgataaaagttattgcatttaaactttatcgtgtttattaaaatgtttgcgactattacttatatcaacacttaaagataaatagtcataaagtttgcttctccaaatatttccatctattcagactttttatttcattgggtcctgaaacttagtgtacagcaaccaagtatttattaaacttttgtttcaagattcacttttttaaaaagcttctaaattgtttgaatttagactgaaatactgtttaatatgaagttcttaattcttctctgccatacagattttaagtatttaagaagttttgtagccagttttaagatgtatttaatggttaaaactgttactttgctatgtatcctgtctcaggaatacttgtttactctgaaagttacatattacaacctggctttaataaaattgatatttatttagaaatatatccagcttttcattattttttcaaattgtagaatttgaaatactccactgcttgagctggaattggcttttggtcatggaaaggcaaagtaagaaaatctgaaactacagtattctgtcttgttaattactgtaatagcatggagtaatgtttttaagtattgttagtaattcaggaggcttattcaacaaggaagcattaataaactatgtaaactttggtggctagaggtttcaaggtataaggaagaatatttactgtagtaaaaataaaaatcggctgtttaaaatggccaatttctaatttttatctcataactaatttgttgtgttgtattctctttttttatttgaagtatagcagaaaacagacatttttgcaatgccaaagaaactaaagtctatttccaagaaacctggattaatgaaaactgtaaagaatctcagaatgaaagtgttggctacaatggtaattttgtagaatgcagaccaaatattgagcagtgtactaacaaagctaccttgttgattattggagattcattttcttcatcaaaatgcccaataaagtgttggtctgggaatcttaaattccattctcagcagattttatttagatagaggtaacttgctcaagtggaaagttgagatagttacccttaaattacaggggttaatttcaccaaacagttatgtagtatctaccaaagctatattggaggatataaagatgacaagataggtttttgctttccagaagagagtatagataattgtactagaagataattataagagactacaaataacattttaaaaattatttgctatatatcagacattgtacttagtgtcctatacaccttatttgatcttcacaacaatccaataaggtaggtgttatttccatgttgtggatcaggaaacaagttcaagaatgttaaggaaattgctcatggttacattgtgtgtctgagtttgaacccaggtctgtatgtttcccactacactattcttttttttttttctggagacggagtctcgcactgtcacccaggctagagtgcagtggtgtgatctctgctcactgcaatctccacctcccaggttcaagcgattctcctgcctcagcctcccaagtagctgggattacaggcacctgccaccacacccggctaattttttgtatttttagtagagacggggtttcattatgttggccaggctggtcttgaactcctgacctcgtgattcgcttgcctcggcctcccaaagtgctgggattacaggtgtgagccaccatgcccggcgccactacaccattatttaaattgccacagttctggggaactataaatgttttgcatctaatgttatagttgtatgaactttctacaaattggccaaaaacgtaattaaccaacattaactttacactacttgttagctccgtctgtaacaaggaaaaatgatttctacattccacttggtagtctataatttagcagtgttttattattgtagatacagtctaatatttcacaaagaataatagtacaaataatctttttacagggtttcttcattaagaattactgtttctaatgaaaggtgtcacatgcttgcccaaaacttcccaaaagatttaacattactctgtagactgtgctttgctttaaaattttatactcacatgtaacctagctctgtgtttgacacttagtaggtgcgcaatacattgatgagaatgctccatttgtcacgtaggaggagggatgtctaggttattttaagagaagttcattataatctttgacatatgaaattacgtagttttctttaatttacatttctaatcccttctcccaaaaatattctctttaaaagtacaaaagggatttctatagtagttacatcattcttccatatagcacactggtagtttactcatttaatggaaaatgagaagacggcatctaattttgcagtgacactggaaagtggaaggtctgagttgggaggattaaaattttagggtggtttgggggttggtggtatgagaaggtaaacagggtagttaagacagactttacattgttttcaaattagaaatgtaatgcacatgtattacagaaaatccagaaaatgtggaaaagcacaaaagaaaataaaagttgctcatagttctgtcacttagagactgacagactttttccacctaaaagtcccatggctgtagagtccattttttcttttttttctttatctcattttacttactagaattttgaagaaaaatgaagctcagagaattttaagatagaaatcacagtaggttaaaaacttttttcttgccactggttctagatgagtggatctaattagcttttattgccttttttaatctcaaaatatttcaattatgagtcacggctttattaagaagaaaagtgcaggctgggcatagtggctcacacctgtaattccagtgctttgggaggctgagacaggcggatcacctgaggtcaggagttcgagactagcctggccaacttggtgaaaccctgtctctactaaaaatacaaaaattagccaggtgtggtgatgtgtgcctgtaatcccaactacttgggaggctgaggcacaagaattgcttgaactcaggaggcggaggttgcagtgagctgagatcacgcaactgcactccagccttggtgacagagtgagaacctgtctcaaagaaaagtgcagtagtatggatttagtaatagacagtaatgaagtatagcaacaatttctttgaataatatagcaatacagtgtgtttttccggcttaggtttgattgttgctgctcttatagactaccacaatgtttgtaatttgcagcgcatactttgctgaattaaacatactaaataactttccaaatatttcttgactaccaagataaaagtctgtgttaaaactagtgttactaaatgatggctctaaaatggatttttttgtcatctctcattagtgtaatagagattaggtctagtatcatgcaattcctaccattcacatagtgttgaaatagggacaagtaggggcaccttttagacatcatctctttatcccagagcttagcatctgattccttgggctctcttatttctgctttttgaatttggcaatggtaaattttcatgccattcatcagaagcatgtttacttttaaacaaataaagtagtagtttgtaaacatcacctaaaataatgttactttcataccataaatggtatttgaataaaacagttaattctacattattccctcataaaatatactgtgctgataattgtcaaatgtctatattatttcaaaagccaattttactctacagtatatgacatttaatatgatcaacttttgatatacagcagagttcaaacttgacagcaaagttgaaaactagttaaaagctttaaaaagatttaaaatttagagtgggaaaaatatactaatgaaaaagtaattccttaatgaaacagaaatagagaatctttatcttgatgcatgtctagcttgtcttaattttatctgatgaaatcttgtttgaaactagctctattatcatacttggtttttttttgcaatcacaaaaatgaaatttgtgtaacattatatacataaatattgcctgtaaaaaatgaagatcaagaaagcatgggacagtgtacttgatgacagtaaacaccttaaatgtgaaggtagtgttgaagtgcctcataaagatgagtggatatacaagacttacataatattgttaggatttatctcttttagaaatttgtcagtgacttatcaaattggtgaaagttttactgccctggctcataagtaccttaatttaatggaatgtagttatgacaaaatttggaatttatttttgattatagaagacataccacacaatacatgtgctgagagttttttatttattttatttttatttttatttttgagacaggatctcgttctgtcacccagcttgaagtgcagtgacgtgatctcggctcactgcagcctctgcctcctgggctcaagtgattcgcccatctcagcctcccaagtagctggtactataggtgtgagccatcatgcatggttgatttttatatttttttggagagacggggttttgccatgttgcccgggttggttttgaactgctggactcaagcagtccacctgccttggcctcccaaagtgctaggattacagatgtgagcgtctgtgcctggcctgagtatcatatattttacacattaatcatactgttttcccttccctgtagttgctaccttagggattctttaaggaggtgtttgttctccatttcagaattttcattgaacaaattttatgcaacttttggatttttaaaaaatttgttaaacatcaggcacactgcattggattaatcacctatctgtctgtcaatcattttaataagtactcatggaccaccactccccctctctcaaaacaagctaggaactttaacctacgtatagttttcctctattctatccgtctatttccaccttcttgtcatctaggtcatcatttttgagtcctgtgttcattctcttccttatatagtagtccctccttatccacggtttcagttacccatggtcaactgtggtccaaaaataggtgagtacagtatagtactataagatatttataagtactaagatactttgagagaaaccacactcataactgtaattacagtatagttataattgttctattttattattagttattgttaattgcttactgtgcctaatttataaattaaactttagcataagtatgtatgttaaaggaaaagtgtaaatagagtttagtactgttcgtggttttaggcatttactgaaggtctctcggtggataaaaggagactactgtgtatagtttagttggacatataaatctaaacatcttttagttgtttgtatagaattgtgaatataatctttttgaacttgatttttcacctgttataaataagatttatccacatttttgcatgttgctatagtcattatttaaattgctatataatatttcattgagtaaaatattcattaactctactttggtggatatttggatatttatccactctcccttgttgggcagttattttccattttttgttttgttttgtttgtaattataagcaaagatcctatggacagtctgcatgtttcctactgtgcatgtgccacagttcctattatatacctagaggtagcattgctgcctcacagggtaggtgaatgttcaacttaagagatgatgcagaactttcaatatggttgcaccaatttatattcatattagcaatatatgaaataaaagatcctttggttatccatcctctccaacacttgatattctctttttaagttttacaaatcataagggtgtaaaatgttgccttattgtggtcttgatgcgcattttcctggttatcactgatgtagaacacttctttttatgtttgtcggcctttttacgtggcttcttcagtgaaattcctatttatgtctcttgcctatttttgtttttcttactagtttataagagttctttatattgcttatgttaatcctctgtgtacattgtgaatgtcttctttcagttcctaactttttcgctttcttttatggagttgtgtgggagggacagttttaaatgcctctaccttctttggcaaatatttggaataatttacatcgttatcatcaacaggcttgtatttaatatctattgtacatttggtatagaaagggtaaagttatattaatagtttatggcctggggatttgtaaactatccaaatgaacagccataggaagttgtataaaatattgtattgcttcacacatgctaggcacccaaatgctaggttgatttagttaatgagtaaattcagaagcaaagaaatagcaaaaattatacatacacttcatcagttgcttattttccaattccatacctctctgttgcaaactacttattattagtcattaataatattttattcttttgtttaaagggcagtatattccgtaagattatgtgagtcagttatttaggtattttcatagcttgccattaaaatgctggagttgatcagatttaatactggatataaagcaaaatattaatcttctgaacagtttactagttcagaagtttacaaactcggaatcctaaatacagtttttgtcattgctgtgcatcttttgataaaaaaaattcttaagtcaaatttgtccattgtttatcatacagtaagtcctcacttaatgtcattgacgggttcttggaaactgactttaagcaaaataacttataatgaaaccagtttcttttttctcatcagtgttctaaggaaatgatattataaacaatgaaacattagccagaagtggtgatgcacacctgtagtcccagctactttggaggtggaggtgagagaatgacttgagcccaagagttaaggctgcagtgagctggaatcgtgtcattgcactctaacctgggcagcatagtgagaccctgtctcaaaaaaagaaagaaaagaaatgatattgagcgaaacagcattattaaaggacctgaagcacattgtttttcttaaagtctcagttccaagaacctatcagcagtgttaagtgaggacttactgtaattgcttttcatgcccttttaaataaattattccctatcctgggtttaaaagatagctacccaagtttgctcctaagaatcttgcagttttattttttagatttaagtcagtttatctggatttgttgttttttaatagacttcatattttaaagcagttttaggtccacagcaaaatcgagaggaaggtctagagatttctcaaataactgcgtccctacatatgtacatatgcattatcgacatcctccacaagagtacatttgttgcagttgatgaacctatattgacacatcatcatcatccagagcccagagtgcacacatcttggtgttgtgcattctatgggtttgtacaaatgtataatgacatgtatccagcattatagtatacagaatagtgtccctgcactaagcttattctctgtgttctacctattcatccttccctctcctccatcccctggcaaccactgatctttttacagtttccatagttgtgcgtttgggaaaatctcatgcggttggaatcatacagtgtgtagccattttacatgggtttctttcacttagaaataagcatttaattttcctccatgtcttttcatagcttgatagcttatttctttttagtactgaataatatcccattgtctgtatgtaccttagtttattcattcacctactgaaggacatcttggttgcttctgttttggcagttatgaataaaatgctatagacatcctatgcaagtttttgtgtggatgcaacttttcaactcctttggttaaataccagggtgtccaattgtatggtaagaatatatttagatttgtaagaaactcccaaactgccctccagagtgcccgaactattttgtattcctaccaacaataagagtttttgttgttccacaccatctccagtatttggtgttgtcagttttctggattttggtcattctaataagtgtatcatggtatctcatttctgtttatttaatagcattgatttttgaatatggagataggtctgagttattttaatgtttaaaaacattttgaaggccaaggcgggcagatcatgaggtcaggagatcgagagatcacagtgaaaccccgtctgtactaaaaatacaaaaaattagccgggcgtggtggcgggcgcctgtagtcccagctattctggaggctgaggcaggagaatggcgtgaacccgggaggcagagcttgcagtgagccgagattgcgccactgcactccagcctgggcgacagagcgagactccatctcaaaaaaaaaaaaattttgaaatgtctgtcagacgtctttataatgcaaatttaaaatagagcacttttcagcttttaggatagaaacatctacacatagctttattagcctaactctaacttgcaaaaattaatcaaatatgattaattaaaattaattaaaattaatcatttgattaatcaaatttgataaattcttgccagttagagttacatcatgctaggttatgtattgaactatacctgaacttatccttacctagctcagtaatacctcactttttccttattatatcaatttgtggttcttttgtttttttatctcctgaagctttgggttagtaaaggtcatccttgtcttaactcttattgacacccatcccattccccagttgtggctcaaactttttatgttgttttctgtcatccaacctactcctgctcttttgttctcagcatatcactcatctctatgtagtgatacgtgctgttcaaccacgtgagtttcctcaagttttcttgtctttactttcagatttcttggaatgttagccatcctttttatttctactgaattttaaggaaaaattgcttcttcttggtaaggttatactttcctgggcttttgcttcctctggaatatcatgttttactcttttgcagggtggggctttgcattatccactggctcttggcttaaaaataagttaacgtctctcatgtttttattatactctttaatactgttgtaccctcaaatttctttcttttttaaagaaatttcttagatgccttgtctaccgtttatttagcttactcatatatgacttctgtctcagttattctgttgaagtggttttcttaaaggtatcatgacattctgttgcttctagtctttagacgcaattgatactgctccagcttcctgaaactattgttaattaagctttgaggaccctgcactatattggttacttttctttcatcatacctgcctctgtttgttactactgcttttgtttggtaactccttttctaccttaaatgttccacctatttgtagcctattttcccattaatttatccttcagattaaccaccggaatctgattaaccgccaaaaccttgtttagtaacagttgcagaaaatagaaacccacttaaattagcttaagcagaaattggattttttgaaaagctatggggttgtatcacttaagggtaagatgtatagccagatcccatgagtactaaacaggaaactggatgttttctttctagggctacatgttctcttttctttaagtatgtgtactgctttatgtctctgtatactggttctctttgctctccttgcctgtggtctccaagttgcactcctaacttctaaatttacattaactacaagttcattgcacatagaccacagctgactgactgagttgctatatgtcacaattctaaattcttagatgagaaaatctgagtggccttagtcagtggaacatgtgtccctgatccagctaactatggcagtggagggatgagattctctagtatcaatatggcttcaagaaacctcttgtgaggttgggacagactattttctgaaaagggattctaggttgagaattctagggattctcctgcttaaatgtttcagttactttccatcgattatagaataaaatatatttatacttttcatcatctgacccccattttttctgatttttctccctatttatcttacactctggaatattaaaactatttacatttctttgaaccacactccctatctttgcatatgctgattctggttttaagaatactaatattgcttgtctgtctgaacagcatttgacaaattggacaatccttaaaattctgataagaaaatcatattcattgactatatgaatatatttatatctaataaaagttttacttaagatatatttttgattaataaatttagggaattggtcatgaagcattttgatacatttgcaaattagtctctgattttacagctcctgttattgaataatatatcacttaatatggtaattgttacatgtctctactactttcaagacaggaactaggtcttactcctctttatgtcgctagcaactgacatataggttatgcttaataaatgcttgaataaataaatgaacagattttaaaaaacattatatgaccaatctgccagacctgacttctctaaatttccaaaagctattcttcccctggctgctagaaatctgctagttacttttatttgactgttgcttcagtctcttcagttgtttcttctacttctgtatcttgagttcattcattactttgccattgtttaagtgtgggccttcattatcatttggatgattataatatcttgatattttacctccacctcttttgccttgttctgctgttatttaaactatgtacaattgctagattcagaatttgtccttagcattcagtgactccttaatgcctgtgggatatagtcctaattccttagctaggcaatccaagctgtcattgttgtagccccaaaatgcttttcattcttaagtcttactcatgtaagcagcttattttttcaggcatactatgattagtgatttttcctcacctgtatttttactacattctgtcagctggaatacttcaaggccaaattcaaattttgcatatttatttttttccttattttcccctactcatgttcagtctctcctcaaaacttaagaatattttctatctcatgacatttattatatattgcattgtactgtagttgtttgtatcctacttcattttctcttctaggcttaatgcttaaaatctttgaaggaaaggactatatttttaatcttcatcatttacccctttagccctttagtcctgaagaaagtagcttgcacatagcagtgttgagactcagaaaacaatactctacaatgaaggtcttagaagtagtctcagaaacaaaaggactgttttattttttaacctttttttgtcctcttgtctctcagttttatttttcctccaaggctagccatataaactagaatccatctttttaaaagtgggtcataggaaccagaaccaccaccccccttttctttcttccccagcagaagcaagctttatttagcactgaccttgacagagattcactcaaggacccccctgtacaatgaacgatgactcatgcataaacaatgtcctcaacaagttttacagtaaacaagaaaatattctttatggttgtttttcaaagcaatctttgataaaagctagcacattaatgttagcacttggtgaagtcaattctggaaggacctagacttcgccaagtgctttgttatataatcttttagaggcatcaaagacagtattaataggcgcttacattgcttaacttttaaaaaatttttgaaaataatccatgtgtacatatgcacggataaatcaaaagatactgaaatgtataaaattagaagtaaagaccacttccttagtactttctcttcaattagtcctactccccagaagtagtcacattgccctttattatttctggaattgacattataattttaaatttttgatttatcaactttagaccatatgcattaacctagtgatttataggtgacttacaaaagacatttaaccaacttctgttttcccttcttcatttcctaaatgtgttagttacattattatttttagtttttttctggtagtttcctttacgactatgttttgatttgtagagccatagcatctattaactctgcacaaaaatgagagtttcagtacacttccacttctcacttcccttgcacggactttatttattgcattgtattgtttttacattgacaaggtttatatttctattatattctttccttccttccttctttcctgtttctctctttctttttctccctgacccctcttctgcatagttcctacaacatctttcttaaacactttatgaacatagttggatcacctggactgttttctatgtctttaaacttaccttcgtatttcctatttctttaaattttctctgttttgggagattgcctttatttttctttcggctcactaacttcagatgtatatatttcattgtgcagcccattcactgcctttttgcaaatgtatttttaattatataagtatcttgttttttttgcgtataggctagaattatttaatgtaattttaattttttccccttttttaaaaatttccaactttcaagttctggggtgcgtgtgcaagatgtgcaggtttgttacataggtaaacatgtgccatggtggtttgctgcgcagatcatcccatcacctgggtattaagcccagcatccattagctattcttcctgatgctctccctgctgtcatcccccaccctccagtaggccccattgtgtggtgtttccctcgatgagtccatgtgttctcatcattcagctcccacttagaagtgagaacacaatggtatttggttttttgttcttgctttagtttgctgagaataatggcttacagctccatccatgtccctgcaaaggacatgatattgttccttttattttttttttaatttttttattttttatttttgagatggagtctcgctctgtagtcgaggctagaatgcagtggcgcaatctttgctcactgcaacctctgcctcctgggttcaagtgattctcctgcctcagcttcccgagtagctaggattacaggtatgcgccaccacacccagctaatttttgtatttttagtagagacagggtttcactgttttggccaggctggtcttgaactcccaacctcaggtgatccacccaccttggcctcccaaagtgctggaattacaggcatgagccaccgtgcctggctaatctcattccttttcatggctgcatagtattccatagtgtatatgtactacattatctagtctgccattgatgggcatttaggtggattccatgtctttgctattgtgaatagtgctgcagtgaacatacacatacatgtatctttgtaatagaaccatttatattccttagggtatatacccagtaatgggatttctggttgaatgatatttctgcctctaggtctttgaggaattgccacactgtcttccacaatgcagaacccgttttaaaaagtcagtcataaagcctaagaatattattctaacttttccttcttccttttttttgtgtaacaccagtcataaaaaaattacctgacctacttcgtttgaccatagttcataagatccctattttagaatccttctccatacccaaaagtaaggagtacatactcagagaggcacacaaacacagaagaatgagacaggtcttgcatggtttccccactcagtctattaacattagatcattccctttttgtccaatcacgttacggctgtccatactttgttgaacctaagcgtaaaaaaggacagcttcccctgtatttttggttcttcattctgaaggctttcatgtcacgtaaaactatgatcaaataaatttgtatgccttttcttctatttatctgcctcttttcagtagttctcaacaaaccttcagagggcaaaggaagtattcacttctgtctgacagtggctgctgattaatgtttgttgagtaaataacagtctaatgtctgaaaatcttccaattttaatttgttacttaaattttttctgcttttattttggtatttatgagggagcagaactgcagtatatcatttttcccttggtaggtacataattttatcaccttaagtcatataataattgaattcccacatctcagactgagattttttttaccggcagaaggagctgtcaccagtcacaacagaagtagataataatagtaatgtttattattaaaaacaaatgataatgaatacatattgatgttacttaatcgttaaaacaactcagttgaggccgggtgcagtggctcatgcctgtaatcccagtactttgggaggctgaggcgggtggatcacctgaggtcaggagtttgagaccagcctgcccaacatggtgaaaccctgtctctactaaaaatacaaaaattagcctggcatggaggcaggtgcctataatcccagctactcgggattgtattttctttacagcttgagagctatacttttattaagcccttctactagagttagccttatcttttaaggaagttaaaataattgtatacagttcctttttttgagttttgtttttctggttgctcaatatgagacttgctcaaggccagctctattgtcagtgcctataaaacgaaacaaaacaaaaaacagcaaagcattaagtattctgactttattttgtctagccttgtgacttcttaaaagagctccagtttactcttcacagttagatcccataaagtaaaatgcccagctattgggtatggtgtggtaatgtataataatataatttgatttattttgggattactgtaactggtttttgttttattgttttcaataaatccgagtttccatctttgagaagcatctatttcatttattgatgactttagatttctagttagctactatatcagaagtacttatttgactgaattatgaaaagtcaaagtttaaattacatttggatagcaatagaagagatggctcaaagtcacacacaatttctaagtgacttgtgcaacagtcattgtaggactttagaggagggagtggtcatttgttttgttttgttttttgtttttttgagacagagtctcactctgtagcccaagctggaatgcagtggcgcaatccgggctcactgcaacctccgcctcctgggctcaagtgattctcctgcctcagcctcccgagtagctgggaatacaggcatgtgccaccaagcccagctaattttttgtatttcagtagagatagggtttcaccatgttgtccaaggtggtctcgaactcttgagcccaggttatctgctgtccttggcctcccaaagtgctgggattacaggcatgagcaaccgtgcccaggttgggcacagtttttattttaagataagcttaaaatgggatagttggaattttctaagaggaaaagatgttcaaggagggtaggataataggaaccaaatgcatgcaagcagaaaaattaaagaaaattttctatttttcattcagaagactgctccaaattatgtcctttttattttttcatactttgacaggcaaattatgtaataactaaagttggccttgatatatttgctggttctaaactttggtcagcagcttgagaaggaaggcattgtgttatttttattctttgagatcaacagtaaaaaaagatgtaaagaatgtaaacaaagaattgttttattttatcccatattcttttttacttggaataatgcagatttcactacttgaaaaagttttttagtcaattatgtgttttctttctagtatgatgaaagataatttaagtcaaggagctatagagaaaagtaaatgaaaactttcaactgcacaggtttcatgagatattctagtttcagttgaaaactatttttctgtgtgatagtttcacctttgggagaattagatttaatttgcaacattgtgtttgaagtatttcatattctgttccttgcttaaagaggtaaatttctttattgttgtggtcagggaagtctttagctaatgatgcagtgatattttgtgtaaacttttaatgaattaaaatatactaaagtccctgttaaagtgtctgcttatgagagagcatttccctgatgatcttattatataaaagtagcagtacttgtgatcctaccttcccgcactccttgtcccttttctccttccttggtttattctgtaggttcaataaaatgcagtagttatttatgtaaatgatacttaatgtgcgctaaataaatatccttgcctaaccttcattcatgctgagcaaccaaagtttttttttaatgtatagtgagagatccttttaaactggtggtgatggttttgttttatgttaattctctggtaaattttcatatgttacaataaagtctaaaacgtgcagatagttttatgatgtaaagcacgatcttattaatagattttaattactattaaacaacttccgtatatcagacatgtgctggttttattttataatcttaagagatattggcttatttttgttatttatatatttttaaagtgaggcttagagaggtaaagttacttgcctatgttacaaagcaagttagcccaactggcatttgaaactaggtctgtctaaatccaggctaatgatcttttctgtgagtattttgtattttaatatttcaaataattataggggtttattgatatattttgtaataagcattttcctctcatcacagaatatgacttggtttatagaatgacattttactatagagttctaggaacaacataatgtggtaaaaagcaaaggctacttagtctatagttccatgaagtattgagatgggaatatatcagtttagcttaatctcattttacaggttagaaaaatgagacccagagaggtttaagtgatttactatcattaagtagaggaattgattctagaaccaagatatcctaactctagtagaagataatttttgatgaatatccttgatattagtaaagggaggctaatcctgtatatagaaaaagaataagagacttaaaaaggctttttttttcagcatccttatttaaagagatataattgacatacagtaaatttcacacatttaaaatatgcaatttgataagcttgacatgctgataacaactgtgaaactgtcagtgcaaacaatataatgaacatatttaccactccaaaagtttctttgtgtctctttctaatctcctcctgtcattattccctttctcccagtccctactttctgtcactatagatgaatttgccttttgtggagtttttatacaaaaagaattatacagtatgtactttggaggtggggggcatggcatctttcactcaaatcatgattttgatatttcaccatgctgcagtatgtatcggtagttcaatcatttttgttgttgagtagtatttcattatatggatatataataccataatttatctttacctgttgatggatatttgggttatcaccaggtttgagatattacaaataaagatgttttgaacatttgtgtagaagttttagtggacttacactttcattattcttgtgtaaattgcctaagagaaaaatggctaaaacatatagcaggtgcatgttttgagtttttaaaaagctaccaaatgattttccaaagtagctgtatcattttacttttccactagtagtgtttaagagttctggttgttaaccaggtgcggtgttttgcacatgtggttccagccacttgggaagctgaggcaggatgatgaattgagcctgggaggtcaaggttgtagtgagaggtgattgcccctgcacactccagcccaggcaacagcaagaccctgtctcaaaaaaaaaaaaaaaaaaaaaagagttccagttgctctacattcttaccaatacttggtacagttaatagttttaattttagctattctagtagatttatagcgacatcatactggttttaatttgcatatttgcatttattgaatgatgttgaaccatcttttcatgatcgtatctgctatctgtatatcctctttggtgaagtatctattcaaatcttttgtctatttttaaaaattgagttattttcttattgaatgttgagagtctttatatattctgaatttaatacctttatcagatgtgtgagttgcaaatattttcaattctgtagcttatcttttcttttcttttctttttttttttaaacagtatctttccaggagcagaagttcttaattctgatggatccagtttatcaacatttttcttttgcacactgtgtttttggtttggtatccaagataaagctattctcctgttttcttctagaattttagttttaggttttacatttagttttatgatccattgtgaggtaatttttgtttatggtgccaggtgttgatcaaagttcatatttttcatatggacatatttgtttcagcaacatttatttaaaaaatatattcttggctgggcacggtggtgcacacctgtaatcccagcactctgggaggccgaggcaggcagatcacgaggtcaggagatcgagaccatcctgctaacacagtgaaaccccgtctctactaaaaatacaaaaaaaaaaaattagccggttgtggtggcaggcattgtagtcccagctacttgagaggctgaggcaggagaatggcgtgaacctgggaggcagagcttgcagtgagccgagattgtgcccctgcactccagcctgggtgacagagtgagactcggtctgcaaaaatatatatatatatattctttctccactgaattgcctttatatctttgtcagaaaatcagttgttcatatatgtgtgcgacaatttctgctctctcctgatccattgctatatttattattatttttttttgccagtcccatgctgtatttattaattttttgccagtcccatgctgttttgattattggtgcttttttataagtctcggaatctgggagtattagtcttccaaatttactctcctttttcaaatttgttttgactatctaggttctttatatttccatataatttttaaaaccggcttgccaatttctagaaaaagtctatacggatttttgaatggggttgcactgaatcttagattaagaggagaactgacttccaaacaatattaagttgtctgttctatgataaacaaagtatgtctttccatttctttagatttcctctaatttctttcagcagtattttgtagtattcagtgtatgggtcttttacatcttttgttagatatgtctgtaagtactgcatgtttttatgccattttaaatggtattttaaaaatttctttttctgatcattcctagtatatagaagtacaattgatttttccatatggatcttgtgtcctgcaactttgctgaattcatttagtaattctggtagcttttttgtagtttctatagtgtttttatttaatgataatgctgtctttgcataaaaagttttacttctttgtaatctggagtgccttttatttctttttcttgcttggttgcactggctatgacctccagtacaatgtagaatagaagtggtaagagtagccatccttattttgttcctgatattagggagaaagcatgcagccttacataattcatgtaagattagttgtatgagttttgtatttgccctttaattacattggggatgtttgctgcttttcctgcttaatgtttttatgaggaaagaatgttggatttttatctaattattttttgtttctattgagacaataatggttttccttctttttttagcatcattgcacagtttttgatatgttttcattttcattcagttcagaatatgtgctgatttctttttgacccataggttaatgagcagtacttcagtttccaatttgtggacatttgtccagatatcttccttttattcctttctaattcattccattttggtcaaagaacacctcatttttttctcatctccagtctcattgtctttatgtttggtcagatgttttgggaaccattgttttatatatcttgtctgtttttggttttgttttgtttcagctgggagggtaaatctgcccatggctacttaatgttggtcagaagtagcagtctcctctcatacacttttttttttaattaggaaatatttcaaacatgtaccaaaaggctgagaataacttatgtctcttttccttgagtaaatgttctgcaaaatttacattgtatttttttaaaaataaacgttttatagatgtaagccctactttttttgacattcttcatcttactgcctactacgtttccttgctgtacagaggaaaatgtggcagatgaagtcttacattcattatattcttttacaagtttttttaaatttaattcttttccatatttattcaaggagatgcatgttaatagattggttttagcgacagtgtagtgtctcattgcattgcatatattataaatctgtttttttgtatagatgattatatgaattgcttatgatttttctcatcacaaacaatggtatgacaaaccttttgcattttatatacatgattatagcttatatgcatctagaaatggaattgctggttctgagcaaacgaatatcttcaagttagccatatgttgattgccaagttgttttccatattatagttccttttccttacagattatattttaatctttttccagtcattttggtaagaaaagatacctcattatcttaattgtatcttcctgattgtaacaggattggtatattttcatttgcttattttccattctggatccattttctatgaattacctggtcatatttttctaaccagaatattgagagaaagcaactcaaatgacattttacatttctttatctcagagcactcttagataatggtgaaagtaatccatatgtaacttatattcaaattaatatggttcttgggtctatagttgttctagtatttttctttccatgcatttttatttgttttgtgtatttgaaggaaacccagtctattggacagtattagtagtatatgggaacaagactgctgtttggttttattcagtagcatcactaacactaatgcagattgttaacctagagaaaaaatgttgaaattattcattattaaggctttccttaatacataaatacctggtgatattgtgtagatctgcagtggtggcctacctgttaaactcgaatatggttttgcagttgaacctgttaaacctgtagatcttgtattgtgtgaacagaaataaggaaactagttatgggtattaactggttctctataggtttttgttgtctaacccttgctcataatgaaataagtcattttataaactttattccatttagtagtaaagtataagatatttcaaagtcttgtgactatttgtgtttcttcggggtactgcttatatccatggaaaaaaaatgtttctttgttttggaatatatgacttgatgatacaataagtcatacttcaacattactaatcctaaattgtgattaaaatgtagtttagttttattatattcaacataatgtagtgcctcattgatgagaaatgaagtgtatttcgcaaataaattaatcttaggccttcaaacacataaaacttttttttttttttttttttttaaagtagagatggggtttcaccatattggccaggatgatcttgaactcctgatctcaggtaatctacctgtctcggcctcccacagtgctggcattgcaggcgtgagccaccatgcccggcccctaaaacactgatttttaacattgtttttggagattacatttatgtaatatatgtcacattttgctgcctgatttacagaatataggcagataattttacttgttctttaggcaagtagcagtctttatttctgtatctaatggcctttgtggttagtatgattcttttttttttcttttctcccagttgtattttgacattgagcagctgtctttccattcattcagcaagtattcactgagctcctgctatattcaaagcattattctggggcctgtttatataataataatcaattttttttttttgagacagagttttgttctgccacccaggatggagtacagtggcgtgatcttggctcactgcaacctccgcttcccgggtacaagtgattctcctgcctcagcctcccgagtagctgggattacaggtgcacaccatcatacaccgctaatttttaatttttttagtagagatggggtttcaccatgttggccaggctggtttcaaattcctgacctctagtaatccacctgccttagcctcccaaactgctgggattacagtgagccactgcacccggcccatcaaaatatttaagagtaatcaaatacactttcttctctcatgaaccttaaaatatggcaggggaagatagacattaagtgatgaagcaaagatactgagactctctggggcgagaggatcacacgttgagaactgctgaattgggataatgaagggaaggaagcatacaatcccaaatcaccattaaaccaaaagttgtttacaggattcaaaatggacataatagaaacttagggttaaaattagagccatattaggaacatatagatcattctaaaaatgtcactgagtaaaaatatacaggttaagaaaattagttgtacttggctagatgtaaacatatcacttgaacaaaagaacagcatacatgttattatttattcaaattgtgtattactccctctttttacaagaaccttaaaaaaaattatgctgggtctccagttgaacagtgccacttctcaattacacattctctttctccatacacatagccttgactttgagaatgtatcagagaccttgcaaagggaatggaaagtgggtatgtggtgtttggcatctgattggatgtggagggcaagagaagggacaggtaaaaaaatgatccttaggattggaggtgggtgattgtggattttggcatcatcaaaagaaatagggagactaggaatacagatgaaacatttgttttgagtcatgctgaatttgaaatcaatagactacctcaagtggtgatgtgtaaacagacagttagaaatgtaaaaccggtcctgggattcaaggtggagatgcactttgggaagtcatcggataatatttgaatcatgatattatataaattagaatatattaagtgccatattagtatagaacataggaatgataagtttaaagaagagattaattgaaggaatcttcctggaagtgagttatgattaagatctgttagaaaagagaaaaattttccaggcctattttttctcctattttatacttaatatattgaggagaaattttgcataagaactacttttattatttctttacattctatggtatttttacatgtaaaagctatcataataattatttgaaattaatgtagctgaacttaaccactattttagaaaagacacaattgaaacacacaatttaaggatttgccatgaatcttgtcacaaaccagttttctaaagctcagcatcactgatcattacagaaatgcaaatcaaaaccacagtgagataccatctaagactagccagaatggctattactaaaaagtcaaaaagtcacagatgctgtcgaggtggagaaaaaggaatgcttatacactgttggtggaaatgtaaattagttcaaccattgtggaagacggtgtggcaattcttcaaagacctaaagacagaaataccattcaactagcaatttcattattttgtatatacccgaaggaatataaatcattctattataaagacacattcacgcatatgttcattgcagcactgttcacaatagcaaagacatggaatcaacctaaatgcccaccaataatagactggatacaggaaaggtggtacatacacatcatggaatactatgcagccataagaaagaatgagattatgtcttctgtggggacatggatggaactgaagcccttagcaaactaacacaggaacagaaaacgaaatactacatgttctgtcttataagtgggagctaaatgatgagaacacgtgggcacatagaggggaacaacagacactggagccttttggagggtggggagtgacaggagggagaggattaggaaaaataactaatgagtactaggcttaattacctgggtgatgaaataatctgtacaataaaccgccatgacatgtttacctatgtaacaaacctgcacttgtacccttgaatttaaaattaaaagagagaagtggaaaaaaaaaagaacttaaggttttcttattccacttcccgccattaatataccacctttgcgtaatcagtctggacagttttggttttgaaacatgtttctatgttggaagtgtaagaacctcagatttggtacatgctgtcaattggagtagatatgatttttaattattttttattgagatgtcatttctaccaatagtaatcctggtagtattgattaaatgtgaaataagattgggatgaaaaaattgacttcatattaatgaggtgtttgaattgtagccattaaatcatagttatttaagttctcaatttggatatataatgcattttaataaaatgtatatgtatttggaatgtttgtagaatgcttataaagaaagtttacaattgtaggtagaaatgtgatcatttatattgttcaataagtagagaggtgaaatctctggaagtttcaaagctggagggataaaatgatgcttggggaatggcagtcaaaatttcaggaggaaggaactgtattttatgtaattttcttatattgtcctctacagttctaatataaacatatatgattggatcataaattatacttagtatgtgtatgtgagtgtatgtatacatgtatatatattgaactggcaagagaaatagaaacattatttttaatgtgggaaaattatttttaacttacttttttccctctaagccttcataatctagtgctaaggtgaataaactttagtgatacattattggtttaaaaaattatttttgttttacatatgatattttaggaatatattatgggcttaaaagtcacaactgttttccaatatgatctgaatacatttttaaagcaagttatattaaatatgtttctgtaaactgagagctaagccaccaacttatggaaagagtagcttgctctttatatcaccactgactagaataggatggcgcatataataggtatttaattaatttttgctaaatgagataattttttaggaaaaaaacctgtattctaagtataggatagatgatgtatcaaaatacctatatgccaaaaactgaattgtaatttatatctgatcagactgttttaggccactggtaccccttcccaggtttgcttttatactacctatggtggaatatgacttctgtaggaggagtgtactttcaattatgattttgcatactactaaaatttcttcaagacagtgaagcatactgtattctgaattattaagaatgtaatgatgtatgtgattctttcagacagaaaatactcagggtgtgttataaattattaaaaacattaacaatataccataaaatgtaaagtattttaaattaaggttgtaaatgagaatccatttaagacactaacttgtgaagattccagttgactattacttaaatgatacatttgtgccatcttagtagtttcgtttattttattttatgtttttattatactttaagttctagggtacatgtgcacaacgtgcaggtttgttacatatgtatacatgtgccatgttggtgtgctgcacccattaactcatcatttacattaggtatttctcctaatactatccctcccacctacccccaccccacaacaggcccagtgtgtgatgttccccaccctgtgtccaagtgttctcattgttcagttcccacctatgagtgagaacatgcaatgtttggttttctgtccttgcgatagtttgctcagaatgatggtttccagcttcatccatgtccctacaaaggaagtgaactcatccttttttatggctgtatagtattccatggtgtatatgtgccacactttcttaatccagtctattgttgatggacatttgggttagttccaagtctttgctattgtgaatagtgctgcaataaacatacatgtgcatatgtctttatagtagcatgatttataatcctttgggtatatacccagttaatgggattgctgggtcaaatggtatttctagttctagatccttgaggaattgccactcttctcttccacaatggttgaactagtttacactcccaccaacagtgtaaaagtgttcctatttctccacatcctctccagcatctgttgtttccctactttttaatgatcaccagtctaactggtgtgagatggtatctcattgtggttttgatttgcatttctctgctggccagtgatgatgagctttttttcatgtgtccgttgcctgcataaatgtcttcttttgagaagtgtccgttcatatcctttgcccactttttgatggggttgtttgatttttttcttgtaaatttgtttaagttctttgtagattctggatattagccctttgtcggatgaatagattgcaaaaattttctcccattctgtaggttgcctgttcactctgatggtagtttcttttgctatgcagaagctcttcagtttaattagatcccatttgtctattttggcttttgttgccattgcttttggtgttttagtcatgaagtccttgcccatgcctatgtcctgaatggtattgcctaggttttcttctagggtttttatggttgtaggtcgtctaacatttaagtctttaatccatcttgaattaatatttgtacaaggtgtaaggaagggatccagtttcagctttctacatatggctagccagttttcccagcaccacttattaaatagggaatcctttctccatttcttgtttctgtctggtttgtcaaagatcagatggttgtagatgggtggtattatttctgaggcctctgttctgttccatttgtctatatctctgttttggtaccagtaccgtgctgttttggttactgtagccttgtagtatagtttaaattcaggtagcatgatgcctccagctttgttctttttgcttaggattgtcttggcaatgcgggctcttttttggttccgtatgaactttaaagtagttttttccaattctgtgaagaaaggcattggtagtttgatgtggatggcattgaatctataaattaccatgggcagtgtggccattttcacgatattgattcttcctatccatgagcatggaacgttcttccatttgtttgtgtcctcttttattttgttgagcagtggtttgtagttctccttgaagaggtccttcacatcccttgtaagttggattcctaggtattttattctctttgaagcaattgtgaatgggagtgatttggttctgtatttgtctgttcttggtgtataggaatgcttgtgatttttgcacattgattttgtatcctgagactgctaaagttacttatcaggttaaggagatttggggctgagacgatggggttttctaaatatacaatcttgtcatctgcaaacagggacaatttgacttcctcttttcctaattgaataccctttctttctttctcctgcctgattgccctggccagaacttccaatgctgtgttgaacaggagtggtgagagagggcatccctgtcttgtgccagttttcaaagggaattctttcagtttttgcccattcagtatgatattggctgtgggtttgtcataaatagctcttattattttgagatacgtcccatcaatacctagtttattgactgtttttagtatgaagcgctgttgaattttgtcaaaggccttttctgcatctattgagataatcatgtggcttttgtctttggttctgttgatatgctggattacatttattgatttgcatatgttgaacaagccttgcatcccagggatgaagccaagttgatcttggtggataagctttttgatgtgctgctcagttcggtttgccagtattttgttgaggatttttgcattgatgttcatcagggatattggtttaaaattatctttttttgttgtatctctgccaggctttgctataatgctggcctcataaaatgagttagggagggttccctctttttctattgattggaatagtttcagaaggaatggtaccagctcttctttgtacctgtggtaaaatttggctgtgaatccatctggtcctggactttttttggttggtagactattaatcatttcctcaatttcagagtctgttattggtctattcagggattcaacttcttcctggtttagtcttgggagggtgtatgtgtccaggaatttatccatttcttctagaatttctagttcatttgcctagaggtgtttatagtattctctgatggtagtttgtatttctgtgggatcggtggtgatacctgtatttctgtggaattggtgatgatatcccctttatcattttttattgtgtctgtttgattcttctctcttttctttattagtcttgctagcggtccatcaattttgttgatcttttccaaaaaccagctcctggattcattgattttttgaagggttctttgtttctctgtctctttcagttctgctctgatcttagttatttcttgctttctgctagcttttgaatgtgtttgctcttgcttctctagttcttttaattgtgatgttagggtgttgattttagatctttcccactttctcttatgggcatttagtgctataaatttctctttacacactgctttaaatgtgtcccagagatgctggtccactgtctttgttctcattggtttcaaataacttgtttatttctaccttaatttttgttatttacccagtagtcattcaggagcaggttgttcactttccatgtagttgtgtggttttgagtgagtttcttaatcctgagttctaatctgattgcactgtggtctgaaagacagttcgttatgatttcttttcttttacatttgctgaggagtgctttacttccaactatgtggtcaattttggaataagtgcgatgtggtgctgagaagaatgtatattctgttgatttggggtggagagttctgtagatgtctattaggtctgcttggtgcagagctgagttcaagtcctggatatccttgttaactttctgtctcgttgatctgtctaatgttgacactggggtgttaaagtctcccattattattgtgtgggagtctaagtctctttgtaggtctctaaggacttgctttatgaatctgggtgctcctgtattgggtgcatatatatttaagatagttagctctttttgttgaattgatccctttactattatgtaatggccttctttgtctcttttgatctttgttggtttaaagtctgttttatcagagacgaggactgcaacccctgctttttttttgttttccatttgctgggtagatcttcctccatccctttattttgagcctatgtgtgtctctgtacatgagatgggtctcctgaatacagcacactgatgggtcttgactgtttatccagtttgccagtctgtgtcttttaattggggcatttagcccatttacatttaaggttaatattgttatgtgtgaatttgatcctgtcattatgatgttagctggtcattttgctcattagttgatgcagtttcttcctatcatcgatggtctttacaatttggcatgtttttgcagtggctggtaccagttgttcctttccatgtttagtgcttccttcaggagctcttgttaggcaggcctggtggtgacagaatctctcagcatttgcttgtctgtaaagtattttatttctccttcacttatgaagcttagtttggctggatatgaaattctgggttgaaaattcttttctttaagaatgttgaatattggcccccactctcttctggcttgtagagtttctgccaagagatcagctgttagtctgatgggcttccctttgtgggtaacctgacctttctctctggctgcccttaacattttttccttcatttcaaccttggtgaatctgacaattatgtatcttggagttgctcttctcgaggagtatctttgtggcattctctgtatttcctgaatttgagtgttggcctgccttgctaggttggggaagttctcctggataatatcctgcagagtgttttccaacttggttccattctccccatcactttcaggtacaccaatcagacgtagatttggtcttttcacatagtctcatatttcttggaggctttgttcgtttctttttattcttttttctctaaacttctcttgtttcatttcattcatttgatcttcaatcactgatatcctttcttctgcttgatcgaatcggctactgaagcttgtgcatgcgtcacgtagttctcatgccatggtttacagctccatcaggtcatttaaggtcttctccatgctatttattctagtcagccattcttctaatctgttttcaaggtttttagcttccttgcgatgggttcgaacatcctcctttagctcggagaagtttgttattaccgatcttccgaagcctacttctgtcaactcgtcaaagtcattctccatccatctttgttctcttgttggcaaggagctgcgatcctttagaggagaagaggcactctggtttttagaattttcagcttttctgctctggtttctccccatctttgtggttttatctacctttggtctttgatgatggtgacctacagatgaggttttggtatggatgtcctttttgttgatgttgatgctgttcctttctgtttgttagttttccttctaacagtcaggagcctcagctgcaggtctgttggagtttgctggaggtccactccagaccctgtttgcctgggtatcaccatcggaggctgcagaacagcaaatattgcagaacagcaaatgttgctgcctgatccttcctctggaagctttgtctcagaggggcacccacctctatgaggtgtccgttgggccctactaggaggtgtctcccagttaggctactcgggggtcagggacccacttgaggaggcagtctgtccgttctcagatctcaaactccgtcctgggagaaccactgctctccaaagctttcagacagggacatttaagtctgcagaagtttctgctgcctttgttcagctattccctgcccccagaggtggggtctacagaggcaggcaggcctcgttcagtagttttgttttgatgtattaagattagtggagaccaactttacaatgagaaaaatgaatgagataaaagaagcttatgtattaggttgagtataaatttaaatatatcctaatatttctcatatattgaaatataccaagtaacatggcatttgaactgaaaatttcttaacatcttttcaaggaaatgtgctctcagaataaaacaattttaaaagattgagaggtctttgcctttacctgacagaggactatcctatatttaataaccttcagggaattctgcagcctttcacaattacttccccagtaatgaaatccagtatttacttttggatagctttccccctttagtttttgtatcatttcttccctgtttattataagatattatagacatactgaaggtacacagagagtaataaaaacactgttgtattgaccagccatcaaataaataaataaataaacattaccagttttgttgaatgaaaccttctggatacctctctctttcttaccctccccattcctaaacccccacctactatgctaaatgtgatatttatcatttccacatcagaaattatttcttacaaaccctcatggtaatttaagaatattttttcttgtgtcgttagcatatacgaagaccagtatgaggacaatggaaaggttgcacttgttttcctaaatcacatttgtgtcaaattgccagtggaatattttattgctcactaatttttaacttgtttcaacaaagtcatttggatcttttattgtttctatttgcaaatatcttttatttatcttctacttaactagttttatttcctcagggatgtggttttatattgtccatatagtttcatttttcctttctctaccttccagctcggagtaactaacaacttgcttttatttcttcagtctaatgagtaaaacaaaacatttaatgagaagcccaaatctgattccctcccttgttctgtctcttcctatctgtccatccattcatccatctatttatattagttttgttgttgttttgttgtatacttaaaaacaacaaagacatctctgggcttttattttgtaagtttttcctcttactatatatttctttatttaagccaaatacttcatatcattatgcttgaaatagatatgctactgtgttttctattgtgtctgtgcttatttaaaaaataacactctagcacactgggagtttttgtgatagatctattctaaattaatcgtatacataaaacaatttagtttcatcttttcaacattcttatgtttcatcttttcaacattcttattcttactgtccattggccactttttggctatatttagtaataatgatgataatgttatctctcttgataattgcataagtgataagtaacagatactgtgactaagatatatataaatttaatcattttaataattctttgaggtaagaaaaatctgagattattgagtgtgtagtgtgccaaaattcacacaagtagtaagtgatagagctgggattttgaactaggagtcaaaatgttttttgttgttgttgttgttgttgtttttaagacaaggtctcactctgttgctcagggtggagtgcagtggcaccaatcacggcttactgcagcctcaacctctggggttcagctgatcctctcacctcagcctcccgagtagctgggactataggtgcacgctaatttttgcaatttttgtagagacgaggtttcaccatgttgcccaggctggtcttgaactcctgggctcaagcaatcctcctgccttgcctcccaaagccttaggattacaggtgtgagccaccgcgcctgaccaaaacttgttcttaattgttctgatatactcgtaggcttcatgatttcttaagagttgtttagatttctgttgcactgagtctctgcctctattggagtcacttcccaacctgtccgtctccatgtctgtttgtctctattgttgtcttcagaaccagaatttctgcatatttccaaaatgctcctaggaggtaatacagccccattgagaagttctggctaggggtaaggacttttaactcacatttagagatggaagaaaaatataatgtataagtagcccttttcaaaaaatgtttcgtgacccttttttttattatttcaacagattttggggggaacaggtggtgtttggttacatggataagttatttagtggtgatttctgagattttggtgcacccatcaccagagcagtgtacactgtacccagtgtatgtcttctgtccctcaccccactcccacctttccctctggtgttcccaaagtccattgtatcattcttacgcctttgcatctcatagcttagctcccacttatgagtgagaacatatgatgtttgattttccattcctgagttacttcacttagaatagttgtctccgattctatccaggctgcttgcaaatgccattattttgttcctttttatggcttagtatcatatacacacacacaccatattttctttgtccacttgttaattgatgggcatttgggctggttctgtatttttgtaattgcaaattgtgctgctatagacatgtgtgcaagtgtctttttcatataatgactttttttttcgtctgggtagatacccagtagtgggattgctggatcaaatggtagacctacttttagttctttaaggaatctccacactgttttccgtagtggttgtactagtttacattcccaccagcagtgtagaagtgttcccttttcaccatatccataccaacatctatttttttttatttttaaaattatggccattcttgaaggaatggccttgtgtaaggtggtatcgcattgtgtttttgaccctttgttcttaagggtctcagttaaattatattggttagtaataggtatacggaactaattatcattatttcttatattgttagaactgtggacacagtggggggcttgcctgttttatctactgggaattccagggatgggagaaggttcagaatgaaaaaagtgtgagtacaaatagaatctagaccttaagaaaggtttttctgattattgggaggtctgcttaatatgatttttgaagttacttaaatttttaacatggttgattttgtataaaggaggtattatggtaagttaattaattaaggtcttattggatgcccttttgtgaatatagtgtatttttctaaaaagtcttttttgcatagtaggctcacaagaaatagctgatagctagaaggtaactggttgacaagagggtgcatctacataggctttgaatttagggtgcttggataaacctcaggaatctgtgaacctcatgaaacctcctaccactctatgtgagtgtgtgtgtgtgtgttgcacacatggaattttctgaggtcagttgctttcatcaggatcccatacaaatctacatttgtaatctgcatccctattcctcatcccaactccatatacatgcaacagattaaggaacagtactagacgaaagttgatagaattgatcagtggcatggtgatcagatgctctagagtcattggtaggctctagtacttgtctcatgataatgagccctcttgtttaaagtactcataaagtaaaattatttctgtttcaagcacataagattataagaatgtggaatgtgcagataagacagggaaattagtctgttaagtaatcattaagaggacaattattaataaagttcagattttactcactgtataatattcttttatgcttgaatatgtatgcgacctaatggaaaggaacaatgacttgtgactgaaagccctttccatattataaacatgaggtctgtctttatttctgattctacctgtttatgtttcccaatacatatgttttctttttgcctaaaacgttttctataactagacctttggaggcagggaggggtggagattggatttggatatgagggattgctatttctcccataaaatgtaaaaaattgccttaaaaatatcactttgagaggctaaggcaggagaatcgcttgagccaggagttcaagaccagcctgggcaacgtagcacagtgagaccccatctctacaaaaaaatttaaagaaatagccaaccacagtggcacgtgcctatatagttccagttactcaggaagctgaggtgggaggatcacttgatcttgaggggttgagactgcagtgagacatgattgtgccactgcgctctagcttgggtgacagtgcaagaccctgtctcaaaataaaaaaaaaaaaaagaaacgaaaaaaattattgattgactgtgatgtgctggggacatagtagtgagcaagaaagattctgcctctgcacttagaaagcctgtcttatcatcagtcagggaagacaaataaataaaggtgtgatgagggatatgataggaaatgtaagtggaatgtactgtgggtcacctggcaggagcatctaaccaatataggtgagatcaaggatcgctttccacctcgacctgaaggataaggagttagccagaggaaaactgttcagactgttcattcaaacatggttctttgaatatttgaagccaggtatctttttttttttcttttgagacagagtctggctctgtcgcccaggctggagtgcagtggctcaacctcggctcactgcagcctccacctcccgggttcaagcgattctcctgcctcagcctcatgagtagctgggataacaagtgcctgtcaccatgcccagctaattttatattttcagtagagacggggtttcaccaccttggtcaggccggtctcaaactcctgacctcaggtgatccacccacctcggcctcctaaagtgctgggattacaggtgtaagccaccgtgccctgccccccccccttttatttatttgtttattttgagacagtcttgctctgtcacccaggctggagtacagtggcgcggtctcggctcactgcaacctcaccatcccaggttcaagcaattcttgtgcttcagcctcccaagtagctgggattacaggcatgtgccaccacacccagctaattcttgtattttttagtagaggtgaggtttcactatgttggccagactggtcttgaactcctggtgtcaagtaatccagctgccttggcctcccaaagtgtaaatccaggtatcctttttatgttttcatttcaatgtacttttgcctcatttcaggtggcataatatttttagttatcaaaattctattttaagcagtattggtggagttttaaaatctaaaaggcatgtatttgtccattcattttaaaacacaggatactgagcatatacacccccttcttatataatattttgccttctcatctattttttctcttttggttctcataataatattgagacgtaggcattttttcaattttagagataaggagatactcaagtcactttaagttagagatgagattttagagataaggagatagagatttagagatttgagagagaaggagatactcaagtcacttgctttaagttaggtaactatttagttaagttagataactatttagttaaggaaagctcaaatcacttgctttaagttagataactatttacttaaggaaagctcaactcacttgctttaagttaaataactattaagtgttaggacaaggccagaacccaggtgttttgattcctagtctaatgtattacacattgtttcttataattaaatagtttcttgatagtttatattcattagttccacagtatgatttgtctcctaggccttgaatcttgtgtatcaggttaattatccttatattaaatagttgcaggtgtttctgtattttgaattcttggtgcaaatgtctcttgttacatactgctcgttttcaagtatcatcttgttatgctacctatttttttgattcattacttctgatttactttttcctggtaaaactaataatggatctcattaaatttatgtataacattgaagaaagtggcattaaacagtgttccaagggattactcttttttttttttttgagacggagtcttgctctgtcacccaggctgaagtgcagtggcatgatctctgctccctgcaacctctgcctcccaggttcaagcaattctcctgccccagcctcctgagtagctgggattacaggtgcatgccaccatgcccggctaatttttgtattttttaagtagagacagggtttcaccatgttggccaggtgggtcttgaactcctgaccttgtgatctgcctgccttggcctcccaaagtgttgggattacaggtgtgagccactgtgcccgcccccaccccttggttttttttttttttttttttccttctttttctttgagacagtcttgctctgtcacccaggctggagtacggtggcacaatctcggctcactgcagcctccccatcccaggttcaagcaattcttgtgcttcagcctcccaagtagctgggattacaggcatgtgcctgtaagtagttactttttattgcttagtagcatgctgttttgtgaatatgccacaatatgtttatccttttccccatgtacccgttgaagaacattgggttatttccagcttttgggttaatacaaatgaagttactctgggcatttttatacagttttgttttcctttctttagggtaaatatccaagagtgtaattgctaggtcatgttaagtgttactgtttagatatatacagtatttaaatatatatgtttaaatttataagacaatgccaaactgtttttcagagtggctataccaccttacattccatacagcaatgtatgagagatccagttggtgctgtattttcacaagaatctttgtattatcagtatttctttagccatttaaataggtgtttattagacatctattattgtggttttaacttgcagttccctaatagctaatgatgttggcaatctttttatgtgcttgtttgccgttatatatcctctttggtgaagtatctgttcaagcctattttctaaattggttgtttcattactgttgagtatagttatttatatattccacatatgaatctcctgttacatatgtgatttgcaaatattttcttctattatggtatgcacttagcaccttttgaagagcaaaagttttacattttgataagtccaattgatcttttttgtttgtttgcttattttatggatcatgctattggtgtcctacgaactcttcacttaaccccaggttatgattttctcctacatttttttctaaaagataaaggggaaaacacagattttctcatggtttttacacttagatctatgactcatttgagcataccaattctatacatattttgttaggtttttatctatgttttaattttttagacagattgtaactggtattgtgtttttaactttgttgtctacacagtcattgttagtatatagaagaatgattatttttgtatatggctcttgtattctgtgattttgcgaactcacttattgtagatgttttctagtacattccttgggattttctatatacatgaccctgttatctgctaatagggggagttttatttcccagtttatatgctttttattaacttactgtagtggatagaatgtctgatattgcattgaataagagtgctgagagcagacatccttgtcctaatgccgatcttggggaaaagcatttagtttttcaccgttacatatgatgttagctgtaaatttttttgtagatactctttgtcaagttgaagttcttttctagtttgcttggagtttttgccatgtatagctcttgaattttgtcacataatttttctgcataagttggcgtgatcatgtgattttttaaatctttattctcttgatatatggtggattatattgatggatttttgcatattgaaccagtcctatatacttggagtaaaccctactgtgttgtattgtataattctttttcttcggtactatattcaatttgagtatattttgttgaggattattacatctaaattcatgagagaaattagtttttgtgtgtatttcttctgtcagggtaacaccaacctcataagagcaattgggaagtatttcctctgattttctggagaatattgtataatataggactgtgcagattatgtatttcatattgggtgagttttggtggtttttttttgaagaattggttcatttcatctaagttattgattcatactctgtatgcttatgtttcttcacatttctttaggttttatgatgcaggctgtggtctatcatggtgagcattttgtgggtgcttgcaaagaatatgtattctgttcttgttaggtggaacatttctataaatgttgcttaagttccctttttgatggtagtgttctttctattcttcctggttttctattactacttctatctgtctgagaaagggatgttgaagtccccaactataattgtctatttttcaatttctccttatcagtttttgcttcctgtgttttgaagctgtgttgtttccagaattgtattgttaatgtcatcttggtggatagacttttttatcatttttaatgacgctctttttttttttcattttcttttctttgaagtctgctttttcctggtattaatatggttactttttttattaatgtttatatggtatattctttcctatcctttttagcctacctgtgtcatgatacattgaaacagcattcctttaggtaacatatgggtttttgtttttgttttttaagagatggggtctcactgtattgcccagtctggtcttaaactcctgagctcaagcagtccttccaccttggcctcccaaaatgctgggattacaggcaggagccactgcacccggcccaaggccacatttttttaatccactgtaccaacctgtgttttaaatttttgtgtgtagaccatttgtatttaaagtgattattggtatgtgagggcttaagtttgctattttattgttttctgttcattcccatttcccttttcttgacctgtgggctacatgtgtatttttttagaattccattttgatttcttacagtgtttctccgtatatcactctttttttgttttgtagttcctttgggtattataatatgcatgtgtaatttatcagattattagtattgacattctccacataggtgaagtgtacaaatcttccattttaatctacacttttttcttccaatttgataatactaaccggaccacctactcttgccagatgggaagtccagatccccactcagcaccctctaacagcaaggtaggaagcatctgagatgcctggctgcggtagggttggtatttcaaaaagatttctgtcttactgggctgccctgttttgcagttatttggctaaagagagcaggtttttcttggggcttttttttttttttttttattctttggttttgggttacagacttctggcacaatctggagaagtctattaaaggaaaacccagagaattcatatcttgtcttcctcaagacctgaagttcctaactggtctgtttttttccttctaccttctctgctgtattaagtccagggtgtttagttgaatttatgtgggctggagtgaagagatataagcctactcaatcttgttgagaaccagaaatttgacagttaatttttgttttggttcttcaagcaggcacatgtttctttttctccttttggataactcagtcatctctcaggtctcaataaatactacttttctggagaaggaaaataaatactacttttcttgatattttaacctaaattacaagcaggtttttcattctttgctgttatcaaaatttttaattgtggtttgcttatctaatgtctttcttctcactagacatacactcctgagtgtaagggttattttgtttttgtttttttaatggactttattcttgaacaggtttagatttacagaaaaatagataaccatataactactgtactttcgttgataaagttgtttcccatgggggcatgggttaacagttctgatcctgctatacgttttactggaattgaatgattcagtaaatggatggtagatggtaggagccaggtttctcactgttggagttgggatttacagataatcaacgggaggaggctagagtgatctgtgttttgatagattcaagttggagacgtcattatgaactcatatttagcttaatatagatcatgtctttttccccccacaagtctatagccaatgtccagtgatgttattaacatccccatctttttttttttttttttttagatggagtttcgctcttgtgcccaggctggagtgcaatgacacgatctcggctcaccacaatctctgcctcctgggttcaagcgattctcctgcctcagcctcctgagtagctgggattacaggcatgtgccaccatgcccggctaattttgtatttttagtagagatggggtttctccatgttggccaggctggtcttgaactcctgacctcaggtgatctgcccgcctcgtcctcccaaagtgttgggattacaggcatgagccactgcgcccagccaacatttccgtcttttaaattaaattgttacagttgttatccagtaggagtccacagaaagtaatcgataataattgtatttgaaaagactgcttagagctatcatcatttcttgcctagattagtacaatagcctctttattatgtgtctattgcagcatagcaagctcatctcaagattcttcgggtatactaggtgtttcttttcctggtctcaactgggctcacttatgcagctgtattcagctggtggctaagctggactggaatgcctactgtggcttcactcacatgtctggtgcctcagctggaaagcttttgttctcatacacatggcctctttccacatggtttctctcgtcttccatgttgtctctctttcaagcaggatagtttggacttctttatatagcagttggtttctaagagcaaaaacaagctatgagctctcttgaagcctgtacttggaactcctgcacatcagtagaatgtcactttagtcagagtccctcagaagactaccctcagagtccatgtggaagggtgtgaatgcaaagaggcaggattcacttgaggccattttgtaacaatgcaccatagcttcgcaacatgttgccctgcctcccttgaaatctattatttcttaacacaggtcagactatatcatttctttgctgaaaccctgccctgagtttccatttcattcaaagtaaaaaccaaagtcttctttgggaggccaaggcgggcggatcacgagatcaggagagcgagaccatccggtttacacagtgaaaccccgtctctactaaaaatacaaaaaaattagccgggtgtggtggtgggcgcctgtagtcccagctactccggaggctgaggcaggagaatgacgtaaacccgggaggcggagcttgcagtgagcggagattgtgccactgcactccagcctgggcgacagaacgagactccgtctcaaaaaaaaaaaaacaccagtctttatatggcctacagggccctatatgatcttgccttaaccaaatagggatttattttccatctgaaacaagaagtagaaaggtagccagtctagggcttgtgtagcagttcagtaaggccatcagggacccagaaacaagaagtagaaaggtagccagtctagggcttgtatagcagtgcccagtaaggccatcagggacccaggctctctctctttctgctctgccatccttagtgtattgggttttgtcctgtttgttcctcgttacaagatgactgctgtactttcaagccttgggtctgcattcttggcaaatagaaaaggagaagtaaaagctttcatcaaaatcctggatttagttctctttgatgaaacttggtaatgtggttacttctggctgcaggagagcctggtgaaatgagaattttagctgtagacattgtttcatctaacaaaatgggaggttttcttttttattattgttttttaagtgaggataataggaggatgctattatgtaggcacccagcactatctgcttcagtaccaactatgtgccagaaactgtactgttgctatgaaagcatattttttcagtgggcatggccgttatgagacttaaaaataatatggtcaggcagttataataattccatttcacagatgaggaaatcgaagctttagcatgattgcagtatcagaatttatacatggtcattctgatgccaaatgcttcattatttccataacacaacattctaactgagccttctgttcaaaacaaacaaacaaaaaacacaatatggcctacatttgtgtgaagcctttgctgctctttcaaattatatttggttttcatgtctgtcttctttaataaattgaataccagaaagaaagaaggatcaggtcatttttatctttatatttcattacctagaactcaatgcatgttttgaataaagtttttttttaaaccttgtatgatagggaaaccgaaagatagataagcaaacaggtacagataagtaggataatacgcttgaattggatagccagtacactgggcttgtgtttgaactggtttcttgctttctagttgagagcactttccttttgaggcacagaatgttggattaggatgaaattagagaagaagaaatgtgttctgctaatatccctggcttaaggcaggtaatatctattaatgcaaatcaatctggtcaagatgtagttcaaatatagataaacgggtatttcagagggcccctggaagaagatggtatggagtaaataaaaacgcaatttaccaggagtcagaaggactagtaagctgaacccagccaggtctctgacagctggttgcttagctgctttaagcatgctttccccaagactaaaatcaagaaagttagactaaatggtttttgaaattccttctagctaacatagtatatgaatcattgtatccagtgagtttttatgggtactctaacatttcttggcatctatcaggtcagactgttttatatttctgaaatgtagagagagtaacagctttttcactactctgggaactgggccagtgaggagtaaacatcctctcctgtctctccctaaatgaagtacttggtcacgagtgacagtccattttcattttgttctttgaatctggtcttgttcttatttcagtgtttttcttaactttactgtgagtttgttgaagtatattaaattgaaaatgtcagtttatgtttgagtctaaaaataagaatttcattattgtacaaagtaaaagtcattgtatttaccaaatacatattatcacatttgtgtatttgaaatacttgactggcacatgaggtaatttaattacaatgtactgtgtagtctgtagtttggtcccttgtagtagaattgtgttgaatgaaagtggcaaggttaagtagcagatataatgtagtataagatatgattataagcttttacattttccacaattgaaataaagttaatattacttttggttcttttggtttcttttaaataatgtcttttccttattaggcaaggttaaaaaaagaagtggagaaaattttattgtcaaaaaaatagagaaaacatggaaaactttgaaaaataaaatggaaatccctcttaatttatctttccctctatttttaaagttcttatttttaacataacttgaaataaaagtgtgtttacacagcagtatatcagctgcatatactgctgttaactaatcaagggcacaaataagggaaacctttctttattcgctagctgacttgaaattcttttgttatgacacttaggtagcatcttgaactttctcttttctaaagttggtttaaagccctgatatttgtaagctttataagggagtctgtctgtgcccaatacagtgcattgaacatattattaattttaaaattattgaattgaccattctatataacaaaaatttctaattattatcttaggttagatttcttgagttttataattctatgtcaaagagaaacactatttttaaatttcttgttttatattcccaactttttaaatgaagtcttgtaagtggataaataaaatatagtatatatacacaatggaatattattcagtcataaataatgaaatcttgtcatttcagacaacgtgaatgtacctagaggacactaagccaggcacagaaagacaaataccacatgatctcattcataggtggaatctaaaaggttgttctcatagaggtagagagtagaatggtagttatgagaggacgagaggggagcagggaaaaacgggtagggaaggatgggttaatgggtacaaaaaagttgggaatatgtaacaagaaacataaaaatagttattctctttgatagacatttaggttgattccatatcttggctattgtgaataatgctgtaataaacataggagtgcagatatctgtaaaacatactgatttcattttctttggatatatatacccagtagtgggatttatcggatcatgtggtagttctgtttaaaattttttgagtagccttcatgctgttttccataatggctatacattcccaccagcagtgtataagggttcccttttatccataccctcatcaacacctgctatcttttgattttttgagagtacctattctaactagagtgatgtgatatctcattatagttttgacttgcattttttgatgattagtgatgttgaacattttttcatacacctgtgggttgtttgtatgttctttttttggagaaatgtctatgtaggccttttgcccattttttgatcaggttatttgtttgttattgagtgtttgagttctttatatttgggtattaaccctttatcagttgtgtagtttgtaaatgtgttctcccagtctatgactggcatccttgctctgttgattgttacctttactatgcagaagatttttagtttgatacaattccatttgtctatacaggttaaatatcctgtatctgaaatgcttacaaccagagtgttttggatttgggattttttcaggttctggaatatttgcattatacttagtggttgagcattccaaatcaaattttgaaaattcaaaacgttccaataagcatttagttcgagtatcatgttggcaatcaaaaggtttcatagtggctcacgcctataatcccaacaatttgggggggtcaaggcaggaggatcacttgatgccatcagttcaagaccagcctgggcaatgtagcaagaccctgtctttacaaaagataaaaattagctaggcatagtggagcccacctgtagtcttagctacttgggaggctaaggtgggaggatcacttgagctcaatgtttcaaggttgctaatgagcaatgattgtaccactgcactccagcctgggtaacagagtgagaccctatctttaaaaaaaaaaaaaaaaaatttggagcgttttagagttttggatttagaatgctcaaactgtttttgcttttgttgcccatgcttttcaggttttgtccaaaatattcttgcctagaccagtgacatggagctttcccctatatttcctccatattttcttcttgtgattttgtagtttggggtcttacatttaagtctttaatccattttgagttgagttttgtctgtggtgagagataagaatctaatttcattctctcatgtggatatccagttttcccaacaccacttgttgcccttttcccattgagtgtacttggcccctttgtcaagaattaataaactgtagatagatgatttatttctggactgtcttctgttccattgatttgtgtgtcttttttataccagtagcatgctattttgattactatagctatgtaatgtgttttgaagtcaagtagtatgatgcctccagctttgttctttttgctttagattactttggctatttatgttctcttgttgtctttctttatggttaggtgattttctctagtaatgtgttttgatggtttccctgttatttttggtgtatttcttataggtttttgctttgcagttaccatgaagcttatgaaaaaaatcttaaaatgagatatttgaaactgatagcaacccaactttgattgtaaagataggaaaagaaagaaaaagcaaactctacttttaactccattttctcccacatttgtaatttttgatgtcccattttacatcttatattacccatctcttggcaaattaaaatagttattatttaatagttttgtcttttagccttcatattaaagatacaagtgctttatgtatcacatttatagtattatagtattccatcttccagtatacttactagtgagttttatacctttaagatgttttcttgttacacattagagtctctttcttcatttaaagaactgtttttagcattttttgtttgcttgtatgttcgagacagggtctcactctgtccttcaggctagagggcggtggtgcgatcatggctcactgcagtcttgatctcatggacttgaatgatcctcccaccccagcctcccaagtatctgggactacagccacacgccaccacacccagctgattttttaattttcatttttagtagagtcaaagtcttggtatgccacccaaggccttgagctcctgagctcaagcagtccttccaccttggccacccaaagggctgagattacagatgtgaaccattgttcctggcctatttttttttaacatttcttgtaagacatatctgatgatgataaattctcttagttttcatttgtctggcaaagtctttatctctgctttatttctaaaggatagctgtgctgggtacagtattcttggttgacagcccaccccccccccccccacccccaatctttttttttctttaacaatttgaatatatcatctcactcatcctgacttataaggtttctgctgagaagtctattgctagacagattgggacttccttatatgttatttgctgcttttgttgctttcaaaatatttttgtctttgatctttgagaatttgattatggtatttcttggggtacacttatttgggctgtatctgattggtaacctttgacctttctgtacctggataatttgtatctttctctagttttgggaagttttgtgttattatctctttgaataagctttcttcccatttgtcattctcaattccctcttgaagcccagtaacccaaatatttgctcttttgatactgttgcattgttctgtaaacttcttcattcccttttaccctttttttaattgtttctcctccagctatgtgttttcaaatagcttgtcttcaagctcagatttttgtatctgatagattctgctgttgatattctctactgcattcattttgttcatcgtatttttcagctccaggatttcagtttgtttaatctctcatgtttctctgataaattcctggattcttcccctgtgttttattgaagttcattgagtttccttaaaacagctcttttgaattctctgagacatcacacatctccatcactttagggttgtttcctggtgccttattttgtttgttgcatgaaattatggttcctgaatgctttcttaaaattttttttttttgagacagagtctcactcactctgttgcccaggctggagtgcagtggaatgatctcggctctctgcagcctctgcctctcaggttcaagcagttctccaaccttagcctcctgagtagctgagattacaggcatgtacttccactcctggctaatttttatattttttagtagagacagggttttaccatgttagacagactggtctcaaactcctgaccttaggtaatccacccaccttagcctcccagttgttggcgtgagccactgtgcccgacccctgaatattcttcatgcctttggcctgccctgacatctgaacattgagggattagctgtttattccccattcaaagcctggtggtggtttgttcctgttcttccagaaattctaagcagggcgattattgtgttctttgagcccttggccactatcactgtttcagcactagatggcaccgtaagcccaggtttgcagtgaattcacagttggtttgtgttctggcccagattgactaggggagagactggagtgtctctctgggtgtgtgagtttccactggggccaggacacgttaggcactgtgtcactctgctcagtgcttgggcctcaccatggcatgctccaaagcaacattgtgtacctgttcccctctcattctttcaagcatcagtgtctccacactgtgctgcctggggttgagggaaggggtggagcaggcagtattgtggccaggacggccaccgtaatgctagctcacacctgaaaaccatagctgccaagacaagcacagcacagggatatgcccaagacccatggaactatagcctgcctgctgctgaggtttatttgtggctcaagtccactgcagacagacagtagtgatgtacccctgagtctattccactgaggccatgtctctctgcctgacactgaaatgagttcagaggcacggtctttgggtgccagcctgggatcagtgggccatcagattttgcccagtgtggagtcttaccatggcagacttgtcactgagtcaagatcaaagtactgcttttgtatccctctttttcccccagtagatggaggcactctccaagctgtgctgcctagggttggaagaagaataatggggtcccagtcctgccaccaggactactacatccccggggcaccaatcaggcccataccactgtagccttcctgctgctgaagttcactcatggcttgaggctactgtagatgccagaacacaagtctgtcatactgaggccacaggtttccacatagtatcgggatgggtccttgtctgcctagcttggtctggggttaaggggcatggggttctgcctggtgttgggtttcaccacggcagacccagtgctgagctacaagtcaaaagtcctgcactcacttccctctccttaccccaagtgggctgtgtctctctctgtgctgtgcttatagttgggggagaggtgattcaggcattgtacctctgtctttcctaccctcttcagttgatcttttcttagtaatgctaaaaccagatatggtcatctctgatctggttccttggctcttgcgaagttactttcatgcatagatcatgttcaaatttatgtttctgtggggagtcaatcgctggagagtcttattcagccatcttgactctgcctcttctccaaattctctttatcagatagagggaagcatgagttcctcagcagtggcaggttttccttaattgtaaaggaagaatattaaataacataatggacaagtcattaaaaaacaaacaaacaaaaaaaaaccaaactaatctgccaagcataagccctgccctcaaattgctcatagtctttgaagagtggtcagataaaaaaaaggggtaattgtttcaataaggtacacaatatcagagcacacaggagaggcattcaactaaattctaaagaaaggctttggacaggaaattgtttcccagcaagagttgttcttgatctttgaaacaaagtaaaagttaacagggtcaagaagatacttgaaagagataactgcaggagaaaggagagatggtgcataccaaaggtgaagcatgcttagtggctgagccaagagagatgatttcttgaagtaaagttttataatttgatatgattggagtttaaggaacaaagtggaaagaaatgggagttgaggtaggcagtaaacgaaagtgttaggtatttcttctggcctatgagaaataaggaataatttcctgagatattaagagtaccatgaacaaggaaattttgcagacctctggctttggacataatattaaagaacaaatctgcgaaagcagttcataaagtgttttctgataaatgtgtaaggattgaaacaaaaatatttggaggaatggaactagcttaaactattttttatctaagcattttttgcctcagtccactttacctgaaactagacaatatgaatttgggattttattctttgacaatagacatgtgctagtgttgttgacaacttgccaaggatagacacttaaactttggaaaccaaatggatcgtaggacttatattccattataaatagtgaaaaatctagacagcattttggctcaggtagaagatcattgtttatctgtatagtgacagatcagaaatacaacttctaacaggtgtagattacctgttttaggaattcttaacctaggatccgtggaacctggtaagtatacataacaacatgaaattttctttgtactattttttgttggcgtttcaaaggaattcttagctagaaacaggctgggcacgtgtttcatgcctgtaaacccagcactttgggacgtcaaggtgggaggatcacttaggccaagagtttgagatcagcctggacaacatggcaaaatcccatctctaccagaaaaaaaaagagatttatagaaatcaactacttcatattttgcataatatacctgcaggcacaaggtaaattgatatgaaaaccaagacgagatcccgtatcacccataagctcacccttttcactattttgcatgatacataatttttagaaattaagaatgaatgtagaaagtacttgcatcaacttatttatatgggtgtgaggaattctcaaaaaattaaagaaaatctttgcattaattaggtctgtgattcaaaggtacaaaaaggctgcacagtgtgtctttttcttttccatgtccttcataaactcaaatctcctccctagaggtaaccattatctttggtttcttgtgtttcagaatttaaacattttaaatccaatggtattatagtaatggactttgaaacagtaaatgatatagaaatagctagaacataactttagttgttgtaaatatagattagctgtgcttaactgattggattttcattttaaggtgactgtactgtgtattgtcttagcttccatcaatagaacacaatttagaggtgttctcaagtaatgatgcttttgtactgagtcaaccaaattaccaattggagtacttagccttgaagtatacagttggccattcatatctgtggattcaacatctgcagattcaaccaattgcagattgaaagtattaggggaaaaaaaaaataaaaaataatacaaataatacagcatagcaactatttacataccacttgtattgtgtattataaataactagagattaaagtatggggtgtgtatttagattatatgcaaataccacaccgttttatataagtgacttggtcatctttagattgtggtatatgtgggatcctggaaccaacctcccacacataccaaagaacaactgtataaatggagttctgaatatagttttcccaagccctagtacatttaattcattaactaaaaagtggtcataaaggtatctattttgccaatattcatttatttttaagaagtttcttacagaagataaaatgattcacctattgaatttttttatttgtataaatttaagggatacaagtgcagtttagttacataaatatattatgtagtgatgaagtctgggcttttagtgtttacctatagaatttaataatactttttatttattaagtgactgcagtgacccagtacttgtatttagaacttcatttacaatatttgtgaattatcacagtatctctaaaaggtggctactattattatttagattttgtagactattaaaactgagtatttgaaaagttaagtaacttgctcaaggttcacagtgtaggggttgggatctaacctgggttcctaagataccaaaatccgctatctttacacagcctttgtgtgtagatgtgttcactttattttaatataaatgtatttgtcaagtaatgctacttagtagccagtgagttcttgaatttatgattttgtatggttataataaaagtcagtaagtagttggtctattgcttattaaggagataattaaatatagttaaatgtaatgtaatcaagaaagactctcttaggctgaaaacactgcatatttactgagcagccaactctcctaaactcccacatttgtatgtttattttttctgtagggggattcccgaagtcttccgttttctgagaatgtgagtgctgttcaaaaattagacttttcagatacaatggtgcagcagaaattggatgatatcaaggatcgaattaagagagaaataaggaaagaactgaaaatcaaagaaggagctgaaaatctgaggaaagtcacaacagataaaaaaagtttggcttatgtagacaacattttgaaaaaatcaaataaaaaattagaagaactacatcacaagctgcaggaattaaatgcacatattgttgtatcagatccagaagatattacaggtatagtagtgctttatttgatgtttatatggtatattaataaaaaaaatgtatctttttagaaaatagtaagtttggggacatgaatagtttttagcttttctgaaagtagagagactttttctcttttggttaaggtcttatttatattctgtttagaagggcaggagttgataggtatggaaattgaaatgtttacttagaatttaataaccctaatgtattctctcttactctctatcagtaggacgttacttagagtgagtctccagtattaatgttttgtattgagtcaatcacatgcttttacgtgattcatcctgtaatcaacagcacaagtttgccagctgacttaaagttaaaactgtgttctttgaacaagagatagttttattatttgcaaatgtaattagtcaaacctatggccttcattctttgtgctctaagcaactgaattaacaagtaaactactaggcatagtgttcaaaaaagaaaaacataatagaaaaaactgttacacattacttttattttctttatagaaaataagaggaaaatataacctatgatttcaatataaaaacataatttttaaacaatagaattaataaatatttatgttggaatttttttaatggtacagaaaataaagattgaaaacccacctctttctttcttagaccgtctccttaaaggtaacattactttttgttgtatatccttccagataaaaaattctatatttgtgccaatattcacccatcagtatgtatagtctttctataacttttcatacaaaaacttacgtttaagtttaagccaaggcctcaagacattatcaatctctgtaactgtcaatttttttatttgcaaagaaaaagagtgtgagagtgtatagagtaatacacctatagcatggtagaaaatttagaagaacgtgtgtgattagctaataaataatagatgtaagtaattttaattttgattaagaaaatacataaatttggctaagaaccttaaatttttaccatctcaaaagttgcagaaaacactactgatatttagtgttcttgttaaaacttgtttttcgacatcactttcaacatctgggatttagggcttttattaggaggctctctgtgtagagatttcaaccttgtaagaataatcgaaactttaaaatgaaagaaataataggaaatccaccttctaattttagattgaaataatcccaaagatgcaaattagttttttcagaatcaccaatctagttaaaaagaacgcttcagctcttcatctagtattcttacacactctataattatgttataaatggaaataatgtattatgaaaatgctgttttttggtaatattatataaacttagaaatagcctgttccatggaactctgccaaactctacatttttttttttgcctgttacatctttaggagcggtctaaaataagaaacagcactggagctgtttatttagagaaattttcctcctcacagaatactgataactaccttgtgattcgctgggatatagaagagttttatcatcacgaggagcccatttggtttccccattcgttttataaaagttaactttattgtggctgggtgcagtggctcgtgcctataatcctagcactttgggaggccaaggcaggcggatcacttgaggccaggagttcaagactaacctggccaacatggtgaaaacctgtctctactaaaaatacgaaaattagtcgacgtggtggcgtgtgcctgtagttccagctactcggaaggctgaggcatgaaaattgcttaaacccaggaagcagaggttgtgttgagccaagatcgtgccactgccctccagcctgggcaacagagagcgattctgtctcaaaaataaaaggtttattgaagtataaattacgtatgacaaaatgcacgtattttaagtacatgatttaatgatttttaacaattgtgtgtgtgcacccagctaaccatctctacaatcgatctagaacattttcatcacttcagtgcttctcgtatattccttcccagctaacccatgatccccaaccctggccataggaacccgctgatccatcttctatcactttagattgaatttgtctttcctactgttttatataaagaaattacctcctttaagtcctatcaaattcctgatcacccttaaaaaacaatttttaggtattaccataaaaccttccatgacattctctgctttatcttctctgtgctactttgtccattcattgttgcattgtaatgtatttctgtacatgttatatcactaaactgtctcctccttgaagggagggacatgtgttcactcatctattttcaaggcttattacagaaactgaaacatagtagatgcttacttgggaatattatatctcaaaatagaaaaacacccagcaaatcgcatcttatattagtctttagaattagtatcaaagcctaattattatgacacttgaaacattaaataacttagaaaacaaagacttaaaagttttatgataaagccagaaactttttatactgaccatttttaatactgacatttcagataattggagggcagatgatatatgaaatataactttatactgtgacttcttaatacttcagtttgtttagaataaacttgataagttcgtcaaatttttattttattaaaaaaattctgtttgcaaatggcatatttacacaacttggtaataagtcattttctcttttttccattttactaacttaacaatctaaaagcaacaaccacaacatagaggattaaaattaatgtcattaattttaggtcagtttgccataaaattttagatgttttaccttgcacactaaggtaatcccatgaatttattttagattaggtctggcaagaagatttcaaggacattgtgctttgctttcagttctgaaaggtatgagtggatttataacagaagtgtttgactaattcctgttgtcttgtgggtacataagcttagtaagcagaacaaatgactgaaggaaagagggacaaaatttaagtctgcattgtgtaaatcattactgtctaagtggttaggggacttctgtttttttctttgtttttgagactgcgtctccctctgtcaccaggctggagtgcagtggtgccatctcagctcactgcaacctccgcctgccgggttcaagtgattctcctgcctcagcctcccgagtagctggcactacaggctccatgccaccacagccagctgatttttgtatttttagtagaggcagggtttcatcacattggccaggatggtcttgatctctttactttgttgatccgcccacctcggcttcccaaagtgctgggattacaggcatgagccatcctgcccggctagggacttgttcttaattcacctctgtaataataatctctgaatcttcagtttcttgtttgtaaaataaggatttttatcagatgaacttttaaactataaaactctgaaatattccttattgtaatgtcaaggtctgattgtttgagaaagttatttgtaaaataaatgtattcatttattcttaagagtagtaggaaatgaattttttattttctcatcatgcccatgatactctgagcttcttgttcatcttctaaatactttaaagatgatcatatgatttttgcccataagagtatccccataggagcagaaaaagcatttaagaaaattcaacattttttcgtgataaaaattctatgaacaaattaggtatagaagaaatgtttctcaacacaagaaggtctatatatgacaggcccacaactaacattgtacttaatggtgaaaagccgaaagcttttcttttaagatcaggaacaagatcaggatgctcactctcaacacttcttttcagcatagtactgttaagccctagctagagcacttaggcaagaaaaagaaataaaagatatacagataggaaaggaagaagtgaaattgtctgtttgtgaacaacacaatcttacatatatgtataaaattctaaagactccaccataaagctgttaggactaataaaggaattcagtcaagttgcaagatacaaaatcagcatacaaaagtcagtatcatttctatatactaactatataatatctgaataaaattaagaaaacaatctcattaatagcataaaacatacgtagtaaatttaaccaagaattgaaagagctctatatagaaaacgatgaaagaaattgaagatggtacaaataaatggaaaaatctcctgtgttcatgaattggaagacttaatattgttaaaatgtccatactacccaatgtgatctacagattcaaggtaattcgtatcaaaatcccaacatcattcttcacagaaatagaaaaagaaatcctaaaatttatatggaatcagaaaagaccctacaccatcttgagcaaaaagaacaaaactagaagcatcacactaccaaattccaaaatattacaaagctatagtaatctaaacagcatcataatgacataaaaatagactcattaaccaatggaatagaaaagagagcccagaaataaacccacgcaattcaaatcaattgatttttgacaaagctgccaagaacacacggtggggactggacagtcttcaataaatggtgttgggaaaactggatatcgacatgcagaagaaggaagatgaacctttatcttacccttatacgtaatacctttataccttatacctttaaaccttatacctttataccttatacctttatcttaccttatacgtttataagacttaaatgtcagtcctgaaactataaaactgctagaagaaaatatagagggaaagctctatgacattggtctaggcagtgatttcttggataaaagcagaggcaaaagcaaaaatagatagatgggtttgcatcaaattggaaacttctgcacagcaaaggaaacaattagcagagtgaagagacaacccaaagaatgggagaaaatatttataaattatatattggataaggggtcagtaaggaactcaaactactgaattcaaggaaaagaaataatcttatttaaaaaatgggcaaaggacctgagtagacatttatcaaaagaaggcatataaatggccgacagataatatgaaaaaaatgatcagtatctctagccatcagagaaatgcaaattaaaaccacgatgagataccacctcatgtgtattagattggctattatcaaaaaaatggaaggtaagtgatggcaaggatatggagaaaagggaagccttgtgcattgttggtggtattgtaacattagtatggccactttggaagacagtgtggaggttcctgagaaaactaaaaataggattattttacaatccagcaattcctcttctgggtatatattcaaagaaatttaaatcagcatgttgaagagatgtctgcactcctatgttcattccagcattatatagccaagatatccaaacaactgaagtgcccatcaacagacaaatggatttttaaaacatggtatataaacacagtgcaatactattcagccttaaagatgtaggaaattctgccatttgcaacatggatgaacctagaggaccttatgctaaatgaaataaaccagacacagaaagacaaatagctaatgatctcacttatgtgtggaatcttaaaaagacaaattcattgacgtagaagagaatgctgattaccagaggcttgaactggggagggggaggatgggtaaatgggaaagaggaagttgttggtcacaggttaaaaagttttagttagacaggaggaataagttctgttgatctattacacagcatggtgactatagttaatagcaatgtattgtatatttcaaaatagctaaaagaaaggttgttaaatcccactgcgaagaaataaatatttgaggtgatagataccttagcctaatttgatcattctacaatgtataaatgtaatgaaacatcacattataccccataaatatataatttgtttgattagaaataaaaatagtttaatggggtactgttgtcattctatgtggaaattacagtgatggttagctgaggctaaatgtaccttatgaaaaaagattactgatctctaaaatggagtagtaatctaagccttagttggaacctgacactcgtttgagaaagatccggtttcctgaatcttggtttctttaagtatgtcatcactgaagaagactataagaacattttttaatattttattaagtatagataataatttgggtagtgtatagtctctgttttcattttatttccttttcttgtaccattcttatattttcaaaccccaccaaacttagattggtttttacttattaatttggtgaatattttcttcaatatttgaaatattcagaagggaattactaatttagtaatataatatacctaataatattgggattttgtggggttaatcttagcaaattcttctaaattcctaaaatatatctgtattgagggaactttgttcatgactaaagaacagtttgtggtcttggatgaatagaaatgaagatttaattttcttttttactattgccctgcccacttaaatagtgtgatcattagtaagttgctcttttgcactcctggatttgtttccttgtctttaaaatcatgagattaaatgtatagattccctaatacttgaattctttttatgatatattttccaaaaaagttaatgtgtagtaaaattgtatatatatttttagtatacctttccatgaattttaagatgaattcatctaactgccaccacattcagaaaaaggaatagttccaatgccctatacatctccctcatgttctttcttcgtagtcacacccttcttcacctctatattccctgacaaccactgacctgttctgtcactatagttctcttttgaagaatgccatgtacatagaattataaagtatataagtttttgagaattttttccctccgcatattgcctttgaaattccttcaagttgttgtgtgtatcagtagttcatttttttattcctgagtaatagttgattgtataaatgtactataatttatccattcacaaagaacgttagggtggttttccaatttttggcaattatcagtaaagctcctataaatattcacgtacagatttttgtgtgaataaagttttcagttcactttggtaaatactgaagagtagggttgctgagtcatgtggtaacatatgtttaacattataagaagatggctgggcacagtggctcatgtctaaaatctcagcactttgggaggtggaggtggggggatcgtttgagctcaggagtttgagaccagcctgagcaacatagtgaaacttcatctccacaaaaaatttaaaaattagccaagtatggtggtgtgcacctgtaatcccagctacttgggaggctgaggtgggagtattacttgagcctgagagtttgaggctacattgagccatgatcatgccactccagcctgggcagcagagcaagacctggtctttaaaaagaaggaaataaactgccaaatatattctagagtagtgatatttttcattcccactatcagtgaatgagaattctagttgttccacattctctccagcacttggtattgttaatatattttattaaccagtctaacaagtatgtagtagttaatatacattattgtcatagaggaaataaaaatagagcagcaccatcttaaggagaatttacaaaagaacagtgcatgccctaggtacagagttatgtacagaatgaagaagtcttctctactaggagatgataggtgcagttttcaaacattaagatatttcagatagaggcagttctgcaatttttatacctaggttgcttgttttaccttaaaaattattctaactcaatcacgtgaacccaggaggtggaagttgcagtgagccgagatcgagccattgcactccagcccggcgacagtgcgagactccgtctcaaaaaaaaaaaaaaaaaaattattctaactcacagtgttaaccctgcctatttctgtaacatattaagaaagcttaaaccagaggtggtattagttataaaatatttaccaaaattagttcagttggtgatatatgacaagggctatcgcaagtatataaaataaccaattaagcctcctttaattattcagcattcattacaacctgagtaggttccagagggctgtaaaaggtaaagtatctttctttaagaaagttggactttaggagaagtataaagttaacataatggtaacacatggcaagattctggagcagtttatttttaaaatagtaacttagagacttataggaagaagtatgttaagaatatagataaatagtaagctagtgattttgtatattaaccttattaatttagatttggctaagtttatttcagctattagtatagttcctctttaattgtttaatgcagtaaacagtgtttcttaagcagatatcctggctattcaagtaccactttatgaattttggacatagagagccagcttgctataaaataaagaccaaaggttatatcatctgagatgtcattcagctgcactattaaatggttgtgtggtgtataccacctggaacctgtcgagaccttggttttctcatttgtagaatgagagggacagacaatatgtaccctatctagggtgttttgtgaacatggtattttgatagcttgagaaaaagcatgaggtatccaaggccatctaagtttgaacatgaaaccccatttggatgtaaaataaagtctgaggaggctttcctgggtctgagaagtaaagactcaagaattaaaccatattcctaatctccaacacaatcaaggaatcagggtaaggctagaccttaagtagtcagaagtcctctaagaaggatcgggattgctcctgtgttctagaactctgtttcatcttgtaagccaactgctgagttgtggttttagagaaaatactaaaagcaccagaaacagcaatctatttattgctctacacgttttgggggaagctaacaaattcagtatttactccttattctggccttgggaaatcttatccctaaggaaattttaatcatatcctattttctggtgacttccaaagttgtatctccagctaggctgtgttttctgggcttcatctgatagtttatagccacccttttggatattacctggatgtcctgttggctttgcctcttatcatgtctaaaattgaactcttcttttcttggacagctatctctaaatttttctctgtgttttctgccccgttagtgcatgaccccagtaatctataagtaaaacctgactttttaaaaccttttttccccaccttcaaccttcattgtaagtttgtaagtcgccaagccttatagattctacctctgataataggtctcaaatctgtatctcttcttcatctttattgccacagcgtacaagttcagtatttctttaattcaacgtaaacactgctgccagcatttttttaaatctagaattcagattcagtgctgttagtttcttgatttaaacttttcaatggatcttcatttgctacagaatacagtacaaatttgtagcatggtagagatgcctttcaaatggtctggcatctgcctctattatttcaactttttctgctactaatcccagctctaatttttttcccctatccctatgttttctttttttacctctctttttacctctctatacttaggcacgtgtgtgtgtgtagattagcagaatctaggtgatgggtatataggtgctcagtgtaaaattcaactttgcagtatgtttgaaaatgttcatatatacacacatacactctggtatgtgtagacacacatacatacaggtacatacaaggtgtcccttttatatatacatacattatatatttacacatacacacacacacacacacacacacacctgactctaacctctttgagaagaggaattctgccacttgtacacagggttgtcctttgcatgatgcttggctgtatatgatataactagttccctgtattaagttccctctgtccaaaataacttgtatagtttgtttgtcaactagattcttgaatggcaaatcacctttctatattatgtaataaacttagaatacttacatgctattgttggccatgttctatttatatcattttagcttcaattccacaaattagatctaaacattctatacagtcattgttggtttataattacccacatgctgatcattttctttgttcactatttcttcatgcttctcagacctaccttctagagtgatcttttcttgtacttcctaaagtacagtagatactttagaaagacgatttcccctttatatacaattctaagttgacatctattttctttcagcacttagaaactgttatttcgtggttgtctggattctactcttgttgaggaaacagctgccagtctcatggttgaagccatgtagatcatctagtttcttttaagatatcctttgtcttcagtgttctggacttggagtataatggcgtagatttcgtttcatttgatttgcttgggatttgttgggtttcttaaatctgaaatgtatgtatttcatcaattatgggaaattgttagcctctgtccctttgaatgttgtacctcctgttttccttctacgtagttttttgggaactttagatgcatattaatttcttcaaatctatctccatttcttgaatagtttcttcacctgtatcaaacttactctttatcaaatattgtgtttctaattttgttattacatttttttaatgctagagcttctattttgttaatcctggtaattttggatagtctttgtcccagttgataccccttgcatttagctttacatatttaacatacttatttcacaatctgtataggataaatacagtaagtaaaatctttacaaggctagtcctctaatttttttctcattcatggtgaatttttttctgattgagctttgtgatttgtaattgtgctggaactgtcagtattaaaatttcgtggaatgcagatttgctatatttttaaaaaatttgccagttttttctttattttgttccacataattgaacacctacacatttagaattgatgcatatttctggtgaattgaaccttctattaaaatgaaatgacttacctgtaatctttctgtcttgaagtattttttgccttaaagtatcttttgtctgttattaatataggttgtgggttgaggttagtgattgtgtggaatacctttcttccatttccttactttcagcttttctgtatcatgttttaaatatgtttcttaaaatagcatatagttggatttattttattcatttgtttttaccttgtctaataatctcttttacctggatcatttagcctatttaaatgattactattacatttgggtttatatttagtatcttattttgtgcctttaatgtttctttttctttcttgtcatttttagactattttttaagaatcaattattaaaagttcgattgttttggaaattgattcatttagatagtacatcatgcatacttatcaaaggcagtagtctaattgctatttttatctctcagacaattcgaactccttagaatgcttttatttgcctacaccctagcttatattttactgtcttactaggctggtgcaaaagtaattgcagtttttgccgttgtaattatattttttaaaaagcacttcatgacttttttatttgtttatatagtggtcctttaaaatcactgaaatctaagccactttatctgttcttcgttatttcttttttgacctaccaattagaatcacttttcttcttcccagagtacatcctttcgcatttttaaatttttaataagtctgtgaaaaactctttcatctttgtctgataatgtttttattttgtcttcattgttgaaagatattttcgttggatatatacaatctttattagtctattctcgcactgctgtaaagaaatacccgagactgggtaatttataaagaaaagagctttaattggcttatggttccacaggctgtacaggaaacatgatgctggcatctgcttggcttctggggaggcctcagaaaactttcagtcatggtggaaggcgaaagagaagcaaacccgtcttacatggttggagcaggagcgagagagagagtgggaggggctacacacttttaaacaaccagatctcactattgtgagaacagcaccaaggggatggtactaaaccgctcattaaagacccacacccatgatccagtcacctcccgccaggcctcatgttcaacactggggaacttagtttgacatgagattggggcagggacacagatccaaaccatatcgcaatttaaggaggcagttgtgtcttttaacataaagtagctgtcatttcaccttcttccagctttcagtgttgttgctgaaaactgccataaatttaactgtaattcctttgaaggtacccttttctgactgctgtgaagactgtctttgatgttctgaagttttaccatgatgtgtccaagtgtggacttttttcccctatatgtttatgcttggggttgattgggtatcttgaatctatggattggcatttttattagttcttaaaagatgatagtcattatctctttatgtattgtcttcaaatcactattttcttccgaaacaccgtaagatatattggagcttatttttttttctctgtgtctttttatgtcgcatttttcctctctttctctttttaaaaaacttagctatttttcagtattaatctgctatttttctgtgtctggtctgctattaaactcagtctaagaacaaatcttagcactcaagatgcttatagtcgcagaggaaaaacagatgtgaaaacagatcattataatacagtgtagtacacatttcagtggagggacgaaagtatactttgaagacatgttagactagagaatggttagggaaggttttctggagaaagtaatgcctaaactaacaatagtattgaagaaaacaatcgcattttattagaaaggttttgaacacagaatttgacaaggaaaaatagtagtggagaattagcttggagctagatagcacaagacctttaatgcctaaccgtgaagttgggactgtatttggtagatgtggctattaaaaatattttggtggaggaattagtcttgtctgcgttccatcttaaagcacaacaatttatattggctaaatgtatgtaaagatgcaactttatgggcttaactctagtgcattgtctactgtaacccagacatgcctaaaatctctttgatctaaaatgtaaacattaaagcaagtttattgaatttgtataacatacattttgaattgtataataatgtttagaaggttagaagcaagcataatttcttataatacccccgaaaatactttttcagtaatattagcaatatatgcagcaaatggaaatttgttttttgttgtaatcatggggtttagtttctttagccagcaaagtatgtatttaagagtagattcacctctttttgtaatgtaaaggcagttgttagagtagaaaaataattaccattttacagagtttttaaaaaattttttgaatggtgagagtattaatggggagtagggagttctagttttccttgttttgaaatatgtttcactatgagaaagagtttaagaaatatactggcaactgtatgttttataatgctcaaatttaacgtacaaggaagaaaattggagagaagaaaagcagtgtgtaggaaggcaggttaaagaggaaaatagatgaaatgcaaggatgacagcagtgtttctctgatttctaattggggaaaaaaagtgaactttataaagtttactttatataagacatttaaggttaaatttctgcataggtgtacacttttgtgacctttgcaataaattctctaagtttcagatttttttatttgtaaaatgaagttacattgcaaacctttatgacttcttgtgaagattaaatgagcagaaatactggctacttagctgagccctgacttgtaatattattgagcccttattacattttaagcatcgacctgagcactatataggctttatttttacagtaaccgtcaatttgtggctaaggaaactgtagcacagagatgttaagtaagtatataatcaagaccataccaatgagtagcaaccacaggattttaacccaggcattctgacctcagagccctggttcttaaccattttcttatttcttatattcctgtaattgttattaaaactgaggacatacttttccttaagaacagtgttatgtagtatttttacaaattcacaaactatcagatcaattggtatatctttttttttttttttgagatggagtctcgctctgtcaccaggctggagttcagtggcgcaatctccgctcacagcaacctccacctcctgggttcaagcaattctcctgctcagcctccctagtatctgggactacagacgtgtgccaccacacccagctaatttttgtatttttagtagagacggggtttcaccatgttggccaggatggtcttgatctccacctgcctcggcctcccaaagtgctgggattacaggtgtaagccaccatgcccggccggatatttcaatatcttagtacaacctgctgtaatgtttaagaatctattatatagtatctctaacaaattgtaatctttttgtataagtgcttccagagatgagactttattgcattttaagacaagccattttattgttagataacccaaaacataaggaatttatgttgcgacaaaatttttgccctacctacctttttactcattggttctaattctctgtcttgtggggaaatagtaagtggacagctttcatagacaaatatttaaatgtttagacaggaatcatttatccttctcatcctaggctaaatacaccatcaactgttttacagacaacacattttcatactcttctcaactaggggccttctattctgaatgcattccagttctgtaaaaaatgtgcttactataagctatctttatataccaaattctgtgtaatttacacttcttacaagattctgatatcatttatccaaaaagagaaaagaaagaaaattaaaatgttcccagatctgaactgttcagtcattgttataatgcgtagttcaattatggacttaacggagatacactttctacagtgggtactgctggttaatatttattgcatatttactatgtaccacacctgtttctaagctctgtacacataatttatttaatcttcactataatcctgtgaggtacatgatgttttcactatttaacacatgaagaaaataaggcacagagctgtgaagtaccttaccctgtattacatggtttgtactgaatctcagtaccaaaactgagactcaaacctgggcagcctcaaccactatactagatatatactaagttgctcttttgtgatttgatttgaaaacttacctacattttatatcagttttttggagcagcccatttgtaatttggggaattcagttagaatagaaacctttcctgaattgaactcagttaattgtgtggctttgcctgtttcctgatatgtaaagtatggataatatctgtctcaaaaggttattttaaggatttatatgcacacatacatgtgtttgcgcagatatcattaactaaagcactattattttacatcctagcctagtatctctattatttatttatttatctatttattttagaaacagtgtctgacttggttgcccaggctggtctcaaactcctggccttaagtgattctgctgcctcagccttaatatctatatttttagattaattaacaaattataattgcatgtgttgaattagtgaattttttaaagggaatataaaacaatatgaaatacattcattaaaatggttagtcacaccatcttatattgtagaggagtgaagggaacattgaagcacaaaggtaaagtaacttgcagtttaggcagttttccagtcatgaccaagttacttatcacctgaaccagggtagtaccctagtctttagcttttatagaagtaaagggacctggtgtggataaaaatacaaaacactaaacttaaaatatgaagaattttagattcaaggtaagtgttccaacaggctgggcgtggtggctcacacctgtaatcccagcactttgggaggctgaggtaggtggatcatgaggtcagaagttcaagactagcctggccaagatggtgaaaccccgtctctactaaaaatacaaaaaattagccgggcgtggtggcaggcgcctgtaacactagctactcgggaggctgaggcagagaattgcttgaacccaggaggcggaggttgcagtgagccgaaatcacaccactgcactacaacctgggcgacagagtgagactatctcaaaaaaaaaaaaaaaaaaaaaaaaagaagtgtttcaataataatggattatccggaataactagatggttctttctgaagttttatttatttatttttgcaaaatgaaaattatttacttggaaaatgataattttcaaaatctgcaggcattgatttataaatgatttatgtattaatagttcccatttttattttactctaggacaaatttatttccatgaaattcatctttaaatggcacatgttttgaatttttagggactttactaacacagattttgaaaatattcccattcctaaaatcatagaaacctataaaacaacatattatgctttttttttaacttttattttaagtttaagggtacctgtgaagatttgttatataagtaaacttgtgtcttggggttttattatacagattattttgtcacccaggtattaagcctagtactccatagttgtttttcatgttcctctccctcctcccaccctccacactccaataggcccccagtgactgttgttctcctctatgtgtccatgtgttcccatcatttagctcccacttataagaaagaacatgtggtatttggttttgtgttcctgcattagtttgctaaggataatagcctccagctccatccatgttcctgcagaggacatgatctctctttttttaatggctgcataatattccatggtgtgtgtgtgtgtgtatcacattttctttattcagtctgtcattgctgggcatttaggttgattccatgtctttgctattgtgaatagtactacaatgaatatacacatgtatgtgtctttatgacagaacgatttatattgctttgggtatatacccagtaatgggattgctgggtcgaacggtatttctgtcttttggtctttgcggaatctccacactgtcttccacaatggttgaactaatttacactcccaccaacagtgtataagcattgctttttccctgcattctcgctagcctctgttattttttgactttttaataatagccattctgagccaggtgcagtggcttacgcctgtaatcccagcactttgggaggccaaggcgggcagatcacgaggtcaggagttcgagagcagcctgaccaacatggtgaaactccgcctgtactaaaaatacaaaaattagccaggcatggtggcgtatgcctgtaatcccagctattcaggaggctgaggcaggagaatcgcttgaacctgggaggcagaggttgcagtgagccaagatggcgccactgcactccaggctgggtgacagagcaagactctgtctcagaaagaaaagccattctgactggtgtcagatagtatctcattgtgattatgatttgcatttctctaatgaccagtgatgttgagctttttttaatgtgcatgttggccacatgtatgtcttttcaaaagtatctgttcatgtcctttgcccacttttcagtggggttattttttccttgttaagttcatcatggatgctgatattagacctttgtcagatgtgtagtttgtgcacatattttactcccattctgtaggttgtctgtttactctgttgatagtttcttttgctatgtagaacctctttaatttaattagatcccatttgtcaatttttacttttgttgcaattgcttcagagaatattaggaacacctctgtgcatataaactagaaaatctagaagaaatggatgaattcctggacacatacaacctcccaagactgagccaggaagaaatagaacccctgaactgaccaaaaacaagctccaaaattgaatagcctaccaaccaaaaaagcccagaaccagaggggttcatagccaaattctaccagatgtgcaaaaatagtgttggagaaaccacggacaatcatctaactgagtttcagacttaatataatcacttttatattttaagtggaatctaccctgggaagtagtcttgcaactcagatacgtgttttttttttttttgcatgaattggttgaattcatggattatctataagtataaggagatttcatttaggctcatctcaaagtttgaaaaatgctgtttatttgaaaaatattaacttccaattttaagcagcaattcattctaataagtaattttaacaatattttatttacagattgcccaaggactccagatactccaaataatgaccctcgttgttctactagcaacaatagattgaaggccttacaaaaacaattggatatagaacttaaagtaaaacaaggtgcagagaatatgatacagatgtattcaaatggatcttcaaaggtaagtgtagttaataaatgtaactatatagtcagtcattatttgcagattccatagttataaatttacctattcaataaaatttattagtaactccaacatcagtactggtggcatggcactttggcagtcatttgtgtacatgcatggagcaggggaaatttgaattatatgacatgcttgtttccagctgagttcgaacaaggtgattttgccttcttaagctatggtacactaaaaagtatcctttttcagatatatttagtgctgttttttttcacatttttgtgcttttaattggtaatttcactgtttaaacactatattgtgacatctgaaatcattttgacctcagaatttgaaagaatggataaaagaatttggaaacatgtttttctttgttgttgttttttttgtttttttaggtaacattttaaaaattgtttattcctaccaagacccagttaataaaaaattttaccttatgggtaaaggatacacaggagctttccatatctgcaacttttccgtaaatctaaaattatttaaaaagaaattatctaaaagaatttagtctgtaatgaattttccacattatagaccactctcccaagtgtttgggagagggccaatgaaaagatgggacattttggcgtcatcaataattgcttggcctagacctgtgcattcttggagatctggtatgggcatataactcctaactgaaaatcagtgttatggggagcaattcttagtaataagaacatgtccttgttgttaggtataatgcagcaaaaaaaatgttgtgagccgctgaaccagattatcctcaaggttctcttcagcctaaggttctatagttttaataatttccagaaattctgagaaagatataaagttataaaatgtacctttgtactttcaactcatgtattttaaatatttttatctctggaaatcaatttttttattttagtagatattttttaaataatttcttaataaaagttcttacatatttctttttttgtttcagtttagaaagaatttgaaatcagagggaaatattttttttcttaatcatgcatcctaactactcaccccaaatgaaatttgagactaggcctggtggctcacacctgtatacctagaactctgggaggctgaggcaggaggattccttgaggccaggagttcgaaaccagcctggtcaatatagcaagaccctgtctctttaaaaaaaaaaaaaaaaaaaaaagacattagggaagttaccaaaaagagagaaatgtgtactgtctataaatgttttaaggttaattatgaacattagattttatgttatatttcaaaagaattttttgttacttttagagaaatgtatttgttcctatttacttatgatgtgatatttgataggatattatttcactaactttgaacatttgttattggatgatagagttattttttgtgctgttatttttagcactgacatttagttttggggattttatatttttataaaatgttattttgaccttttttttaagtaaatactttgttcctggaactgcgattttagcacattatactgagcatttttaaattaaattaacccagctactgccctgtagagtaaagtttttaaatctggggtggatggattagtttgaggggtttatgaaccctttgaagttataggaaaagcaagtgtgtatgttgatagttgtatggatgaaagggctgtaggttacaccttattctcaaagtggtctttaatccacaaaagattacgaaccactgctctaagttgaacagagttatggacatattaaaagtaaaacaaatagataacctaaaacaaccacagatccaaagtgaacaaggctgtgagcatcctgttaaaacaaatatgtcaattttgcatagctttttatttttaattagatttattaatttgaggaagactcaaatggaggtcgaaagcctatttgcaactactattgcctctgagataggcctgccagttatttctgtctagattccaccttaactgtttttatttttcatctttaaacttctcagagggtcagagtacatcgttttagattagggaaaattataaattgaaattatgtggaatattaatttattcattaaggattttgttaaaagtttgatagccattatgctcggctctggggtgtaagtgtaataaagatggtgccttattacatagcaggtactcaatatataatatcctgcttttaagagacccactatcttaaaaggagatatatcacatgtaaatagttaaagtgtgtaatagtgatttgtttgactgactttggaagcacaatggagaataatcatttaactgccaataaaatcttttaagttttagtacgatatttgaaaaatgatttggcatttaataaaaaattactttttagggatggtgttgtgggtgaatgcagtatatacacagtaaggaactgtggaatagcctggcttgttctgaggaatgaaagtgatttggtgtggctatagtacaagttcttagtgtatttcttacctgacatatctgagggtaggtagaatgtacttctgatagtaagagttgtcaactctagtagtcattttcaattaaaagccatagggaaacaaatctgaatctccagaaagacattcattttgtttgggaaaagttctccaggtgattccagtagggcttctttcccttccccaccagtggagttttaagtgggtgaggcatattgagaggtataacataactgaaagacaagccaggttatatggtatttgcacagaattaagcagttgtgattaccttaaaagatagatggagctgctgaaagcagggagctccttttcgcagggaaaagacacaatgagatttcaagtttagaaagttcacatccatccggccacatgtggtgactcacgcctgtaatcccagcactttggaaggccgaggcaggtggatcagctgaggtcgggagttagagaccagcctgaccaacatggagaaatcctgtctctactaaaaatacaaaattagctgggcatggtggtgcatgcctgtaatcccagctacttgggagactgaggcaagagaatcacttgaacctgggaggcagaggttgtggtgagccaagatcgtgccattgcactccagcctgggcaacaaaagcaaaactccatctcaaaaaaaaaaaaaaaaaaagaaagttcacatccatcctcctcagacttaaagaattaaagaaggtcatttatgcaagcagtaagtttaagtagttttttgcagtagtccaggttaaatagcttcctttctcttgtaacagcagtgaaaacagtgaagataagagtcatacttttggtatcttggatatgaggaaggaggcagagtcaaagattattcttagatcggttatgtggatagactgatgaattatggtgccctttataatgatagagaattcatgagggggagcaaatttagggacagggatgattaattcagtttggcagtaaaaattgccaacagaactctgcttattggattctacatgattaaattattacccttgtgcatgttgtaatcagagctgtcctttttaaatttttcagatattttcaccctcctgcttcaaaaccctccaatggttttccctcatacttaggacaaaatccaaaattcttattctgactctggaaatctatagcttctgatctcatcttctaaaacaccttcctctctcattacactctagctactctagcttcttttctatcccttaaacatagcaagcacactcttacctcagggcttttgcacttgctatatctttgcctaggtatctattctcccaagtacttttgtggctttctcattcattaagtcatctacttggatgctaccacctcagcaagctcttcactactatcctaagataaatagcaacctctgtctcttcttaacccttcattgcattaccaccaccttaaattacaatttatgtgatcaatttatcatcagttttcagcattagaatataaatttcatgcaggcagagacattatcttggttatcaccctatcttcaatacctgaaacaatactccattgaaatagtttgctacaaatactcaataagtatctgttaaaacaatggataccgcttcgctgcccatttgtggccgtttatcttcctctggcccataatttacacattgttctttttcttatttcatacctgtgtgtactataattattttcatattatcccttttatgactaactatttttattgtcagcacaaggatctgaggaatgggatgcagttattttaccccgttacataagtagtatagcttgccatttctttatttggtagtgtggctttaagcagcatcattggttgtgtttgtttttgttttgtcctttggaatgatctctgggggcttgataagacatgttaaagacatgcctcctgttttttgttgttattgttgttttgttttgttttgttttgtttttgagacagagtctcgctctgtcgcctaggctcaagtgcagtggcgcaattggctcactgcaacctctgcctcccaaattcaagcgattcttctgcctcagcctgcctcctgtgtagctggaattaaaggtgcacaccactatgcctggctactttttttgtattgctagtagagatggggtttcgccatgttggccaggctggtcttgagctcctgacctcaagtgatccgcccgcctggccctcccaaagtgctaggattacaggcgtgagctaccgtgcccagccttgtctcctgtttatagaatcacttgaacccaggagtttttgagacttcatctcaaaaaaaaaaaaaaagacatgtctcctgtttatatattcaggcagtaaaccaaggtattaattaaaatttggggttcttactagcatcttgcatcggttttaagtgtttcccaagcctccacatatggatataccagactgtccatccaggtccctccaaccgccaatcctccagtattgcctgtttaagctttgagatctaattgatatagaaaaaagttgcacatatttagttatacatttcaattaatttgtatgtttctatacatatgtatgcatgtgtgataccaccacgacaatcaagttacttccaaaagtacccttgagttctttagtggaagtggttaagttgttgttgtagtggaagtggtgttgttgttgttgttgtcgtcgtcgtcgttataaaagcacttaacatgagaaattctccagtcttgacatattccagacttatttattataatgactcgggaaacctttctggattcccttaactaaaattgattccacttttttgtttgtttgtttttggagacagggtctcactctgtcgcccaggttgtcacccaggctggagtgcagtggtgtaatcttggctcactcactgcagcctccacctcccaggttcaagtgattctcgtgcctcagcctcctgagtagctgggattacaggtgggcaccaccatgcctgggtaattttttgtatttttggtagaggcagggtttcaccgtgttggctgggctggtctcgaactcctgaccttagatgatcccccagccttggcctcccaaagtgctgggattacaggcatgagccaccatccctggcctgattccacatttctttggaattttcttcagctacttttaacttcctagtgcatataataatcatctatatgtcttctagcaaattataagcttcataggataacattctgattgattaatatttgtgttttcactgggtctggcatgtaatttatggcttacttcctatatgttactttaacataaatacatgatgaaaaaaataagaatgactggcctatttattacctagatggtactaataagaacaatgattggcttatttgaaagttttctgtgtgatgtaatgtgttgtaatgtcccactatagcttgcaaaacagtgttatttttttgtaaaataaaaaacataatttgaaagtcgtataattttttagttattcttataattgtaaaatatttattccaaatacaattaccagcattatagagtgccaattactaatagttcattactttagtgtgttaggttgagccatataaaattgctgtttttttagttcaaaatcagacactggcattttcatgtagttctacctaaggtatgtaaaaactttcccaaaatttgtattaacataaaagtcagatttctccaatatgtaaaccagtccgtgtactccagccttatctcttcccttgtacatattatgtgcttaataaaaattccattgaatgcctgaaaacataaaactgatatgtaataactgtatattgcctgtgatagataatatccaaaatccattttaaaagtttcatcatactttgacatcctgcagatcctccagaaatttctgtgggaaaattcacctatttttaaaataaaatacaagtgctgtttcttgcatgttgaattgaaatagtgaagaaaggagtatttccaaagaagtaaaatgatggaactacttcattttgcatgacaataaaataataaaagaagtagcttaattgaagagagtaatattatatggtttacttaatatttatacatttacattagaacttcattggaataagacacttaatcattatttttattgtcctaaaagagaacattttaatgccaattatgtgctaggcaagataattttagtttaatgcttacaaaagttttatatttaagagaatggtatcacaatttacatagtttatgcaagaaacctaaggttttcagaaaataggtaaattgtccaagtttatatataataagatttgggctcaaatctgactgcaaaatacatttgtcccattaaattatgagctttggaatacttttactctagtctgatctcaaagaaattcattcatgccttgcattacaacagggatacattctgaaaaaatcatcagtgggtgatttcatcattgtgcgggtatcatagagtgtacttacacaaacctagatggtactaggctacatggtatagcctattgcacctaggctgtagtaacagcatgtaactatactgaatactgtaggcaattgtaacacaatggtaagtacttgcatatctaaatatatctaaacataggtatatgtagtccgttgttgacctaaatgtcattatgcagcagtctggccagaagctatttgctaaatgactgactttgggaatacaaaagaaataaaagaaaaatttataaatttcataaatatgcaattattttttcctccatggtatattaacctgagtttggtattcagcagggtatatttcagctcacttttattccccttatctccaatctctttcttctttattcagtgtcatatagtgtgtgtttgatttattgaaataatactgccgtcatcaagcgtgtctcttgggttctaagagacatgaatctccaggagaatacaggttgattgtgtgctattttatccaaattagtactgattgccttagtgattaaaaatagagatgcttaaataatatgcaaagcttctcctttcttatgaataagtgctttctaacttgatgcttaatcaatttgtgtgtgtatgtatggatggataccagtctttaacaattaatgcaactctaaaaacaggaaatggcattaacttctgatatttctttttaaaatttcttagttttctacagttgctgtaacaaattatcacaaatttagtggcataaaacaacagaaatttattataattttgtagttattttgtctgaagtgaatcttagcttaaatcaaggtgttggcaggactgcattcccttctggaggatgtagggcagaatgtttccctgttttttccagctgctggaggctactcacacttcttggctcctgactctcttcctttgtcttctaagctagcaatagcaggtccagtttttctcacatcccatcactctgacctcttcttcctctcttttctacacttaaggacccttgtgattacattgggcctatctggaaatcaaggacaatctctgtattttaaggtcaaatgattaacaaccttaattccatttgctaccttaaatctcccttgccatgtaacgtaacttaccaacaagattctgaggcttaagacattgacatcttcgagtaggtcattatttggcatataattccttctgtcactcacattcagtgttactggaactaagcagaggtatgctcttgcattgattcatttgtgttgctgtaaaggaatatctgaggctgagtaatttataaagaaaaaggtttatttttggctcacagtactgcagactgtacaagaaggatggtgctggcatgtgcttctgttgagggcctcaggaagcttacagtcgtgatggaagatgaacggcagccagcttgtcatctggtgagagggagcaagagagagaggaggaagtgccaggctcttttgaacaaacagctcaacaaccagcgtgaactcatagaatgagaacttactcatactgtgagggtggcaccaaacaattcatgagggatctgtccccgtgacctaaataccttccagtaggcctcgcttcagacactgaggaattacatttcaaaatgagatttagagggacaaacatccaaaccatatcaggcattaacattatttcacttaattcagagcttttttttgaaatcttaagatataacagaagtgttctccagctttattaagaaggtctcattttttgacattaaagtgtttctagggacctttctcattgtcaccagggttgacaaatgctgttttctacctttcttagcataattaattggaacacaattgctatctgtgattaggtttttagtttaggtttaatcatggaggcatttatttcatactatgtttctgagtcttagagttattgatcatagtaaaggaaaattctttatgttttgtgtaaagcaaaaataagaaaattacaaatgtgaatttggattttgattttctaaaagatagtaataagattcaaacctacagtatctgttagcagataaatggattgtgcgatgtatatatatatgtatatacacaatgaaatattgttcagccttaaaaaagggaatactgccatatatgacaacatgggtgagcccagaggacattatgcaaagtgaaataagccagacacaggaagaaaaatactgtatgatctcacttacctgtggaatccaaaaaaagctgaataaatagaaacagagagtagaatacagttaccagcaatagggaggaagaagaaatggggagaagttggtcaaaaggtacatacttagagttaggtaggatgaataagtccagaggtctaatacatagcgtgaactatagttaatattatatactgaaaatatgctaagagagtaaattttaggtacacataaacatacacatgaaaaggggtaactgtagaaggtgatgggtcagtaaatttgtttgcctgtaataatcatttcactatatgtatgcataccaaaacatcatgtacactgcaagtatatacaataaaaaataaattttaaaaatacacagccataataagatttccttttctcccaaattgtcttaactaatggagttgtttttcacaattatcaccctgtaagtttgatggctcttttttagtaaatgtatctataagatatactatagcgccaacagcattcttttaactctgtttttcacttgctgatatatcacttgatctgtttagaagataggaaaatgtttcatttttccctttatttgcttaatttttcaaacttatttttttaataggatcggaaactccatggtacagctcagcaactgctccaggacagcaagacaaaaatagaagtcatacgaatgcagattcttcaggcagtccagactaatgaattggcttttgataatggtgatggaataaattgtcctccttcttatgagcataatggtgctaaataatcttatgcaggaacagggcagtggttcaaagttaagagggaggaagcattactattacttttttttttttttctttttttttttgagacggagtctcgctctgtcgcccaggctggagtgcagtggcgggatctcggctcactgcaagctccgcctcccgggttcacgccattctcctgcctcagcctcccaagtagctgggactacaggcgtccgccactacgcccggctaattttttgtatttttagtagagacggggtttcaccgttttagccgggatggtctcgatctcctgacctcgtgatccgcccgcctcggccccccaaagtgctgggattacaggcgtgagccaccgcgcccggcccttttttttttttttaatcttgagttttagactcttcacttggatagatgcttttagatatttggcccttatgtttcaagaagatattgatctagaatgtatctcttcatttaaatagattatcaagtacttacaatcagtcttcatttaaaaaaaaatctgttacctgtttaagagtatggctttgttttcttttgtttttttgttttgttttatttattttttaattccagaagaaatctttaaagctagttgctaagagtaggagtagaaactttcggtctccccatgttacaatatttggatatctttcagctctaaaatctttttttcagatttgtaatttagatgtgtaatgacaaaaatgaaaggctctgaatttcaatatcatatcaaatatttttatttcagtgtttattgatgtaaggactaagttattgtaatgttataggaattcatttcttttcatgattttaatcactgcaaattggaaagtcagataaatggtgcaattaaaatttttttttcctttctagcaaaacctgtgataagtcctcttgaacttcggatggaagaattaaggcatcattttaggatagagtttgcagtagcagaaggtgcaaagaatgtaatgaaattacttggctcaggaaaagtaacagacagaaaagcactttcagaagtaattttaaataaaaatttttatttggtttaataaatacattattcaaagtatgtgattatttaaatgacaacaattgtcttttccctgtgcaaggctcaagcaagatttaatgaatcaagtcagaagttggaccttttaaagtattcattagagcaaagattaaacgaagtccccaagaatcatcccaaaagcaggattattattgaagaactttcacttgttgctgcatcaccaacactaagtccacgtcaaagtatgatatctacgcaaaatcaatatagtacactatccaaaccagcagcactaacaggtatgtagtgtatagccattgttttttgtgtgtatttttgtctataactggttctgatttaataattgaaagaaaaacctgtgcatagatttttaaaattatgataagatacacatagaataaaatttgttgtattaaccattttaattttattcaatttggaagcatttgctatattcacaatattgtgtgaccatcaccactacctagtttcaaagcattttcatcaccccaaaaggaaacgcatacctgttaagcagtcactccccattcccccttcctcccagctgctagcaactactaattgtctgtctctacagatttgtctattctagatttgtcatatgatagaaattatataatttgtgaccttttttgcctggcttcttttacttagcatattgttgtcaaggttcattcatgttgtagtatgtatgagtacttcactcacttttaatgtctgaatagtattccacttgtgggaatattctaaaattcaaaactttttgtgcacccaacatgatgctcaaaggaaattctcattggagcattttggatttgggatttcagatttccagattagggatgcttaaccagtaagtataatataatataaacattccaaaatctgagatacttctggtcccaaggatttcagataaggaatactcaacctatactatatttgattgacctatttgtcagagcatatgagttctttttaccttttgactgttgtgagtagactgctatgaacatttacgtgcaggtttttgcttgaacatctgttttcaatttgggggtatattcctaggaatataattgctaggtcatatggtagctatatctaagattttgaggaactgtcaaactgttcttctcagcatttacattattttatacttctaacagtaatgtataaagtgggtttcagtatctccagatcctcaccaacagttaatattttttttcattcttctttgatcgtgttctaataggtccattattggaagtatggtaatatatctaactatgtctgtagaactgtctgtatttctcccttcagttatgtaaatttttgtttcctatattgtgggctgttttgctaggttcatgtatgtttacaatttttatatcttctagacggattgactcctttacctttaccttaactcctttataatgtccttctttgtctcctataacaatatttaatttaaaatctgttttgtctgattttataacagctacccctactttgttttggttttgtctttgggttcaaatgagtctcttttagattatatattattgtattctgttttataagatccattctgtcagtcttttttttttttaattcatttttattgagacagagtctcactctcattgcagcctcccactcccaggttcaagcaattcttgtgcctcagcctcccgagtagctgggattacaggcatgtgctactgcacctggctagtttttgtatctttagtagagacagggtttcaccatgatggccatactggtgtcaaactcctggcctcaagtgatctgcatgtgccactgcacctggctaatttctgtatttttagtagagacagggttttaccatgatggccacactggtttcaaactcctggcctcaagtgatctgcctgccttgggctcccagagtgctgtgattactggtgtgtgcctccacatctgaccagtgtttgctgtttatttaatagtttaagacagttatccagatgaggttgcatgcacctgtagtcccagctacttgggaggcagaggcaggagaattgcatgagcccaggagtttgaggctacagtgagtcatgattccaccactgcactccagcctgggtgacacagcaagactccgcctctaagaaagaaagaaagagagagaaacatttaaagtaattacagacaggatgtaataatcctggtggtaactactgagaggtaggttaaatttaataggtttgtagcacagtccccccacaaaactgccatcacttcataagcaagcagcaaatttagagtttccaaggctacatgcactcctgaccaactgtctacagattccaggatttctactagcatctcagctcagtaatttgcaggaacaaatcatagaactcagggaagcactatacttaggattacgtttttattataaaggatacaaattaggaccttcatggctcactgcagcgaaaagaaaataaacataaagggggagatctgagaggatctcaaacacaaaccttatgtgtccttaggatatatcaccctcctaacacatcaatgtctgtcaccaaccaggaagttcacttgagcattgggtgtgcagaattttcattggggctttgttaacataggtgtgattgagtgaatcattggccacatgattgaattcaatctccagccttgtgcccctccctaggtcaggaggtcagactgataatgtggctcaaagcctcaacctcctgaagatatgatcattctttctggcatggccagcccccatcctgaaactgtctagaggcccaccatgagtcaccttaccaggtgtggtctaaggtatccactatgaataacaaaggcacgcctatcactgggggaaattccaaaggtttagacttagaggctgtcttccagaaaccagggacaaaaaccagccaaattatatacaacaaaagggcttatttctgtcattttgcgggtttttttttttatgcaagtgtttatctttttttctctgagttctagtactaccttcttttggttttgattgaatttttctactctgtttttatttacttatttttgagacaggatctctctttgttgcccaggctggagtacagtggtatgatcatagctcactgtaacctcaaacatctgggctcaagcaatcctcctgcctcaacctcctgagtagctaggagtacgggaacgtgccaccacacctagctaatttttagttttttgctagcaatggcgtctcactgtgttgctcaggcttgtctcaaactcccggcctcaagtcatcttcccacctcagacttccaaagtgttgggattataggcgtgagccactatgcccagcctctattcttacttttcttattcccttcttgctcccttttatgagatagatagatatatatattctcccacctcagcctccctagtagctgggagtacaggtgcacaccaccacgctcagcttattttattttttttgtagagatggggtttctctgtgttgcccaggctggtcttcaactcctgggctcgagcaatctgtccaccttggcctcccaaagtgctaggattacaggcatgagctacttatgcctggtctttcactaaatcttgaactcctcgcaaccactcacctcacttcctccgtagttttgccttttccacaatggtcatacagttggaatcttaacagtatgtagccttttcacattggtttctttcacttagtaatatgcatttaagtttcctctatgtctttccatgctttgatagctcatttttggttttgtgctgaataatactctattgtgtggatgtaccataatttatttattcattcatttaccgaaggacttcttggttgcttccaggttttggcagttatgtatcaagctgttataaacatccatgtgcgggtttattattttcttagtgattaccccaatgattataactaatgtcctaaatttattataatcttatctttagtagcctacaaaaaactctttgactgtgcccttgttatattgtcacaaactctctttatgcaccatatacccattaacataggctataaatattgttttatgcattagtcttttaaatcataaaggaaacaaaaagaagagttacttaaaatacagaaatattggcttctggccaggcgcagtggctcacgcctgtaatctcagcactttgggaggccgaggcgggtggatcacgaggtcagaagatcgagaccatcctggctaacatggtgaaacctcatctctactaaaaatacaaaaaaaaattagccgggcgtggtggcaggcccctgtagtcccagctactcaggaggctgaggcaggagaatggcgtgaacctgggaggcggagctggcagcgagccgagatcgtgccactgcactccagcctgggtgacagagcgagactccgtctcaaaaaaaaaaaaaaaatactggcttctatatttacttatgtagttaattttacctgcgtttgtcttccttttttcctttctctctccctccctccccctccccctaccccctcccccttgccctccctgacactgcccccaccccgccccacccgtcacttctcccatccttcatttcaatctaaaaggcttctttagcatttcttatgggcgggtctcctagtgtctacctcccttagcttttgttatctaggaatctctttcttttctttttttgaatgatagtttggtatatatatagaattcttggctggcaattttgtttttttccagcacttaaaaaaatgtccaactaggcacagtggctcacacctataatcccagcacttaaggaggccgagacgggtggatcacttgaggtcaggagtttgagaccagcctggccagcatggtgaaaccccatctatactaagaatacagaaattagccaggcatgatggcgcatgcctgtaatcccagtaactcaggaggctggggcaggagaatcgtttgaacgcgggaggcggaggttgcagtgagccaagatcatgccactgcactccagcctgggtgacagagtaagactctgtcttaagaaaaaaaaaaaaagtcctcctgcttcctccaggcctttatgttttgtgatgagaaatccactgttaatgttactgaggatcccttgtaagtgatgaattatttttgtcttgttgctttcaagcttttctttgttttttcacagtttaattataatgtgtcttagagtggatctttttgaatttattctacttagattctttgagcttgatgtgtaggttcttgtctttcatcagatttgggaagtttccaatcatttcttcaaatgttctttcttctccctctgagactttgatttttgcctacattggtgtgctttatggtatttctcttagactctgattttcttcattattttttctttctgctcttaagactagacaagtgcaattgatctaccttcaaattggctcactttttcttctgcctgctcaaatcttgtattgaacctctctagcaaattttttcatttttgttatacttttcaattccagaatttctgtttggttcttttttataatttttaaatccatattgatgttctctatttgtagacacatcacttttcttgtttcccctagatatttgtccatggtttcttttagatttttgagcatcttaatttagtaagtccaacatgtcttgacttccccagggtcagtttctgttaatttcttttttctgtgaactgaccgtattctgttactgtgcttgcttcataattcaagtacttcatttccttagtatacttactcacaaatcagattttactctttccaaagatttcatttttctgctatatgttgaatgtagttgtttgcctagtaacttttataatctattttgtagagactattctttctcatgtattacccctgaggtgtctatttcattaatatattgtacaccaaaataaaattctaagccacccaactaaatgaatggaccccctcctctcagccaatggcattctaaagtaaacctgaaacactagttcaggtcgtgctgggaatgggtggtttggacatgcctcattatgccttcctccctttggaattcaggtactgcagaccagcattaacatcaaaacagagaccttaagactgactgaacagactctttcagtagataagaaacatttacagtctcttctttctgaagcctgctatctggaggtttcatctacaaaatgagaacctgggtctccacaaccccttatcttaacagcactcttacaatactcccttgtattgattccaggtctttagataaactctttctaccagttgccaatcagaagatctctgaatccacccgtgacctgaaaatccctacttcgagttgtccatcttttctggacccaactaatgtaccttttacatgtattgatagatggcttatgtctccctaaaatgtacaaaaccaagctgtaacccaaccaccttgggcacgtgttgtcaggacctcctgaggctgtgtcacgtatatccttaatcttggcaaaataaacttctaaattgagacctgtctcagatactttttggtttactatatagtcatctggtgtttcaacagacatttcctttaattcctgaagaagaaaagattgcctagtctttgcagctgggccctgtgcttgagcactcacccagacactttacaactctgcatttgctttgtgcagagcttgagagtcaaccataggttagagcttagggtgttctcagatctcttccgaggatgcctcttgcttgcacctagccttctagtttcccaataatatgtagaagcattgcaaagtcttttattctccaaagcatttcctctgctagcttttcctcccagtttctttggcttttctattgtttaccccaactgatcctctttttccttagtttgcagagactggttcatttgccttccattgtttttgacagatgccctccacttagctgtttctctgccttcaaagattttcttttttttttttcgagacagagtctcgctctgttgcccaggctggagtgcagtggcgtgatctccgctcactgcaagctccgcctcctggattcacaccattctcctgcctcagcctccagagtagctgggactacaggcgcccaacaccatgcctagctaattttttgtatttttagtagagacgggggtgggggcggtttcaccatgttagccaggatggtctcgatctcctgaccttgtgatccgcccgccttggtctcccagaatgctgggattacaggcatgagccgccgcgcccagccaaagattttctagttacgtgaaataatggcaagctgttggtgttagtattttagggagccctcagacaggtcaaagcaggtgaccacaattatttgagaaaaagatcttctctgctccctccttacagcaggctgccatcttcaatactgcccccaaggtattgggagtgaagggagggatgaggcaaaggtaagtgaaaactccacagagctctccggagtgtcccttgctttttggattttgattaaacatttgcttatttgtagtaaacctttgaatgttttccagagttctgataaactcagttctgaaagtttctgtcagtttctttttctgtttctgtgaagagactgtctttgtacttttttttttttaggattcattacatatatctttttaaaaaacaatttcacaaggccagatttattaaaggaatatactttattctgcaattatgtccatcctagatactagatactatgtgatctgatctgtaccacatgaggaccttcttactccatcattttctctgacatcacctacaaaggcttcttttttatggaccatgtgaatatgacatatttttgttacacagactttccagaatcctttaattttcttataaatattaatgccaacaaaccttaaaatttttgaggttatgaaagtgttcttcaatattgcatagcatactatcacattccggttgttaaagagtatcattaatcagttttattctgtgttaaacttatacatcaaaacatgaaggacaaatttacagttaaacttcgctgttgccactaattaggatcagtctaaatgtgcagttcacaaattgagtgcttaaatctgaggcaacctgggataccaaagtgaattcacagggccacatcaggattttgtttttgagggatgcacagcattatctgtacttcatgtagtcaccattcagactactagctcaaggtagttacagtttcagggttaggtggagctacattcctttcagtgatgttgtgtatttatgaagctgggttttcctcaattgctgtgattttggtttttttaaagtgctgtgtgaaatcagtgtggaataggaaatcagtgtggtagtttccaaactgattccaaagctttagagttatacagtgcccaaaaagaagtaatcttgcttaagaatgaaatgaaaatactttttcttttagttatatgtattttttttcaaatagctattaatttgttaggaaagcaatcatatcctatgtttggacctaactgtttaatcaacaaaactataaggtatatcttttggcctagggacacagttaaaaaatagtttaataaaacattagggcaccatgaactgagaaagcttgggaacctctgatctaattctttcatattgataactatttatctttccagtcatatctgtgtaactcctatcatgaatattctgtcataaactggtttgtgcccagtgcctcccctaccttgcttaaatgtctttgccttagtattcatcttcttatatgtatttttaaatcaaaactggaatatagacctgtaaagagcaaagaccttgtcatctacctacatataatcctagcctccagcacaggatatttgatacattcaacaagtacttggtaaatagtatctgacaattaggcagggactatactgcaggcaaggactgtacttattgtctgctaagtttcaccaccttttggctcaatgctgaacacattgttgatactcaagcatttctgaatgatccattgattaaaataaggttgtcaaatattttgaataacaatatttctagaaaagtaataaaatcacattttagaaactcagctgataatgactggaaatttttttccttttctattctagtctcctgttccctcctttcagttccttcttcccctgttcctcattccattactgaactttactcaaagttatataagtcaccaacctaaaaagaagtatcttacaattcttaagacatttttaaaaaattctttaagctcctactggaccataaactaaattttaagtaactagggagagaaatactactgacattaatagaagactacacatgacgaaaagatgaacatggatgaatagtaagagcatttgctgttctgaatttttcactgcatgctattatttgtggttcgtctcatactccagtttcttttgtggttgtatgattatactactgaaatttgccagtttgttgctactttgaataaggtataattgtttttttgttgttttttctccatgttttgagaaatttactagttttttataagaggatatttctgcagaattaaaaaaagttgcctaatcataccatgatgaaatactgaattagtgaaataggtataaaatagttttccagacagttgaaagaaaatttttaaagcatttacttgttctaatgcaattcatagttattacttctgaataccaacatttacttcttggatttgcttgttttaaaaatttcatattgtgctttatgaatgtagttttaagctatttctaatgtgtttatatgcaattgtgtcacctcataaagaaacttctagatgtttaataaagaactccctctagatttttttcctaaatgaaagcaggtgttgagcattgtcatgttctgatgtattgaaattgctaaaatatttaataagctaccatagtttgaagtagtagccagatgttttcagtttccccaggatgcattttacagttgagcatttacagtggaagttagctaaatttgccagtttaacaacaacaaaacaaataagaaacacaaattttttaactcaaaatgatataattaatgtgttatcactgtacagtaagataagatttccacagtctagcaaaacattattgacactccacctcccaacgttaatagccttattgaggtatagtttacataccatagaattcactcattttaaacatacacagtatgatttttttagtaaatgtatatgcctatttcaccatcatcagtaatccagtttttagggcagttttattggaggaataattgacatacaaaaactatacatatgttaagtgtatggtcttgctttcattgttttgcatgagagatctcctgccatcttaatctttgttcctctctacgtaacatgtttttttctggctacttttagtgtttcttgttcacgacttgttttgagaaattggattatggtgtgctttagtatggcttgcttctgtttctttgtttagtgttctttgaacttcttggatacttcttgagtttatacttttcatcaaatgtggagaattcatggccttttttttttctaatacattttgtgtctccgattctttctgctctctcttaatgaggaatttcagttacacatatatggccacttgaagttaaactcacagttaatatatgcactgttctttgtttattctcaagtctttctttagtgtcttctatttttgataatttctttgctgtgtcttcaaggacactaatcttttcttttgcaatgtttaatctgcctgcagtcccatccagtgtattttttttttaatctcagatattgccattttttaatcactagaaatttggtttaagtctttttcatttcttccatgtgtctgtgccacattttcagtagattgactgttttgatgtccttgccttctaaccctaacatttatgtcagttaagccactaagcttgtaataatttgtaacgcaaccatagaaagcaaatacacctggtaatctttgagtagatgcagacattgtgaattttaccttgctggatgctgaatatttttgtatttctataaatgttcttgagctttgttctaggacacagttacttggaaacaatatgacccttttgggtactgcttttaagatttgttatgtgaaacaagcatcatttagtttaggggtaattattctctactgctggggcaagactcttctggatattttcttcagtgcctcatgaattgagattttcaagcctggctggtggtaacaaacactattcctacctatatgcactgagtattgttctttctaactttttcagtgggttctttcccctgcctcagatattttcttcataggcaggtgctgattagtactttgatgaatacttgaaaaccctctgaccatctcaggagttctttctatgaacagctttaactgccttgtgaactctagctgctttggtttccttgtactcttatttctgtctcttcaacttggctccgcctgagtttccccctccctgcactgtgtcctagaaacccttaagacagtaagctggagcaatcttagggcttatctcatttgtttcccatctctcagggatcactattcgtctttaacctttttcatatattttgtctgattttctttttttggtagtttgaattgggaagctttgtttgttactacttggatagaaatatataagtacttcagtgttattaaaaacaatttaaaactttaagtaaaattaagtagttatttaaattaatgggacaacttttaccagaaatattcctcctaaaatgttattcattgtacagtatctaaaatgttaatacggaagcattatttaaattctagtatactgtgtctagcccaaataatgacaaagccatatatccagaggacctaactcatagttctttattttcattttgaacacctttagtatttatttgcctaaataaattgaagttattttatgtttaattacaacccatgattttttggctaattaaactaacagaatggaaagataatgtcattttacatcaaatagaacacatttatttagttatacaaaaaccctgtaaagttcttttctgtgttaactacgtaactattaaacatagttggtattcacatagtgagacttccttatttccaatttttatgtgccattttagtggcatattatttagctttatgtttctcctcccatacctctaccaacatagtttatgtaacttgttttcttttatgccctctatacagacaacttttgggagatgctgttccttttttttttttttttttttttggagagagagtcttggtggaatgcagtggtgcaatcttggctcactgcaacctctgcctcttgggttcaagcaattcttgtgccccagcctcccggatagctgggactacaggcgcacaccgcctcgcccagctaattttttgtatttttagtatacagggtcttgccatgttgcccaggctggtctcaaactcctaaattcaggcaatccacccaaagtgctaggattacaggcgagagagctactgtgcccagccaggaggtgctgttcttttctataaaatttcttatagttgtctaaagaatttgtaatggtttctctaattaaaataggaaagatgatagctacctcatagatcctctgggagaagagtttttgttaccagattttttttttctttttttgaataggtaagagatttagattaaggattccatagattaagggttgatgttcttatctgatatttatgtttgccaacaggtactttggaagttcgtcttatgggctgccaagatatcctagagaatgtccctggacggtcaaaagcaacatcagttgcactgcctggttggagtccaagtgaaaccagatcatctttcatgagcagaacgagtaaaagtaaaagcggaagtagtcgaaatcttctaaaaaccgatgacttgtccagttcagtaaccagatttttaaaaatcatgtaacaaactaaagtgcttatacaagggatttatgaagtgttcaagttggacaaaacactttaaaattatggtttttataatttaattaaaaaatattaaaacctgtgatgtcaggaaacaaaaaggcaacaaattctgttttgttgaagatacattagaaaacttaatgacaaatgacattagttcttttggaagaatgaaatattgagcatcactcttatgccaaactgaaggtatacagaagctatgagactggtccttcttgtagaatcgtatcttgattcttttatttttctttattttttgagacagtgttttgctctgttgcccaggctgggtgcagtggtgcaatcaggtctcaacctgctgggtttaagtgatcctcctacctcagcatcctaagtagctgggactataggcatatgccaccatgcctggctaatttttttttctagaggcagggtctcactatgttgcccaggatggtctcgaactcaggggctctagctgtccttccacctcagcctcccaaagtgctgggattataggtgtgagccaccatctccagccttgattcttttaatggtttagtgacactttaatagtaacattgaaattttggtaatctaactgctgatccagacgtgtttactgagatagtagcctggtagtccactgagatgggggatggtaggggttggtttgaggagagtaaaatgcaagaggtttggaaagcactggggagaaattctgaagtataagcataaactatatgtagatgtataactggggggaaaagcatgtgacagttcagcctaccgtagaatacaaaagtgaatttgcctgtgctttcatgtgtatagagagaggctttaagaaaaataagaaaataaggaattgtttaaggaaacaagctctataaatataagatatagaaagaaaaactgattgatattcacacaaacagtgtggcaaacaactactatttatctgttctttcagtcacatgccaatgtaaacaaaagagatagcagtcactatttgtgtttttgtcaaacaatttgggagtgtctagtaggagtatatgtatctgtaaaactagccatttaagattcaaaagttttaatattgattatgaaaaactttattttcaaagggtcttaagacttttattgctaatcaaacagcagtacttctgttttttataaaggtttaaagtttttaagcaagtttgtaaattttaattacagatgatgtctgtgctgttttgaagctcgataatactgtggttggccaaactagctggaaacccatttccaatcagtcatgggaccagaagtttacactggaactggacagggtaagaggactaacattttacttgaattttaattataattcattttaaatgtgagttatattttttagaaggcttcaacaagttgtattcttaacaagaataaaaatagaacttagattttttttttacatttcttattcaatgagttatgcataaatctaccttaatatagagatgaatatcagattgctgtaggatctttcatttgtgtagtaatttgaaaatgtttcattcatagcaaacttaaagatcagtaaggtgtaatattgaagcatattggtgatcttaatgcgctaacagctaaggcgattcttctggctcaccatgtgtaggttatcttactcgagctatatttgaaatgagctattaggcttggtcacccagccttctgtgtgtttgtgtctttcaagaataatttgaatagctagaattcagtctgtggccatagaacccatcagaagttaacctggtccacagtagatttaaatccatagtggtaacttttagattcaagtccattcattgggttgtgagaggaaaatattaaaacgtaatcgtaattttatctaaaaactaagaaagatactaaacttttttattatttggtatttaggttgatggtatatatgttattctaaaaattaattatgttaaagcagatttacaatgcttaactatgtgtgctctcaaaatgttttggtgattactgttctaagcctctacttttaaaactgggaaagcattcaattttaattctttcccagttttaaaagtagaggatagaacagtaatcaccaaaacatttttaaagcattcaatgttttgcagtctctaaagtggaggtaggaatgtaatactcacagaactgttaggatgaaaaaccaagagtagtatatgtaaaataccttgcattgccggtacatttaagccattcagggatattctttcttttaacctggggtttgaagtatggctatgaatttgaatattatgaaaggggatttgagaatggagaactacctggttgaatgtcatttcctttcatttcgagcctatttaaggtaattactgagtaatatcaaaatgaaacttaaagaattgttattagagggaaaatgactagctaggagatttttcttataacaaggttattgttaataaagttttatattgaaaagagaaattacaagtaatttagaatcttgccattattttgtagttgaggaaaccaagatccaggttagttacataccagtaaatttcaggactggtactagaccttcagtgtcttaacttttaaatggatgctctttttctctctggtgatttgaatgagatagaaagataacagtagcacagaggaggaaacagcagaagatgaagagtgcctggaagagataatatggttttaaattacctaaactacaagcttagaacaataaaagactgtgataactgttatttgttctttccctgccattgtaatcttcacctgaaaatgtttttcgcctcaatggcatcaggcatttttcccactttggaataatgctccttttaaaatttggaagacattgtgcatgttaagcaggtcctctaggttcttgagaggcatctttcttatccctaatttgattataaacttttccttggcagaaaccacattccctattaaaataggtccttctgtttacatagtatattttacattttcatgtgctttctattcttttatcctttgtatttatagactataaaaaatgtttataaaaacatagatggaaacatttcaagcggccttagtaaaaaagagaagaaaaaatttatagaaaatgttgctttaaactgacatgtttgtttccagcattttgcctcatatgtcaactttgtcttctatggcattcgggaactaagtcgtctgtactgtttcatttcaagataaaaaattcatggttctttttagagttgtaggataattctagaaatgatctagatctagaatgatctagaaaaattcaaattatgttctgtggagcttcagtgttctgcagaattgtctcaggacgcaacacagtcttttgtgttgttttgggattttatgtaaaatatcatttggattttgctattagaaaaaacgtttttaaattgttggtataatttagctccattttacaaactaaggaaattatggccctcaggctaagtaactagcgtagggtataatccaggattttttttttttcttctttcttgagatggagtttcgctcttgttgcccaggctggagtgcaatggcacaatctcggctcatcgcaacctctgcctcccaggttcgagtgattctcctgccttagcctcctaagtagctgggattacaggcatgtaccaccacgcctgtctaattttgtatttttagtagagatgggggttctccatgttggtcaggctggtcttgaactcccaacctcaggtaatccacccacctcggcctcccaaagtgctgggattacactcctgaaccaccgtgcctggcctaatccaggattcttaatgaagtctacttactaccagctctgtgttctttctattctgtcgggttactcttttatattttcttgtagctatgcaatttttcatttttcctgaattccctcagccttcctgttataaaaagcttaatgaagctcccatgagagattgaaataaatgacaaaatgttacactaagacctgttaactctttcccttgcacctttcctttagaataacgttactaacatagtagtagaagttctttatcaatattagaaacagagaagagccctgtccttagaaccaaagcttagaacaattttagcagatttcagtgttgttaagagcagaactatagaaaatgtcgaccgatcactgggaaaggagggaaagagagtatagaagcagttaggacaagtaaaaaggtggtaggattcatggattgggactaacagtgggattgtcatatcagtggatgttgaagtattagagagagtgaactagaatattaggagataatgttcagagagaaagatgcagacagttgagattgtggaaggattatagttactggtatgacagtatgatgacaggagtgaaacggcaaggtaaggcaagtcacaagattataagaagttagccgtgtgcagtagcttatgcttgtaatcccagcactttggggaggccgaggcgggcggatctcctgagttcaggagttcaagaccatcctgaccaacatagtgaaaccctatctctattaaaaatacaaaaattagctgggtgcagtggcagacgcctgtaatcccagctacttgggcggctgaggctgagactctgcttaaaccccggaggcagaggttgcagtgagctgagatcacgccactgcactccagcctgggcgacagagcaagactctatctcataataataataataataataataataataacaacaacaaaataagattataagaacccaagggacttttcatttattggtttctaattttcagaaatttttgactcacactacatgaaagaagattggaatttaacttttaaaccaccgcactcctattctcattctcccaaataattatgttaaatcagtaatctagtgtttattataactataaagattgtccatagatgaaccaagttctgtatggtgattatatttcctttttaataccttttcctcccttagggccactaaatacctctttgttttgttttgcttagttttctgcatacctattatttatccccaaaagctccagaaggactctgaaacaactctatgtaagcaggtatgcttggttatgtattagtccgcatttcttccccattagaagcatcctttctggggccttacatctttctgctccaatttatatagctgctacacagctttcatcttgagactttgttttactatcatcttgagaactctcttctacattggatcacttgagtcttggatcactccatcttcttgctttacctcctcatgctggtgaatcatatccttcattttcatgctgagaaaagggtgaatgaaataaagttttagagatgatatatgtctgaaaatatgtatattctactatcatacttggagtatagaattcttttaggttggtgcaaaagtaatagcggttttgccattacttttgattgcaaaaactgtgataacttttgtaccaacctaataggttggaaattactttcattaattttgagttgtgtaattattatttagcctcagtattacagtcgagaattctgtgtctcccttgatttttaatatttaatcatgatctgttagatctgctagatctctaaaaacttttaagattttatctttttttccccgggattctgaaatttcacagtagtgtatcttacttgggtatctttcattctttttggtggatattgtgtggcactttcagtttgaaagcttatttgtttcagatccaataaatttccttgagttatttatttgataattttctcatgtccatttttagtgttttctcttggtagttaaacctcttagattgatcctgtgattttcttttgtctatggtttctgtctttttgttctactttctaggaaatttttacaactgaaaaatttacatttgatgtcatatttttaatttttagaagttcatttttgttgtttagtttttgaaaaacaacaccctgtttttctctcatggagataataccatctcttaaaactgagaatatcagttttaaattttcttcttgaattgtctctactacttctgaggtctcttttaagatgtctgcttatcatattgtatatttgggcaaatgtgtggccatccatggctttcttaagaatgagacactaaagtaaccaatttaaagctgtgtgtgggccaggtgtggtggctcatgcctgtaaacccagcacttcggcaggccgaagtgggcagatcacttggtcaggtgtttgagaccagcctgaccaacatgatgaaaccctgtctctactgaaaatccaaaagttagccgggcatggtggtgggtacttgtaatcccagctaacctaggaggctgaggcatgcgaattgcttaaacccagaaggcagaggttgcagtgagctgagattgcaccactgcactgagcaacagagtgaaactctgtctcaaaaaaaaaaaaaaagctgtgtgtgtggagttgcccaggttttgaactagttgagagaaacaaagaaatgactaatggaaaataaaatatccatattactgaaaaaataagctgttttttgagagtatggctgggtatgcagcaagagtggggttatgtccagtctcttggatcactgtaggccccgatctgtgtaaaatttaaagcagggaggaaaagagcaaactacttccattgaacagcctggctttcaacagaaaagaaggaatgggctatgttcctcatgtccagtttgtcttccagagtctcctatcagataacagattctgaggtttgaataagagtattgaggtaaagacctatccagatatttagggaaaatggggaaattatttctcatagcaaccatggcagtgagaaagatgctttctccctagaaaaggataaaaatgcatgcagccaccatacctggtcacagattttttaatggggagtaaagcactataatatagcagaacaagagtaggaatacaaagatacttttaattttttacatgttataaactgtctgacactgggagtattgtttcatctgagatactgttttttaacttgtaacaaagctgtaacacttatcttttttacccctcctttgctgcttccagattccaccgctgttaaaaataacatgtcggccgggtgcgttggctcacgcctgtaatcccagcactttgggaggccgaggcgggcggatcacctgaggtcgggagttcaagaccagcctgaccaatatggagaaaccccgtctctactaaaaatacaaaattagctggacatagtggcgcatgcctgtaacccagctactcgggaggctgaggcaatagaatcgcttgaacctgggaggcagaggttgcagtgagccaagatcgtgccactggactccagcctaggcaacagagtgagactccgtctcaaaaaataaataaataaataaataaataacatgtcatgtattcctctggggctatatgacttctttgagactatgagctgtatagttgacccttgagcaacgcaggggctagggagcacaagcctacatttccaacccatgtactcgaaaatccacataacacttttgactcccccagaacttaaatactaatagtctactgtggaccagaagccttattgataacatagacagtctattttgcaaaaaatacaaggtttttgtgcctgccgtcttagctgcagcagcagcttcagaaatttccttttcttcttttacagtggttcttattctggattcatttatattgaaatggcagaagctacaactgcaaacctcaatatataggatacatatcaagcagttcaacttgttcttgtaatgtcatgatttttctccccttcttgggagcgcttccagcatcactagtggtactttgtaagggttccataatattattcaaggtttatggtattgcattaaataccatgaaaaatatgcaagaactgaggcagatcacttttactgccatatgcaatttactagagagatgaactgctcaggcagaaataattagatttacatagtgttttaaatggatactgttgacacttgagctcaccataagagcattaggaggtggctacaaaattatagtagtacagtactacagttaattttatgcagttatgatttaatattgcatcttgatgtttgtttatatttctcttgactataaatggtgccatgtatggtctgtaagtgtttgtgtgtaagtttgataaattctaaccttttctaatagatttgtgtattttatggtagtgaatgataaaatagactagtatctacatatatgcattcatgacatatctttgttgtaatgtttttgatatttctatgctatgtgattcatctgcagatttttcaaactgttgcacatttccaaaaaagattccagtatatttattgaaaaaaaatccacgtataagtcgacctgtacatttcaaacttgtattgttcataggtcagcagtatagaattgcctacttttttttcttttttgtttctgttatttcttgaacatcaggtactctctgatattcattaaggatgacttttattcttccttccaacatttgccatcattatgagggatttaaaatatctgcatacagttgtcccttggtatccatggggaacgatttcaggactccctctccctgtaccaaaatccatggatgctcaagtcctttatataaaatggtgtatttgcatataacccacacacatcctcctgtatactttaaatcatctctacagtaattataatacccagtgcaatgtaaatgctatataaattattatactgtattgtttagggaatattgacaagaaaaaaaagtctacatattcagtacaaatacaactatccttttattccccaaatattttcagtcgtggttggtttaatccacagataaggaacccacagatacagagggtggactgtatatgtaaacaacccatataatataccactatttaaacttctttgaactcctgaactctggtatacctttactcctttgtcattttaaatgaactgtgctacacaaattgaaatcttaaattcgatatacctgttgggcacggtggctcacgcctgtaatcccagcactttgggaggctgaggcaggcagatcacctgaggttgggagttcaagaccagcctgacgaacatggagaaaccccatgtctactaaaaatacagaattagccaggcatggtggcacatgcctgtagtcccagctacttgggaggcttaggcaggagaatcacttgaacccgagaggcggaggttgcggtgagccgagatcatgccattgcactccagcctgggcaacaagagcgaaattctgtctcaaaaaaaaaaaaaaaaaatcaatatgccagcctttcaccagttctcttgttgtcctgaatgataaactacagaaagcacctagaataattagccaagtttggggcacaagcctgtagtcctagctactggggagactgaggcaagattacttgagcccaggagttgaatacagcagtgagctgagaccatgccactgcattccaggctgggcaacagagtgaaaccctttcattaattagctaactaattaatgcacctaggataataccttgtacataatggtattcagtaaacgatagctcttgttattgtttttcttctagctgttttttttattatcacaaagctagatatttgatcaaatatttccatttccttgattcttcaggatattttcatgctatcagccccttccaaacttaattttcttctctatttaccctaaaaccaatgttactctgaagcatttctttactgatactgccacagcatcctttgaccttatctttatacctacctgctgtggaaactcccaatagcaaataatttctattctgcttctctactctatatcctgaatgttgcttctctgctctatatcctgaatgatcacatttactactgcaaattttagttttcaatcttagctaggcttgtaaaagttatcccacattttacatttttatttcattaccagcaacttttcttttgcctgtctcttcaagttttctaccccacgtcagactcctttgcttttgttttatagattagatttaagaccatcagacctcagctttctcctatcacctgctaatttttttgtatcttcctccttggtttcagagaacgaagtctctctctttcctgtttacagtctatgatcattcaagttgccctctagtttccattctttctagtctcctatagccttgtttcataagttagccctattagcacctatatttttaaccacttctttcttctgatatcttattcttgttggatatactcacattcctcccattaaaaatttttattttgcttcgtcctagctctattgataggtctttctttcacagacaagattcttgaaaaataagttgtgttcagaatctgttcttcctcaccctcccatatgttaaactgaagtttctactgccattataggttctgaacaaaaaaccttatgtatagtgtctaatttaatcctcacaataatcttatgatatacatacaattatttctattttagagagtactgaggttccaggagtttcagttagttttctcaggccacacagctagaaagtggtggagccagtaatcaacacaagcatctctcaccaaagtcaagtctgtctgaagccacggcttttgttcttcattagagttagcaaacttgtctctatttctagtctatccttttggcagtgtagattttcttcattgcatatcacaataataataaaaggcgacatattgagattgacttatgtactggagttgtattaactcctttaattctcacacagcgctgcaaggttgataccattaacacatattttacaggtgagcaatctgagacccagcaaagttaaataacttgctcacggtcacagaactactaagtggtgtgggattaagatttaacctatttgttctacaaacatttattgagtgtgcatgcatacgcaaggcagtttgatcccagtgcttttctttttagcaactatacaggttgaatatcctttatctgaaatacttgggaccagaagtattttagattccaaattttttttcagatcttagaatctttgcatttaaaaatgcaaactgattgagcatctgaaaaatttgaaatcccaaatcctccaatgagcattgcctttcattgtcatatttgtgctcagaaagtttcagattttgtagcttttcaggttagggatactcagcctgtactgcctgatgtgatccaatccctacccctccttacaccgaaaccctttagtaccagcctgtaacttcaagttaaagaccaaattctactccaagtcatgctaagctcctcatgacttatctctgcccatgttttcattcttatttctcacagcatttctacttatattctaggctttaactatatgaaactgtttcctatccctatgatgtactatatacttccttacctttgtatgttttttcccctctgatgactttgtcctctcctttaatctttagatatagctctcaaaacccaatttgagcaattatgatattttttgatcttcctactacctttcccttacaaaaaaattggtcagctctctgttttgtgtcattgtgcatattgtatatgccactgtattgccagtattgatttacatttctgtctcccagaatttccgtcttccaaagcaaaactgtgaactatttgagagcaggaccatatgttacttatctttgtatctctatcacagaagacacttagtatacatattcactaagtattaatgggatgaatgaaaataattaaaactgaaaaggaggtttgctcaacctttttttttttttttgctgcagcatacccaaagaatacaacacactctagtcaatacagtgattcccaaatagatacaggtcagaatctgagaagggagggcaggtataaatttgaaaatgtcagggccaggcacagtggctcacgcctgtaatcccagcactttgagaggctgaggcgggcggatcacctgaggtcaggagttcaagaccagcctggccaacatggtgaaaccccatctctactaaaaatccaaaaatcagccatgtgtggtggcaagcgcctgtaatcctagctactcaggaggctgaggcaggagaatcacttgaacctgggaggcggaggttgcggtgagctgaggttgcaccattgcactccagcctgggcaacaagagcaaaactctatcttaaaaaaaaaaaaaagaaagaaaatgtcttccaggtgcagtggctcatgcctataatcccagcactttgggaggctcaggtgggcggatcacgaggtcaagagatcaagaccatccttgccaacatggtgaaaccctgtctctactaaatatacaaaaattagctggatgtggtggtgcacacctgtagtcccagctactcaggaggctgaggcaggagaatctcttgaatctgggaggcagaagttgcagtgagcggagattgcgccactgcgctccagcctggcgacagagactccgtctcaaaaaaaaaaaaaaaagagagagaatgtcttccttacctactctcatctcgctccacacaactgaatctgatttaattatctgtgcctcacttgttattaggaaatcactgctctacaacatagtgtagacattttagctttttcttacctctctgatctgtaaattaatactcaaggcctccatttagcactgtgagaaatgtaatagagaccaggcacagtggttcatgcctgtaatcccagcactttgggaggctgacatgggagaatggtttgagactagcctgggcaacacagcaagacttcatctctattctataaataaatgcacacaaaaaagaaaacaatttttaaaattagtgaaattttaagaagaatttttaaaaagaaatgccaaagaatgcaaaagcaccagaggtattccttccataaaggaccctaaggcctggtaggttaaaaataaattgtttgagacaaaataaaaaactattaaattgtatttcagaagcttaggggaataataattctaccaacatgagcttgcatacaaaattttaaaatacatgaggatatagccaccatgaccaagcagaagcagataatgggattattaaatatataatataaaatattttaaagtttgtgtttaaatatttaaatgattatagtatttaaagaatagaagagtttgaaaacatgagcaaaggataggtgatgagccaaaaagactaagcagagttttaaaataaataaataaaatgaaattttagatgtctgaaatttgcttcaaataattatgggggaaacgtggagatgaaacattattgaccattattgataaattgttggtgctgatgacaaagagaaccaagtagaactaaaaaataggaaatataacttctgaaatggaaaactaagaggatatgttaaagaaaagaagagagagttagtggcctgaaagtgctaaagaagttgcccagaatacaacacaaaaagattaagagatgaaaaatatgaaagaaagattaagagacatgaaggataaactaagaatgactaacacacggagtggagttccagaaggaaggattagaaggaatggggcagaggccacatctgaaggaataatagccagtaacttccagaatgatgacaaccatgagtcctcagatttgagaacataagttcctacaaggatacataaaaagatagctgcgttcaaaaaaccttggggaaaaaatgtgggctggatttaaaggatgcctttgtagaagagatggatgtttaacttgcccttgatgaggagaatttggactggtatgggggaaagaatagtaggaaaatcttatgtaacaatataggtttgagttggagaataagatataagattagaaatagaagctatatatgtaaagacatggaggcagaaaagtatacaataggtttggaataattaggagtctttggaactttttatatgatgtggattgacataggaagcagttgtgcatagttgatagagcatagcagtttctatcatagttgtttttgtctttcctataaagggagcagaggcagtaacccacatctatagcaggccgacttttcctgccaagatcatggccttaatagtctccattatctctgtctcctactgttgtctctgtatttctcatcctcccatatgatcccaaagtttccctctttttgtcacatttgttccagctggagaatcactctcattggactgctgaactgaaaacatatattattgtttcttgaggtggtggttttctgtttttccccagtggattccattgtccttccttccctgtcctaccctgtttttgggctgatgactacaaagttcacttgaattacttggctctgacttacaatgagagacactgttaagagatccaagagctaggaggaaaggaaagtcgcagtgtgtatttccctttctccttccttgccttgccttgcttttcacaacagcattcatctatggccaccaactcctgtcgggtagttccttttttaagatttagtctaaatcagattctggcaatgatttaagttcctcttgccccttcaggctaagagtgataatggatttctactgttgcttgtcctcagattcttttcattccttgttggtttaactttaatcacatctccataagtagccaatttaaaaaactctctttagttaaactctttcagtgtactatctgcatgctgctaggaccctcactgataaatttccaaagcctatgttgtcctcagaggcacattgaagaccaatatcatcgctcgtgtacacgtttgcagaaatctcatctttcctcagctcttgaattttccaggtattgagtttattctgttttttagtggcaacagaaagcttttttgacctttcttttctttttggcggtggagcctggttctcattttcttcttttgcccttttcatttcagcagtggagcccagctctccacttctatcaaagtttccagactttctcaattcagtgtcctcagtgtccttgtaatgtttctgcagtgtgtccctagacctaaagaaatacccaacagttccatttattaagaagtgcttactagttagtattttaagtcttaaaacaggagtttttgaaaaatacaaatactgagagaaaacgtaatatttttattccattagtacatgattacaattaactaatgggacatgtctgcctgttgtacactatataacttcccacatcttgggatcataaggataactgcactctcatgtcttcttccacagtgattcttcataggaagttgctttttattgttgaaaacccaccttagcaaagatgggtttatgacatcaccagaaggaatatggaatattctaatgttgaaactatgaactacctttcgctagtagttctcacagtgtcccatagatgtcgctgtgttccctatgaaaagtgaaaatactctctggcaccccagggctcctcagtgaacacttcgagaacctcagcattctttgtgctaattcttttatgatagatgtgtactgttcttttttcaattgcaatacatgttttaatttgttgctttctaccacacataaggctgatgcagtgtctcttaccttttttgtttactttcagatcttagacttcagataagacatgcagattctttaagtctaccaagcagttttctctttgattctagattcaattcataataagacaaactgaaacacaagttgggacagtacctatctcaacttgtactgctcagctttttttggtggtagttttactccgtctagaatatcgttgctcctagagtttgaaattatctaacagcatgcccttgccttgtgtaactgacctgcttcatctagaaaattgccggcgtaccagcaatcacacttgcattttaaattctaaacattgggccaggcacagtggctcacgactgtaatctcagcactttgggggagccaagacgggtggatcacctgaggtcaggagttcgagaccagcctagccaacatggcaaaaccccatctctattaaaaatacaaaaattagccatgtgtggtggtgggtgcctgtaatctcagctactcaggaggctgaggcaggagaatcacttgaacctgggaggcagaggttgcagtgagctgagattgcaccattgcactccagcctgggcaataagagtgaaaccccatctcaaaaaacaaaaaataataaaaaataaatggtaaacattagtgacatcttcttatgcagaagcttcagtctatctgtatggtaccttgtttttcagataccatgtgactgttttacttattcaaaccatgctggatgttaggatttaaagtgggattgaacacaagtggtggagtactaacataaaatatctctagatcacagccccaccctcccacttatgttgtgaagaaagtaacgctcactgggaacagtgcaaagtaacaaaaaatgaagagctttatatgtaaaatgttagaaacagataatcggtgccgtgaagaaaagtcagcacggagacaaaggatctctcagcaaggcaatctttactttctgcagaaagcgtgcccctcgcaaatggaacaatcgcgagagcacacctgaacaaaggaaaagcagacatatatatcccttatgcatttgggttgtccttactgctgtgtcctgcatccattggctggagctggacctcacagtcttaaactgattactgatttgctaataacctaaaactttcctaaataggtaaatgcaaaggagaacaaagaggaagaggaagttgcttatgaaaggtttaaggaagcaacaacatttccaaataaggaaggggcataagctgtgagctaagacttgcctgggcctgtccagacatgcttgagtaagccaaagcaactaactgggctaaagcgtaagaactgatagttgataggaggctttagagtaaggagctattattcctagtgtcttttattttatttttaaatcaagatgagctttgaagaggaacttttctactttctacataaaactttaatgtagagtatagaattctaggaaagctagcttaaggtctgtgaggtgacttatcccaaatctcagatctgtaacatactttataaattttaatttttttttttttttgagacagggtctcgctctgttgcccaggctggagtgtagtggcatgatcttggctcactgcaacctccacctcctgggtttaagtgattctcatgccttagcctcccaagtagctgggaccacaggtgcgtgcaccacgcccggctaacttttgtatttttagtagaaatggggtttcaccatgttggccgttgctagtctcgaactcctgacctcaagtgattcacccacgtcaacgtcccaaagtgctgggattacaggcatgagccaccttgcccagcctataatgtactttagtttgaagcatggaatgaagagacagaggaaagagaaattagtcaatatgttagttttaccagactggctggaataaatagcaaatgaggtgattggaccttctcttattcacaataagacaaaatcttaccattttagccagtgtaaaagtgtaataagaacttttaacaagtattaattctgtctctagcgtatgtgcatcttgcatcttcctgatgcataacaagtcttccttgtaacagtggaagaaagcaggagaaagtagacctctcttcctccaatctaaaaaaatggagtctaaattaccaatcctgacatgattcttcctccagtttatttcacaaaataactgcttccaaaatacttaacacttttaacttcaatagaatattatagccttagtaccccatcccttctatatgccatttgctagtcttaattatattctcctcatacttctttcatgacagttctctcccatattaattatgagtcagagagaagaaatgaggtggaaggccctgagatcacattctcactgccatagacgtatttttctaattcttttcctgtttgactgtgaaaccctctggcacattgtattttgattcttttcatgttgcattttttataagtgtttttcgtgttcattaacatcaactagatatataatttaaggtcaatagatttttttttactgtttataccaaaacgttacataatgaaatgcataagtttataaattgaaatttgttatataaaataagtaatttattgctttgtagagccttaaaaggagaaacatttatctctttttgtggatggtgtacagaagcctgaaaaacaaaataatagaaaagtccagtactttatgattaaaatgtatatacgttaaaacatataggtagaggtcagtatatggtttggccacagcttaggaactatgttctacaggtgcatttaaacactggttattaaaaccttaaatatatttcgccacataagcattattttcagtgtctactgtgtattctctcatacggctttggtataattaacttgtccctggtttttgaacattcaaattcttgctaatttgctttttaaattatgttttattgttataataaatgaatatctttctgtataaagcttggtctgaatttcccctttcttcctttcgtacgcagaatgggtcttgctacccagtggtattcttttgaaaattaaatgacctaatattcttaaagtgcttattagcacaatatgtggcacattgtgagtacagaataaatgctatttgcagaactttttctggcttagcaatgagacaaataaatacaaaggtttcaaatgagttatttgaagcaagcattggggtagtaacatagcacatgatggcaaatagaggagggaaatctgaaagattgaagctctaagagaaggagtttcggtggttattcatctgtattggttgttcccagttgtgtattctttaagtatactttaggaataccttagctggaaaatgtcacaatgtaagttttgtttctttgaattaaaatgtgtaagtttgataaagtactatacagttgagaaatgttacaaacctctttaaaacagtgtgacctttgtgtgtgtaatttttgtttattgtatttgtatttcatattttttgtgatattttattcaagtgtgtgtccaatgatgtcttttctgttttctttattattttttttaattatcctagtcacgtgaactggaaatttcagtttattggcgtgattggcggtctctgtgtgctgtaaaatttctgaggttagaagattttttagacaaccaacggcatggcatgtgtctctatttggaaccacagggtactttatttgcagaggtaataaatgtattttattaaatgtgcataactacaattgaaattacatatgtaggcagcataatatagaagtagaaagagtgttaggctgaaagacagatgacttgagttcttggctgagctatgccactgaataggtatgtgactttgagacaaatcaattattcttcctatgtctgttttctcatgtagaaaatgaggggctggactaaactgtaactaagattctcttaagctttaaaattttataaatttagtagatttcatgaaccatgctattttcatgtcaacttgaattttcttcactgcaggttaccttttttaatccagttattgaaagaagaccaaaacttcaaagacaaaagaaaattttttcaaagcaacaaggtaattactaacaatcaaatgcatagcattttgatattttcttaaacaatctaattaccatttaaaaagtaatagccatctgtgtgggtttttttgttgttgtttattcatttatttctaacttcttattaaggaatattttaaatgtatccataagtggagagactagtgaaatgtacagtcacccggcttcaacaataatcaactcatggccaattttattttatccatatgccatcctctcactactttctcaaatttgaagcaaacccagacatcatattgatgtattcataattattataatttatatctaaaagataagatttatttttaaaaccttactactagacttaaagagaaaaaaacaatttcttacctatttatttttaaaactacgtatgctattttgcattagcctttactagcaaatagtaaaaaactagtttttttaagtgacaaattttgtttgttcttcgtagattataaactaatggataagaatttttaaattatgacttttggttatacataaagaaattacttgctgtttttgtttttttcaacatctacaggcaaaacatttctcagagctcctcaaatgaatattaatattgccacttggggaaggctagtaagaagagctattcctacagtaaatcattctggcaccttcagccctcaagctcctgtgcctactacagtgccagtggttgatgtacgcatccctcaactagcacctccagctaggtatgtgtctgagattttaagcatctcttatacaaagttattgggacattcttacgtactgattatagcaggtgtactgagtcttgcttttttcccaagtagtattttgaaagtagtgttctgtttacttaaaaagtaaattgtttgctttaattttaaagctgtttaaaatacagactttctattactgttttggtgagttactttatcttctataagtgattctacagtaaccaaattggactttgatcttgagcctgaacctcctccagccccaccacgagcttcttctcttggagaaatagatgaatcttctgaattaagagttttggatataccaggacaggcaagccattttaaaccttgcataattcctcttcactgaatgaattagcaataaaagcatcatagtgaataaggcgtgtctttccatttaaaattgccactgaactgtgaatttatggttttttgtttgttttttgtttttgtttttgttttttgagacagagtttcactcttgttacccaggctggagtgcaatggcatgatctcggctcactgcaacctccgcctcccggattcaagcgattctcctgcaagccattctcctatctcagcctcctgaataactggggttacaggcacatgccaccatgcctggctaatttttgtattttcagtagagatgggatttcattatattggtcaggctggtcttaaactcctgacctcgggtgatcagcccgcctcggccttccaaagtgctgggattacaggcatgagccactgcacccagccgaatttatgtttcttatggtctagtctcagctaaattagactgagttggtaggagacaaccaacttcttaatgttggcatgaaattgtcattagcctctggatgctcatggtccagaagagatagaataggctgcttaaactagaggtaatataggagtgtggttgatactacatgacatactgcctgaaatactattcttcttctaacttgattaacatacataataatgtgttagtttttcattgttttggttttgttttgttttgagacggagttttgctcttgttgcccaggctggagtgcaatggcatgatcttggctcactgcaacctccgcctcctgggttcaagtgattccactgcctcagcctccctagtagctgggattacaggcatgcaccaccacgcccactagttttgtatttttagtagagatagggtttctccatgttggtcaggctgctcttgaactcctgatctcaggtgagccgcccgcctcggcctaccaaagtgctgggattacaggcatgagccaccgtgctcagcccagtttttcatattttttagataagtttaatataaaagcgatggctccagctactcgggaggctgaggtaggaggattgcttgtggctgggaattcaagacctctctaggcaacatagtgagacccacctctaaaaaaagaaaaaaaaatttttttaaagaatgagtatctgaattttacttttcactccaacatttatattgacttttgaaatgtttttccttaattttatcattatcaaataagttgttttctgggtatttctatggattcacgtgtatttaatattttacaggattcagagactgtttttgatattcagaatgacagaaatagtatacttccaaaatctcaatctgaatacaagcctgatactcctcagtcaggcctagaatatagtggtattcaagaacttgaggacagaaggtaaagaatatataccaaattttgcgactacatgtttggtaccatactttattgtcttattattaattgaaatttctcttttcagatctcagcaaaggtttcagtttaatctacaagatttcaggtgttgtgctgtcttgggaagaggacattttggaaaggtaatctttttggaattttttggaatatctacaacattaataactcaagtggaaaataattattttaattttatttcaggtgcttttagctgaatataaaaacacaaatgagatgtttgctataaaagccttaaagaaaggagatattgtggctcgagatgaagtagacaggttagtttttaaaaatgaaattgtttatttttctgaatttgtaagttaagagaaatgatatatgtattacaacagcaaaactttatgattttacagtaatatgtgaagaaattaaatataatgtatctatatttgacataaggtagacattagtttttcttttttgcccctttttacccttcttgtgacaattaactggttaatggataccaaaaaaagatagtgaaatgtttgaactaattttgttaagttttttatatatggaaatattaaagtgtttatatggaatagaaactgttattcatctgtggttttgtggggctatatttcattctgtcttaatggaaatgacaaagtcatttacaaataatctacagttaatggaatggtttaaagtattttacaaagcagaatatgttatcttatttttttccttttattttttttaaaaacatgttttttgaccctaacgtctgggtctaataaagtaagttgtggtatcttatacaattgtttttttattttttgtttatttatttatttattttttgagacagagtctcactgtcttccaggctggagtgcagtggtgccatctcggctcactgcaacctccacctcctgggttcaagcaattctcctgcctcagtctcctgagtagctgggactacagacgcatgccaccacgtccagcttttttttgtatttttagtagaaatggggtttcaccatgttagccaggatggtctcgatctcctgacctcatgatccgccagccttggcctcccaaagtgctgggattacaggtgtgagccaccgtgcccggccccacaattattaaaatgcaaggatttggtgggggttaagattgtaattcacttagagaatatactttaaaaaatgactatcttaatacagaataattaaatatggacattattgtataaaaatggcatatttatcacagaaagaggctttcaatggacatttttcttacaccactgtaggaggcatatgttaatattaatggtagacagctctgtacaatgaagagagccctggactatgactgagaaggctgacttttctcgtcctcattgctcctccttagtaaggattgaccctagggcatttcactgaacatctttaagccccagttaactcatatatttaaaaatatatttgttttggtaatacttgccttaatgagttgtcttgctatgtagatatgccaaattgcaacttttaatgtttttttccaccatatgggtagttcttagaataaggacaggcctcaaaaggttgagatttatttttttatgttatataaacttttccttttggattttcctatttatttttcacctctgtttctttttcactgtttctcatacacctcaatcacatcaaaataaatgctttcttgatatctaatactaaagagcttgctggatatttataaaatattctgagtaccatattacatgtttagaattatttttatgttatacaagcagataattaaagcaagtctttgatcccaccaaagcaagtctttgattctaagtctgtttataattggaataatagaagggtcaaatgttttcctttcctgaaggaatatttgcttttctccagattcttaaatggtaaattcatttattttctaaaataataggaaactgtttactacttctattaatcttgatttacgtgggcttctgctaccttgttacgtctttgtgctgaatctttgtaggaaaatgctttctaatgaaatctatagaaagtttggatcacaggatgatgctgtagccagaatctaggccattacctctactgaaaattaatccagtcttgtgtagagacagggtctcactgtgtcacccacactggagtgcagtagcatgatcctagttcactgcagccttgaattcctgggctcaagccatcctcctgcctcagcttcccattgggaccacaggtgcatacaactgatccatctacatttctttcccccatagtgtcagggtcttggtatgttgtccaggctggtctcaaactcctggcttcaagcgatcctccttggcctcccgaagtgttgtgattataggtgtaagccaccacacccagtcttaacttaaatctccacttttcagtaacatgaaaatttaaaaatctcaagtagaactggtataaaaagagagaaaagaaaaatccaagagtgagaaataaaacacacttttagagaaatttgaggaatgaaggtaagaaaaaggagtacttttaaatttctagcatacctgaaagaaggcaagaaaaaaatttataagtttttttttaagactagctttttttttttgagacggagttttgctcttgttgaccaaactggagtgcaatggcatgaatttggctcactgcaacctctccctttcaggttcaagtgattcttttgcctcagcctccctagtagctgggattacaggcttgcaccaccatgccctgctaattttttgtatttttagtagaaatggggtttcaccatgttagccaggctggtctcaaactcctgagctcaggtgatctgcccgcctcagcctcccaaggtgctggggttacaggcatgagccaccacacccggccaagactagcatatttttaaaagtaatgtatttcattacttgcaagtataaatagtaaataactcaagctaaacttattataactgagcagaattttaaatatttactttccacttcctagctcatctttttaagccatagagtttggtgttattgtttattttttaatagctgttcctagtatactttatctatatattttttgagacagagtctcactctattgtccaggctggagtgcagtggagtgatctcggctcactacaacctccgcctcccgggttcaagcgattctccttccttagcctcccaagtagccaggattacaggtgtgcaccaccatgcccagttcatttttgtatttttagtacagacagggtttcaccatgttgaccaggctggtctcaaactcctgacctcaggtgatccacccgcctcagcctcccaaagtgctgggattacaggcatgagccactgtgcctggcctactttatgattcttaatgacagttctcatagtctaaattttctttctatagtctgtattatattattttactttgaaattaccttttttaataaatcatagaaaatttcaaatcaacctctttttaagtgaacacaaattatggattctaaaataaagtgttagataatttatgaacaaagatcatattctgtgtacctaccattagtaaaacactctaagtcccatttgcccttcagttgctgagtaaggatattatgtttatgttactgcaatgcctcctcactcagcttccttttcttaccaatttatatttcaacacaacagaatagggttggaagtatatttttgtgtttgtagaagaaagcacagctaaccagcttatgtaggattcaattctaagaccttggttttattaatgatgttttcccctgactaaaataactatttatataagttttcaggtttctaacttatctgaaaatgtaatgaactttgaaggaagtacacgaaacatgttaggatagaactagtaacttagagaaacgagacattaatacattatgtaataaaggtggctagatagagttgaggttaaaataagcaatacaaacaatagcagttcttaggaggaaatcagtgtactggtgtactactacaccatagtacatatagtgtactactccccaggtgtgcaactcttctagtcttccctattttattaaacagcaataccagttgttcaagccagaacacagtcattcttggtgctcttttccccttacctacaacactcaaactattagcaagtctggtcaacttcacctctaggatatatcccaaaccatacaaagcataaaaccaatagtaaatctctattgtatttactcttaaattttcattccacatctataatctgatgaaatatcaactgacatttgtgttgcactttcactttgacccctttatttgattcctgtcatcatgatcagaagtatttagagcaagatttaggtagagtcttataaaagaggttggatttttgctgggttttggtagacagaagttatttgggaataaggagagaagagtgatgacaatttagagggaaatgttctggacaggatgaataaggcttaaagttttaaataaagttggattgttgcatggacttttagggacaatacacagtttagataatgtgggacaagttgaagattcgtatgtaatagcttttttgtgtgctataaaatgcataaaattaaaattattttgacaatttggatctataaaagagccttgctcctttatctcgctgtcctaagacatctgtgcagatacctcatcattattgtaattcagataattcctgtgaatggcattgaaatcatttcaaggggtagtccagtcaatgggtctcaaatgttttataccacttatatgttccacccagttctaacctaacacctgttcagttgagaacagttgtttcattcataaattcacccataatgaattagtgagtcacccataaataaaaactatggacaggggctggtatggtggttcatacctgtaatctcagtactttgggaggccaaggcaggaggattgcttgagaccagaagttcaagacaagcctgggcaacatagtgagaccctgttcctatcaaaaaaataaaagccaggcatggtagtatgttcctgtagtaccagctactcaggaagctgaggcaggaggttcacttgagcctaggagttcaaggttacagggagccatgatgatatcactgcactccagctcctgaaagacagagcaagatcctgtctcaaaaaaacacacaactatagacaatgaagagaacatatttgtcatctacttaagcccaaaacatctttgttttgtcttatttcatctgattattttatctacatttagccaaaattcagattggcttaataaagcagatgttttagaatacatcttactgatcttgtctaaagcaatttttagtacattattttctagtaaatttaaatgatgacaaaaataaaaactgttaactttttaatcttctatgagtttatttataatagtgccttaatctgtagtaacatttagaaagtttgtcaggtatcctctttattttctagtcttttaaattaaaattttatgcagcatatctgtactgttcaacttcatatcaattttatatgataaaaaattgaatactatagcttgtgaattatagatactgtctttgaaattaccttcaccacaaacttttaaatttttcaaagtacgctttaaattgctaaattctctgaccaattcctgaagaattttcatatttcacccttaattaagccttttaaaaaatcaactgtaaccactaaccatgtatgtgctatagactatcaatgtgaatgctataatcttttaaagtttctattaatatatttcaactgaagttatttattttaggtaggtcagttttcatagcacatatagcaaaactaagacacatgttaggatttttaagttatagttaaaattttgcttatttttaagtttagtaatttataaagaatgttatttccaactagaattatttttaatctgcttattttaaaatattttcttttacagcctgatgtgtgaaaaaagaatttttgaaactgtgaatagtgtaaggcatccctttttggtgaacctttttgcatgtttccaaaccaaagagcatgtttgctttgtaatggaatatgctgccggtggggacctaatgatgcacattcatactgatgtcttttctgaaccaagagctgtgtgagtatgctttagacatttgtctgagtttttccatgactgatttcattctgggaaggaaaagagattctttgaattttagattttttttcctaacagaaaatagatctctgcaagaaatactagaactccttacttacttttttgccatatactttttgtatgtattctgttgtctgtgttgaaaatgtcatggattgcccaaaaccacaattgatactttagataagcaatttagattcattttagtaaaatttctttttttgctattagattttctcactagagaatgccatccagaattacagctttaaagacagattatactcaaaatgcactgttaagtttttgaaaagaaagtacagaagagtctgtatcatatatttatataaaatatttgtatttgcctttctaaagcataatttaaaagaatatcaactatttgcgtccttgtgcgtaaaatatctctgaacaaatgtaaaagaaactggtatgtgtgttgcctccagacaaagagataaaaagcagacttttcattgtaaactctttttgtagtttttgaattcaaggtttggcttattcaaataaataagaataatagtaaacacttgaaattatatatgcatgtgtgtatattttccctgttagtatcttaattttgtagctgttaaatggtggagctaggatttgaacctaggaaagtgatattaatacctacaccctgcatgctggtgtttaccaaatttgtgtttccagccccgtcctcttacctaaacttccaactctaataatattcagtggtcagctagttttccatttgtgtggctaaatatcttatttaacaacttaaactgaactgattttttccatttttctacctacctcatctactactccccaggcctgctactcttagtcttccctattttattaaacagcaataccaggttcaagccagaacacaaaaagtcattcttgatgctctttttcctttaacttcaacactcaaactattagcaagtccagtcaactccacctgtagaatatatcccaagtcataggaagcataaacccagtagtaaatctctattgtatttactctttagttttcattccacatctataatctgatgaaatagcaactgacatttgtgttgtactttctctttgattcctccatttgattcttgtcataaccattagaggtatttagagcagagaattgtaatactgtcataaccatcaagtttcagatgagggacataggggttaattctaatgggtactgaagcattttaaaaggagggaaaagccagaaagtagtagaaggctacgaataattcattccctcaatatttaaggcagagcattacaattatgcctaaccttatgctgccatgggaatttgtttggttttattttttatgcttgtttttgtttttaaaataatacataaatgtagtttgccttaagaaactgttatttttgctgagaatataaattatatacaaataaaaccataaagtccagtgaaaatacaagaatacaatgctgcattacagaactccaaatctgaaagtacctccctttatcattcagttctcagatcaaaggtcatttctttaaaggtaattttctgagttccctagctaaaatatcacatcactaaccaattcagttcactctattttctgtattatctttttcatatcattttatttctacatgaaatcatctgatttatttttaaaatttttattgtctatcttatttcacttaaaagagaggagcaagaaccatatctgtcctgtttattagtgaaacacctaaaagaatacctggaacatattaggcaatcagtgaatttttattgattgaaaccatagaatcaaaatagcttgatttctagctttgttgtttcatagtctaactttagacaaattatgttttctgagcttcattatctgctctgtaaaatatcttaaggcttgattgaagattaaataagctaataaatgaaaataactgacacaataccggacaaacaggagcattcaataaaatatgtattttagatggtatacgcaattaatcaaggcagtctgtttacaaagaaagaaatcagcggggagcggtggctccatgcctataatcccagcactttgggaggcagaggcaggcagatcacttaagctcaggagttctagaccagcctggccaacatggtgaaaccctgtctatactaaaaatacaaaaattagctgggcatggtggcaggcgcctgtaatcccagctatttgggaagctgaggcaggagaaccacttgaaccccagaggcagaggttgcagtgagccaagatcacgtcactgcactccaccctgggcgacagagtgagacccccccaaattaaaaaaaagagagaaatcaaggtatttttataattgttacagtattgttttgccacaaaaataagtttgctaagaaaattatgtttaactatcttaagcaattttgtttgtttgtttgttttgagacagagtcttgctccgtctcccaggctggagtgcagtggcaccgtcttggctcactacaacctctgccacacaggttcaagagattatcctgcctcagcctcccaaatagctgggactacaggcgcgtgccaccatgcctggctaatttttgtatttttagtagagacggggtttcactctattggccaggctggtctcaaactcctgacctcaggtgatctgcctgcctcagcttcccagagtgctgggattacaggcatgagccaccacacctggccatcttaagcaattttaagctcacgtttattttaataaacttcagtagatccttaaaacttctggtaagttgtttaatttttaatgtataattaagtaagtatttctaagtagttgcattttatttttgttttttatttctgtgttgggaagtctaagccctgatgaaactgcctggtggaccctgaccaccacccctgcagcacaagccccgcgtttaaaaattatagacccgtgctcacttcagcagcacatacactaaaattggaaccttatagagaagattagcatgacccctgtgcgaggatgacacacaaattcgtgaagcattccatatttttctgaaattgaggcagtaattaatagcctaccaaccaaaaaaagcccaggaccagatggattcacagccaaattctaccacaggtacaaagaggagctggtaccattccttctgaaactattccaaacaatagaaaaagaggggctcctctctaactcactttatgaggccagcatcatcctgataccaaaacctggcagagacaccacaaaaaaagaaaatttcaggccaatatccctgatgaacatcgatgcaaaaatcttcagtaaaacactggcaaaccaaatccagcagcacatcaaaaagcttatccaccacgatcaagtcggcttcatccctgggatgcaaggctggttcaacacacacaaatcaataaacgtaatccatcacataaacagaaccaatgacaaaaactacatgattatctcaatagatgcaaaaaaggccttcgacaggcggaggtggcagtgagcggagatcacgccactgcactccagcctggcgacagagcaagactctgtctcaaaaaaaaaaaaaaaaaggccgggtgaggtggctcatgcctgtaatcccagcactttaggaggccgaggtggttggagcaccaggtcaggatatcgagaccagcctggccaacatggtgaaaccccatctctactaaaaacacaaaaaaattagctgggtgtggcggtgtaggcctgtagtctcggctgctcaggaggcaggaggcaggagaatcgcttgaaccctggaggcagaggttgcagtaagccgagatcgcgccacagcactccagtctgggcgacaaagcgagactccgtctcaaaaaaaaaaaaaagaaaagaaaaggccttcgataaaattcaacactgcttcatgctaaaaactcaataaactaggtgttgatgggacgtatctcaaaataataagagctatttatgacaaacccacagccaatattcaacatagtattggaagttctggccagggcaatcaggcaagagaaagaaagaaagtttattaaaataggaagaaaggaagtcaaattgtctctgtttggagatgacatgattatatatttagaaaaccccatcatctcagcgcaaaatctccttaagctgataagcaacttcagcaaagtctcaggatacaaatcaatgtgcaaaaatcacaagcataatacactgataatagagaactgaatcatgaattaactcccattcacagttgctacaaagagaataaaatacctaggaatacagcttacaagggatgtgaaggacctcttcaaggagaactacaaatcactgcccaaggaaataagagaggacacaaacaaatggaaaaacattccatgctcatggataggaagaatcaatatcttgaaaatggccatactgcccaaagtaatttatagattcaatgctatccccattaagctaccattgactttcttcacagaattagaaaaaactgctttaggctgggtgtggtggctcacgcctgtaatcccagcactttgggaggttgaggcgggtgggtcatttgaggtcaggagtttgagactagcctggccaacatggtgaaaccccgtctctactaaaaatacaaaaattagataggcatggtggtacacgcctgtaatcccagctactcgggagactgagtcaggagaattgcttgaacctgggaggtggaggttgcagtaagcaaagactgtgccactgcactccagcctgggcaacagagtgagactccttctcaaaaaaaaaaaaaaaagaaaaagaagaaactactttaaatttcacatggaaccaaaagagcccgtatagccaagacaacgctaagcaaaaagagcaaatttggaggcatcacgctacctgatttcaaactatactacaagactgcagcaaccaaaacaccatggtactggtaccaaaacatgtatatagaccaatggaacagaacagaggcctcagaaataatgccacacatctacaaccatctcatcttttgagaaacctgacaaaaacaagtaatggggaaagaattccctatttaataaatggtgttgggaaaactggctagccatatgcggggaactgaaactgaaccccttccttacaccttatataaaagttaactcaagatggattaaagacttgaacataagactcaaaaccataaaaaccctagaagaaaacctaggcagtaccattcaggacacaggcatgggcaaagacttcatgactaaaacaccaaaagcagtggcaaccaaagccaaaattaacaaatgggatctgattaaagagcttctgcacagcaaaagaaactgtcgtcagagtgaacaggcaacctacagaatgggagaagatttttgcaatctgtccatctgacaaagggctaatatccagaatctacaaggaactgaaacaaatttacaagaaaaaaaacagccccatcaaaaagtaggtgaaggatatgaacagacacttctcaagacatttatccaaaaaacatatgaaaaaaagctcatcatcactggtcattagagaaatgcaaatcaaaactacaatgagataccatctcacgccagttagaatggcgatcattaaaaagtcaggaaacaacagatgctggagaggatatggagaaataggaatgtttttacactgttggtgggagtgtaaattagttcagccattgtggaagacagtgtggtgattcctcaaggatctagaactagaaatattatttgacccagccatcccattactgggtatatacccaaaggattataaattctgtaaagacacatgcacacgtatgtttattggagcactgttcacaatagcaaagacttggaaccaacccaaaggcccatcaatgatagactgcataaagaaaatgtggcacatatacaccatgaaatactatacagccataaaaaatgatgagttcatgtcctttgcaggacatggatgaagctggaaaccatcattcttagcaaacaaacacagaaacagaaaaccaaacactgaatgttctcataagtgggagttgaacaatgagaacacctggacacagggaggggaacatcacacaccgggggtcgggggctaggggagggatagcattaggagaaatacctaatgtagatgacgggttgatgggtgcagcaaatcaccatgacacgtgaatacctatgtaacaaacctgtacattctgcacatgtatcccagaacttaaaagtataatttaaaagtaaataaatcaaacaaatcttttcagaaacctatatatatatatatatatatatatatatatatatatatatatatatatatataaatagaaaaaaataaaaatgcgaggcaccatggctcatgcctgtaatcccagcactttgggaggccgaggcgggcagatcacctgaggtcggaagttcgagaccagcctgaccacatggagaaaccccgtctccactaaaaatacaaaattagctgggcgtggtggcacatgcctataatcccagctactcaggaggctgaggcaagaaaatcacttgaactggggaggtgggggttgcggtgagctgagattgtgcaattgcactccagcttgggcaacaagagcaaaactccatctcaaaaaaaaaataaataaaataaataaataaaaattattgacccatttttaataaaaataggtaaatataaaacatagctatattatctacatgtgaatgtaaatatattctgaaagtttggaataacattaaagtgacaagaattgttatctgtatgaacggcagtggaatgaggtgagatggagatagatggattaaatagtgtactttggagaagcatattacgttttatagagaaaatattcatgttattacttttataattaaaaactaattatcctaagggtctgttcataggctattctacactgaagacatttgcatttttaaatctattcatttatttcctccttgttcaataagcctatcatgtatattaggcattatgctaatgcatttaggataaaaattgaaaaagtcaaacatggtcctgcgcctcaagaattattctctctcgacccaggttttttgagatccaaacctgcatacccagcttttacatatcatcacctgccccacagacaaagtcaacctgtcaaatgccaaacttagttttgtcacacaaccttggctacctctatgtttctttatctgttcattctaagatggaaaccttgaaagttacctttagttcttcccacttccttatcctgtaatgggataccaccttctgtcatgctaatttttaagtttttgtgaatctgtctctctgttgccactacagtggatgttctcatgatcttttcatctataatatgataaaagccttatctgttcttttttcctctggatctctacctacttctccatccttcgcattgctaccagaaaactttaacataaatgccatcattctcctctgattaaaatggtttgattctctgtcactaagagaaaaaatttcagtatccataatatgacattcaaggtccttcgcccaggatatcttttcagcctaatctcctacttcgtccccagatacacccatcctttacttcagccacaccaaacttacttgttatcaaacatgttacgccttttgcacctctatttcttttttctctcaggtaagtactttattattcccctacaaaacttctgcctgtcacactgtcctttgtccttatgttatattgtaattcctcctgcagaaccagatcaaatgtcccctctgaggttctcagtgactccactaggcaaagttaatggcttccattgtcaagactgtacttttctcatttttaaattttacccctaatatctagcacaatgtgatacatagtagggactaaataaatatttgtgaaataaattaatgataggtctgctttgaagtataaacatataagctgggattcaagagcaataaaatttattaaactcctgttgatttaattcttcaaacagattttatgctgcttgtgtagttcttgggttgcagtatttacatgaacacaaaattgtttataggtaagttaatttttaattttttctaatggcttgctttggtatgatttagaattaaagatagtattttgtttttcttaaacattttatgtttaaccagtttcttagttttctccttcacctgtaagtcaaaccccaatgttgaaagacgtggttagcactatgattatatgatgaactttttgtttcctaatccatagcacattttctaattaaaatagtcaaattatgagttggtctatgatagtgcatttctcaacaatattcatcctagtgaatattttgcattcaaacgactcattgcagaaaacctctatagaccaatactactaaaaacgtgtccatgatgagacaagtagcttgtgttagagtgtaaaacatcacactgcttccctcattaagaagccttattgtcaactgaactaaatagtgtattggtgatgtagctgatctctgtaattcgtggcccagcagctagtttgtgaaccacaccttgactaacactcactgcccaggaccaagcagattatgagaaggctagtcagaattagaagactataaacattggattatttaagctttttttttttttttttgagacggagtttcgctcttgtcacccaagctggagtgcaatgcacaatctcggctcatggcaacctctgcctcctgggttcaagcgattctcctgcctcagcctcctgagtacatggaattacaggtgcccgccaccatgcccagctaatttttgtatttttagtatagatggagtttcaccatgttggccaggctggtcttaaaactcctgacctcaggtgactacccgcctcggcctcccaaagtgctgggattacagttgtgagccaccgtgcccagccggtaaggttctaatgatgttttcatgataagattgttttacctaatggataaaatgtttcctgggcacagtggctcatgcctgtaaccccagcatttggggaggccaaggtgggaggattgcttcagtctaggagtttgagacccgcctgggcaacatagtgatattctgtctctacaaaaaaataacaaaaatcagccaggagtgatgacatctgcctgtatcccagctactcaggaggctgaggtgggggaattccttgagcctgggaggtcaaggctgcagtgagccgtgattatgccactgcactccacttagacaacagagtgagtaccttgtctcacaaaaataaaaaataaattgaaaaaaatggataaaatattgtcagtttgcctaatttgtaaacaattagtatggatggatagctttctcttattctttcagaagatgaaacctgccctctgatgccttattaatactgttaactttacaattctttcttatggatggtatataagcaaactttaaaactggattaagttggccaggtgcagtggctcatacctgtaatcccagcacttttggaggccgaggcaggtggatcacctgaggtcaggagttcaagaccagcctggccaacatggtgaaaacccatctctactgcaaataaaaaaaaattagccaggcttggtggtgggcacctgtagtcccagctacttgggaggctgaggcacgagaattgcttgaacctggaaagtggatgttgcagtgagccaagatcacaccagtgctctccagcctgggtgacagagtgagactctgtcttaaaaaaaaaaaaaaaaaaaaaaaaaggctgggtgtggtggcttacgcctgtaattccagcactttggaaggctgaggccagcggatcacgaggtcagaagttcaagaccagcctggccaaaatagtgaaaccgcctctctaataaaaatacaaaagttagccgggtgtagtggcacgcgactgtagtcccagctactcgggaggctgaggcaggagaatcgcttgtacccgggaggcagaggttgcagtgagctgagaccacgccattgcactccagcctgggtgacaaagtgagactctgtctcaaaaaaaaaaaaaaaaaggattaaattagattatcacaaataacaaattaaatacatttttccttttttatgtaacaggagaagaatttctcatgagctaccttatatagagtaataaacttaccaaaaggaagaaaactgaatgtttgtgttatagtatttaaatctcaaatcataacttggaaatcccatttttaataaagagaaaacacagttccaattgcaattatttttttaactgtataacctactgatttctttgatttttttttttcatgctgtatctttttatcctgaacagagatttgaaattggataacttattgctagatacagagggctttgtgaaaattgctgattttggtctttgcaaagaaggtaatcgaatgtttttaagtttcttttctgattcagaattactgtttctttgtgcatcagtagttttcaagtttgtctatggaaaacaaactgtacttttaactttattcttcattaagacattgtagatacaatgaaaacattgcttatataacctaattatcacattaagaatttgttctctgaatacaaataaggttagatgtatagaaatcatagtaagcttctctgtgtgattaataattttgtcactactttaaggaagtattgattaagcaccaaaatcgtttattctggtgagactgtacacagtgaatttcataggcctgataatttccttccagcttcttaaagttgaaacatttaaaaatagaaaataaatagagataggtatctcatgtatgttttttgtatattcaaaagtaaataagtaaattggggaaatttgaatcagaggtaacataagaaaggataaagatcatgggcttaggcactaaacagttctaggtttgaatcgtggctttgccactatttgctgtttgtctttggaaaacttagttttaacctctttgagtcttatttccccaattataaaaaaatggacatagttctttctgtttactagttactaacattctctatctccctctgcactggtggcttctgtttgctatttagctttgtttccatagtgcataacacagtgcatggtacatcttaagtattcagtaagtgtttgattaataagtagttggatgaataaatgaatgaactctgtagatatatgcccatcacatacccactgacctaattgctgaatcaagtaagttttttcttgactgggcttctttttattggacactgttcctctaaatgcttttgtttctcagcatctctccttagccggctgctcttcactgcaattttttgactagcagctatatcctaatgactcccaaatctattatttcctttcctatggattccaaagatatatattcaactgtctactagacagctctgcctgaatagtgaagagacacctcaaacactacccaaacaaaaatcatttattttccgccggtagtctgggtgttggtatcacaatcccctcagccttcaatctgaaagtaaggaattatcttgcgttctatcctgttctctacttcccgtatgtagttattcacaaaattctactgccacttaacctcctgaatatttctgaaatctatcatttccagtcagctcctttcacccattatcttgttttgacaagacaggtataataatctcctaattgttcctatttctagtctttttctatcccaaatcaacctgccatgtaattgctgaattgcttaaggagtccatataaatacagatcggaccatggcacatacctgctgaaaactcttcagtggctaggataaggtgacatacagtgccgttactgatctgcctgccttcctctctggccacatctcttgctgctctctgtttagtactttttgctgcagcaacaatgaactgcttatagtctgtgtccctctagcactgtcacccatcccaactctatttgctgactaacatctgctcatccttgtcattcaactcaagtgtaacctctacaggcaagttaccagagattcccttttactaccccaactcccaagtctgctttaggagcccttcttcactattctaccttatcttgctcttcccttgttgttataaaattatcaataaatatccatttccctccagtctcctgtaagccccttaaagactgtgtcttactctcgtttttatgttcccgctacttgacacaggtgcctagaacataaaaggtgcagaaaatatgtgtgttgaataaccagacttattaatgcattatcataaaaacatgtttagtagattatatagctaacaacttttgagtgcttaccgtgtgccaagaattttgcttcatatgcatatctcctgtaatttataacaatcgtatgaaggtagatagtttttttggaggaaatattttattttttattttatttttatttatataaatttatagggtagaagtgcaattttgttacatgcataaattgcatagtggtgaaatcaaggcttttaggatattcgtcacccaaataacatacattgtacctattaagtaatttctcatcatccaccccccttccacctcctcacccttctgagtcttccttgtcttatcattccacactggtagatggtattattaactctcatatacagatgaagaaacctagaatttgatgttagacaactttcccaacctcccacagttaacaaatgacagaactggaacttaaaccaggtatttattaatctagagcctgatattaaccacttccatggagttttaccagtctacaagaaacataagttatatttcttcattaattaactttttcctagttttctccaagttactaaaaggctggtgcagaacttacatagatattaatactatatcactgtttttttaaataatattttattgaagaaaataaaaatcattatgatagtgttaaagaaattttgccaaaaaaaaatttctccactccagtgtgctaatgtatctaattgtgcccttcaggtcttggttcatagacacacattcatttctattttatagtcactatatatgcatacctaattattcttaatttaggattgagagcttttctttaaaattcttaaaaagatgacacttatgacaagtttttaacactttggaatacatagagataatatcttcaatatgtagactatatatttgattaacatattaataaattatgaggaacatatatttaaaaactagttagccaaaatgttaatacaggctgagtatcccttatccaaaatgcttagaatgagaaatgttttgaatttcagatttatttggattttggaatatttgcatatataaataatgacatatcttgaggccaagacccaagtctaaacacaaaatttatatatgtttcatatataccttatacatagcctgaaggtaaatttatataatatttttaataattttgtgcatgaaactaatcttaagtacttgcggaattctctatggcatcatgttggtgcccaaaaagtttcagattttgaagcattttagattttggatttttggattagggatgttcaacctgtactctcccttccctccccttcccttcccttcccttcccttccctcccctcttctcccctcccctcccgtcccctcctctctctctctctatatataatatatattgagatatatatatgttttttgtttgtttgttttttgagacagagttttgctcttgtcacccaggctggagtgcaatgacacaatctcagctcactgcagcctccgtctcccaagttcaagcagttctcctgcctcaacctcccgagtagctgagattacaggcgggagccaccatgcccggctaatttttgtttttgttttttttgtagagacgggtttcatcatgttggccaggctggtcttgaactcctgacctcaggtgatccacccgcctcggcctcccaaagtgccgtgattacaagcatgagccactgcacacggccctatctctctgtattatatgacacatttggtcagcttctgattatccaagggtttgctttttggtatttttgaaacttattttttttagaatgttgattttataatgaagtaaataaacttatttaagattgaattggaaagataatggaacttcacaatcagttcattttgttataatttcttagctcccttgtaatgacaagaagaaaaagtaactgaaaagaaacatggatatcttatttctatttacccattaattagacagtatagttgctattgcagtttttgctataccagtccttactgttttcttgaaatgtcttagatatgtctgaatttgttcaccatgcacaaatgtgcaactttaattttgcctcccaaagatagctttgattttttttttatgctagatttgttttctttgctaacaaatgtttacattttatcttttccaggaatgggatatggagatagaacaagcacattttgtggcactcctgaatttcttgccccagaagtattaacagaaacttcttatacaagggctgtagattggtggggccttggcgtgcttatatatgaaatgcttgttggtgaggtaagcagtgtgaaataggtaagagaacagaggaaggatgattgaaataataaagcatgtcatttataaaaccacctaatactgtcttcagtatgagtggaatttaagttttataaatatttatagtatactagtagtcagctatctttctgtaataccttcaataaagatttttatgtggtttgtggaatgcactatcagtgctttgaaaatagttccttgtatttcagtattgtacttttattatgttttctgattttaagacatagtcattttatagggaatggaataacagaaagactaataaaaggaatgtactctgtacctgtaaagaaaagcccactatagattggtcagaaataaatgttaccttcgacttcctccagacttccgtctgagcaacacactctgcatccttgcttcaccgggaaactactgaagttcctggggaagcaaagtagaatttcgtaagaacaaaatggatggagagaggagaaaacctatggtagctgtgaaggccctgatgccatgtatgtcaaattgatatcatccgatggccatgaatttattgtaaaaacagaacgtacattaacatcagcacgataaaagccatgttgagtggcccaggtcaatttgctgagaatgaaaccaatgaggtcaatttgagagagataccttcacatgtgctatcaaaagtattcgctacaccaacagctccaccgagattcctgaattcccagttgcacctgaagttgctatagaactgctgatggctgtgaacttcctagattgttaaataaaatataattttaaaaaaatgaaagaagtgttaccttaaaaaatggtagagttgaaaaaattcgcattttttcctactgttttctgtagattaacttaaatttctgaggataattgagttgtacatagaaattattactattaggaaacagtgagttatgttaaggcaataataggagactaataatttattatgttataaattgttagaaatgttgaattgggatgaaattgggaaagagtaaatcttttaataagtaattgaagattacttgaagggacttgaactggagatgcaagaaaaattattttaagggattggttcattattctgcagtttccccatgccagcaacctcccttgtacacttgtaagtttgaagaagttagtgctgaatgaacaaattatcaaattgaatatcagaaatttctaaagttttgttctatgcttgtcatttattggcacttaccccaaacaaatggttttagtttcgccggatggataaccccttttggtatgtcaatttgaagtggattccttggaaaaggaggagaagtatggctaattaaaatttatcatgtgctaagcactgtactgtatgccttaaatattagttcatttaattttgcaacagcctttaataagctcagtactgatcttctgcccattttcggaggtgtaaatagagacacaaagagattaatgacttgcttaaagtcacacagctctcatatggtggagctggaattttaaccttgtcactctggctccagagcatatctaaagcattatgctttgctgctccaggacaggatcttcaattcatccagccttgtttctgttcttaagactagtggtccagatctgaatttttcacctctatttagaaaagctgttgtgcagtgtttaggttggaaagatttattttagctccagtccacagtggcttttactttctgagagtgccagaagttctcataaaatagttaatctgctgtaagctctggcatacttgaactcctccccacccccttcctttattttaacagtaacattttggagggtttttttggttttgtttcatgtagtattcaagtaagtatgagatttatgagattcaattatgtgcttgcttaaaatttactctccatattagagatgacatgtgcaaaatatgagtttattacaaaatactgtagaattaatccagttgaatctactccctcctattataaagccactggagggtttggcagaaaacaaggaagctcctgtttcatgttttttaaaagagctaattgattgagctcttaattacctagaagataaaagacagtggatctggctatttcttcacagttgtttcttgcaatttctctttagtatctccacaagagggtagctgggaaaagaactaaacttaaaactcatcagtctacttcataattttatagcattagtgaaatgctagtgataactcctttttaactatgatgaaagtaaggtgtggctaaagtttatgtcagatttctctattattacaaataattgtaaactcaccggatatattatacatgttcagatttgtatacttctactagttttgattactggaaagactccaggaataaacaaacatcgcaagtcccctttttcctgtctcagatgggagtgaagataccagagagattgaacagaatgctggacatggttttagatactgtcagtgttgacatctgaacagactattggtttcctttaaatgtgctgaaaacacatttgttagctttcagttgttagccctgtttgcttacaatctatttgcagaaaaaagatactacatattttaacaaatgtatagatatttctttgctgttcagacttgtagaatgagttttcaagtaaaaattgttcaagcagaagaccaaagtgctgtctttgtattatccattgaaattcccattgagaatcctagtaaaataaaattttcttctgacttactgtttcagtccccagaagaaattagattgtccatgtagtacatttgatttatgtattttgagtgtactacattgtcccacgtagtatattttatttatgtattttgagtgagtgaatgaacaaactaaggttttggtaactgtaagctttgaaattttcttagctgtgagcaagattagaagctcagccttaagaagttggattctgaatttattttcacagattcttaaagattgctcactttccctggatattgctttctgcttattattctttaaaacttaattggaagcaagcagccaaatcaaatctaacgaggctaagtaagcctatatttcttcaatagccagtgagaaaataaggttcaagatactaattcatttcagtgattttaaggaattaaatgatatttagacatttgtttcctgatttaaaaaatgactgagtgatttttaagccatctgaaattctgaggcaggcagtcacatttgatagacacgtttttagcatagttgaaagtttctctctttgtgaatcaaattgtcatactgaatataatgtaactacttttttatgtctcagggtcattatgaaaaatgattttaatactgagcttatggaaatgccctaaaactttttgtgtttagaacattaaaaatgcctggcaatgtgtgctttttgggttcctttcagtctaattttgttggcagctgcttcttaatacagtcattatgcttgctaatccatgattgtgttttaccaccattaatttactgttgactttaaaatccaaagcacatttatatctgatgtatttccgcagattgccttcctttattataacatttattaccatattaaccttatccattttcttctgtttttccacaagattgaggttcttcaggatttatctattatctaaatattccctactgtctgttagacactaaaaattgactgtctggccaaataggtgattgagtgaatgaaataaaatggaatggagtggaatgaaattaaatgaaaagtcatatcatatatgagatagacaagttttttataagggtctataaaatttaaagatttcagaaagagtatatggtgtattccctctgtaatagatacatatctgttgtcacttcttatagttcttttgttgttgttttggtaggcatgggtttattgttgttgttgttgttgttgttgttttgtctgttttttctttttcactgcctggatcttggttgtactttgaatgggtgataagattttactgccttaaaacttgctttaacttactcaaaggtatttcttctagtctccctttcctggtgatgatgaagaggaagtttttgacagtattgtaaatgatgaagtaaggtatccaaggttcttatctacagaagccatttctataatgagaagggtaagaattaaaataaggataagaattttttaaagactactttaattttttatactaaagaaaatttcccagtagaactttaaaagctgtttttcagttcataaatgttgcatggcttagacaaaaaaagacaaaatatatctaagttttttaaagtaataatccttatcagtgaattttattctattggttttattttaacttttttattttacattatgctagctgttaagaagaaatcctgaacggcgccttggggctagcgagaaagatgcagaggatgtaaaaaagcacccatttttccgggtaagtgtgactatttaaaattttttatgaaactagagcgattagatttaacaaactaaactagtcattttttattttatgatccagctaattgattggagcgctctgatggacaaaaaagtaaagccaccatttatacctaccataagaggacgagaagatgttagtaattttgatgatgaatttacctcagaagcacctattctgactccacctcgagaaccaaggatactttcggaagaggagcaggaaatgttcagagattttgactacattgctgattggtgttaagttgctagacactgcgaaaccaagctgactcacaagaagacctcttaaaaatagcaacccttcatttgctctctgtgccaccaatagcttctgagttttttgttgttgttgtttttattgaaacacgtgaagatttgtttaaaagtaccattctaatacttcttcaaaagtggctcctcattgtacttcagcgtaaatatgagcactggaaacagtttcatggagtttaagttgagtgaacatcggccatgaaaatccatcacgaatacttttggatcaatagtctatttttaaaaagaaagaaaaaaaccacttttttatagtccctagctttgccatatgcccgccttaagtggaaggaaagttaatcacttaactatgttttataaaaagaaaaaagggcttggaatgctattactgttcacacaaagtatgattctgtttgaataaggcaaatgctcctttttttaaaaaaaaagacattactgtaatatcaaaaaccgtggcagtttgtatacaactcggggcttgattttttttaaaaaaacagaatgaattgatgtcttattttataaatgttctatatttattaggagaaaactttatattgccttttttatcaatcatgtaacaggcttatagctttccaacagagctgcttgccaaacaattttttttgtttattaaacagtgctgaaacaaacaggatcagcatttacttaagatgttaagaatgaggacttttaatcagccgaaccaagatattgttacctgtatgcattcccaaagtctagatgctcagtatgttcagtcatatctttcagaatcagtgaaccgattaccctttttttggtattcactctacatctgccaacctagttcaccttggttttgtgtctgctgtagaagggaaccataacttggttaaaccgtagggattatcattgtatacatgctgtgaacatgtatatgtgcaagttttaatgtattctatgttgtaggcttattatttaattttaccacttcatcacttttgtacagtggccaagcagacacctcaaactccagcatttacattaagtgcatttgtacattttaggccactggatccagattttatattggcagttattgagggcaaaagcaatatattgtaacagaatgtataaatatttttgataaaacagtctatattttattaaaaaatgaattataacactaaagctgtacctcaaaagtctcaaaaataatttgatgaaatattttatacaactcttcaaaggatccgtctgtggctttttatactcttttagggttgtctttttacaaaccatgactttccacttgcctgtagttttttgtttgttttggtttggtttgattttatatttttttctcctaatctatgactttattgttttttcttagtttagtaatagcatctttgatcctgtgcttagcatgttagggtcattatacctcaggaatagcaagctgttaagtaaccatactgaattaactatttaattacagtgagctcatctcttaaaaattgttcaggtgtaaatcttatgagaaacatgaaaaagcacactgatttatggagagttgagctaaaaacatttataaatatttgctgggatgttttagcatcttttcattgtactctgagaacaattaaaattgtccagagatcatttatattaccttccaaattgtttattacccaagatcctttgggagaaaatcttatagaatgggggaacaatatgtggtttaaagttattttaaaatgccagttaatttcctcggcaaaggacaatagaggaacttagcttaattgtctggctttaatttaaactgtgttaatacaacattaaaataaaacactaaatacttttgaggtacagtctgctcacttttttggttctcaaatagcaaagaaagtaatgtctaaaataggctcttagcattaaaaactgacagcatttcgtaactacacagtgtacagaatttttttttaattgaagtcaatcactaaaaaaattagaaggcagggtctatttacacaattaagctgaagaaagcactaattttttgtagtttaaaatatatatatattttagtcagatttaaaattttaagctttatagagtgtaaatatattttgctattactgtatgtgtatgtgactgctcaagcactttgtaaagaaattaggatattttagaatggtacactatgcattcaaatgaaatgtgcctttcactatgtcattctaagaaaacaagtgttttttgcagtcataaattatcacaaatgcacaaattaaagtctatatagattgaaatttgtaactttggttttaagtattctttccttttagaaacttcctaatgattaaaatatactttaacttttctgtgttcaaaatctcaaagactaattaactttaataaacattcttgcaagtactttttgtcctagtgaaggcttaaaaccatgaacattcagagcaaactgtccacttcattgggaataatgggaaaagtttgtattctgctcctgtaaggtcagtagcatcttttatttgaagcatatttatggactgcttactgtgtatagatactgagaataggaagtttttttttttaaagcaacaaaatgttgatgaatgaagaacagcctgttttaattaagatgcaagcaccagtattgtatgtacttttctcttgtttgaggttagcttattttaatttaggacctggcttctcaaaaaggcaaatgaataaaacagaatactagta

SEQ ID NO: 29 - DNA, 3829 bp, Homo sapiens
atctttccgtcccgggcagccagcgccagtcggagccagcgcgagccgccgccgccatcactgccgctgccaagtcctccacccgctgcccccgccatgtgagtcggccgcccgccaccctcaccgcgcttccctgcgccggccgccgcccttggcaaccggccgtcgggagtgcccggggtctctcctgcgttccccgcgccccggggccaggcccaagccggtgactgcgcgcgggcggccgaggagccccgcgtcccgggctggccggctcgggcgatggccgcgggaaggagcggacccagtgtcctcctgcccctccccgcccctgtcaccgcggccgcctgtcttttcgggtcgacccggatcgcatctgtgaggtcgccctcagttgacaggcggggaaactgaggccgggggggcctcgctcaaggtcacgcagctcatcggcggcagggctggaccgagaccagggcttacatcgggtggccttcctcccgaaaaggaggactggagggacgaggatggacaggtggatgggcggagccctggctgcggggccgggaggctgcaggccctgggtcttaatccgtccctgctcctcaggtctgctaccgctgccacggccccccctgctgccccggctggggagggtggtccccctgcaccccctccaaacctcaccagtaacaggagactgcagcagacccaggcccaggtggatgaggtgagtgtggggggagtcaaaagcagtaggagggaccctgggggttggcgtataggtgtaggggcccatgttggtttgggagtgatgacagttcacgcctgtgggtttgcggacaaagataccatgccccatccctgtctccctgtcagcacgcacttggaagggcgctgggggtgttaatcagctttgctagcctggggtgtgccagcctgggcaggtgtgctctggtgatggacagagcgcctgaggttccatagagggagggtgttgctatgacatctgagatgtcaccagcatgcccctgatgtgtgctccttgcatgtccccaggtgtgctaggcatgttctgtgtgtccttggcatgttaacctggcagtatcagggtgcatgttccatgtgtggcacggtgggcacatgtttgaggattgccctcactgaggtgggccttggcacacccccctgcctcgtgggcccttctcccaggtggtggacatcatgagggtgaacgtggacaaggtcctggagcgagaccagaagctgtcggagctggacgaccgtgcagatgcactccaggcgggggcctcccagtttgaaacaagcgcagccaagctcaagcgcaaatactggtggaaaaacctcaaggtaagggtggggacaggaaggaggacaggtgggtgaatggggtatcatagtttgtcttactgatcctcgcctctcacccccagatgatgatcatcttgggagtgatttgcgccatcatcctcatcatcatcataggtgagtagggtgagaatggccggggccctttccctggagaggtttccccagtggattctaggttttgaaggtcattaatctagtttttactcttcagccaaaaacacatatagctgctaatggcaattctgattcatctagagccaaaaactttgatgttatttagcctgcattttgcctagttcttggcagtcttgttaacatttggaaataggaaagctggtgtatccattgaggaccctttaggcctaagagcccagtctgagaaccctggaattgaggagtgggagaaaggaaaggaccaggggcttgagacatgaccaggaagccaaccaccccattatttgagagcttgcggtctcagaggctcagaggattagggtctgtggcttcaaggccataccatggagcggaagggacctcagaacctacctgtctagccccttgctttgtagatggaaaaactgagtccaagagagggtgtcagccagctggggagtggggaggattggagcagggccaggcctgacacactgctttcttgttctctctctttctctcccctctccctcttcctcatcttcttcccctctctccacagtttacttcagcacttaaatccccgaggagtctgccctgcctagagaagggcctctcccccaaccctcagccgttcctccacctctcagccatatctttcagcccccactcccctggatccgtgtgtgtgtgtgtccgtgtgtgtgtccccctgtaaatagccagctgttatttatacatatataatattatatatatttggtctgtttgtagttttattactagatgatttttccggttgtccttaacaccccttcctgaggttcccttcacccctctctcttgccttccttccctttccctttcttcctgactagccccaagtcccttcatttgcatctgctatgcaatagtccctctcctttccttcttcttccctcagatttagctgatccttcctcccaccctggccttcctttcctctttcctcctcactctccccgtcatgctccctctgccccgccctcaaaaaaaaaaaaaaaaaaaaaaaaacaacagcacctgtccaggcttccttaggtacatcttctttgtatccattgggaggctctgagactggccccacttggtcctaagaatcccaaggtctttgggagcgtccagcatgttaattagcgtatcattacatactgctatccctttccatttctttttgttccatcactcttctctcaacctgtgtttctttttttactgaggagttagtccccattagttcttgtatcacattttcatttgcacgacattactcgcaggtggtggggagcctgggcttttggggaaccaggctgctctggtccccagcattgcctcctcctagcccctctagtccagtttgcctcccttaccctcattttccaaacctcttgtaccctcctctccctcccccagctggtatgtaagtgtcttgaagttcagtatgttatgatggaccaataattctgccacttcgggtttctccctacattcctgctccccagttttcatgtggggtactcaactgacattcccatggggtttccctcccatctgcctgatccacctcctcctcccaccaggagagttgggggttggccacaattgatctcttgtgagaggggtggctaccagtgtgtgtgtgggggtcatcactgccttggggaggagtggggcagggcagagaatccccccaattcctgcctgaaatctctggcctcacccctgctgggggttggactgaaaaccctcctccccaatttggggggtgttgccccatcactgcccagctcctctgactgccccccctgaatttagggtgggggtactagtcactgccaatgtgtgtatgggacttgctggaaaacggggatgcttgcccctctccaggactattgagcccagagagagctgtcctctcattgggtgaactgattgaggaagggtctattgtctttttaaatggcacaattttaagggtttgagggtacagtcccttaacctgccacgggagggggcccccaaactttcttccccccacacttctggttttctgtgtggagggggagcagggatatctaagctgtggtgtgaaagggtaggagagatgctggaggtgggggtgctgtgttttagaccccccatattatcccagtgtcccctgcccccctcttcccccaccccatgcccccaattctgtggcgcatccagattgtgaaaatgtacaataaatgtgtaatgagtaaccagg

SEQ ID NO: 30 - DNA, 59492 bp, Homo sapiens
gtcctcggacggccgcggccctcggctccggggcagtgccgggagccggccgcggggactcccactcccggcatgctcagcgccgcccgggggcccacgggagctcgcgccccacagcccctgcgcgtccagccctctgcgagggccttggctcgcccctgcggggtccaacgccagcctgcggctgccaggccccacgccggccaggaagtgctcgccgcccgcggccgacgggacccgcccacgccccgcctcttaaagggggcagtgactgcggctgggcgggagtccgggtcggcttggctgagcgggggcggtgctgggcagggcggcggccgctccctcccggactcccggcctcccggcctccctggtcccgcctgggaagggatgcaaggaagccctccggcgctgcgctccgaggcgggagacagcgtccccctccgcccctcgggtcctggcgcctcagagcccggcccaggccgcggaacggtgatgctcgggccggacgggcgggcgcggatccctgcgtcccggtgagcaccaggcccgtccatccggggctctttcccggggtccccttccttccctccctccctggggctcccctcccctctctccctccccggggctcaccttcccttcttcccttcccaagggtccccttccttccttccctccctccctggggctcccctctctccctccccggggctcccattcccttcttcccttcccaggggtccccttccttccttccctccctccctggggctcccctcctctctctccctccctggggctcacctcccctctctctctcctcggggctccccttttcttgcaggtattgtctcccggggtcgggtggtctgtgtggcctggggtcccgctcctccaggccttgcctaggcgctcttcgctgaggcccacgttctaacctggaatggaacctgcgttcccaccctggccgcccgggtggactcggggcctccagggccggccgcagagatgcagccctgtccctggcccccctcctgtgactcctaacggctcctcacggtgtccatgacccagggtgtggacgcctgcgcgggggaagcaagaccgctgcgtatcgggtccctattcactgcctgtttttctgattattctgtcttccaaatttatcttatttaccggctttttcaaaaggagtgtcttaatgattggattacttgtgaaatatttgtagtttttttctcctacaggcttgacttaaatattctaaagcttttttgtggttgttgagacagagttttgctgtcgcccaggctggagtgcagtggctggtcaaggctcaagcgattctcccgcctcagcctccccaggagctggggccacagggagcatcacgcccggctaattatttcatttttaatagagacagggtcttgctgtgttgcccaggatgatctccaactcctgacctcaagcagttcgcccacctcagcctcccagagcgctgggaatacagataattgtgtcgtaatacagcagtggcattaaccaccgcacctggtcttaggtagaatttgaaaacctttttattttgagatggttgtagatcacatgaagttgtaaggagtaatacagagaaatcctacagagtgcctttgccctgttttctccaatggtagcaccttgcaaaaccatagtatatgtggggaattttctttgatcaaatcccctgacctgttgagattgcaccaactatacatgcactagtgagtgtgaatctacacctgtgtgtcttctcaataaaattgagattttttttcactcagccttgagatacatccgcattgttatgtgtatcaattgctcaagatgcagaaattctaagaattcattatttaaaaagtaatcccagcactttgggaggctgaggtgggtggatcacctgaggtcaggagtttgagaccagcctggccaacatggcaaaacaccgtctctactaaaaatacaaaaattagctgggtgtggtggcgagcgcctgtaattccagctacttgggaggctgaggcaggagaattgcttgaacccgggaggcaaaggttgcagtgagctgagatcacaacactgcactccagcctgggtgacaagagcaaaactccgtctcaaacagcaacaacaacaaaaaaaacacattacaggaatccaaagtgtctttttaataactagaacagctaaagatgtttactaatttgctcaaaaaacatgctacaatttagtagtcagtaggattttggaggcaagtttgaagataaaatgaaatgagtttgaataaaggtgatttgtattttaagggtccataaataatttcagtttcatgttatgagtatgtttcagtgggaaattttagtataactacaactaaaatcctcaaaggtttctcataaaaattatagctcccttagagggacaactaattttaggaacctgattgaggaaggaaccagaaatgaacatagaggtgtcattcacacatgagctgtgttgaaacttatttttctgaagcataaaatccatcaaagaatcactttttgggatcttttggggaaactgggaagtgtaagcaaagcatctcagatttctgtcttggttctggaaaatactaaaagttcacttgtgaagtagctgttgatttatttagctccgttggaccaaccgagagaagcttagcagttgagtgagtcattaaaataacagctcagctatatggctaggcatgactaagtgattgcctcattgtttgtttttaaggtggtaaatgtgtacttaaagttgtacacgtgtacttaaagttgtattgaaactaacataaaattgagtgattggaacagcacattatcatttatcctatcttgttaggaagttacctgttctaggtaagtgaattctctgtggagtgtgcttctccttttgggagtcagtctccaagaatgttttgaattgaacactttctaaccagaatatagtcttttcttggtgacttttgcttgtaattctgatcagtactgttgtctaacacagtactgtcttcaggacctgctggggtgcagacagtcgctgagccttcaccgagtcatctggcctccaggcttttttagttctcctgtttgttttgcataaggtttgtctctttctgtggctgccatttcatggtttgggcagaatgctgcctccagaaatgctgcccttacttttgctgcatctaacctactttgcctgggaaactcgattaaaccaattagaatttgggttagcagtgaaatgaaagtatagatatatagatacatcttttagtaaccaggtttccaggtcggggaatctttgtaatatgtgatggttgagtaggaattcctgagtaacagtccattggatgctgctatgaagaatggttaggttaatattttgttgttgtttactttaaactgtaaatctgcgtaagtggtaggtgttggttttgttgccttttttgggatagctacttgtgactggtgatctcctagtggccaaattccacggactctacgtttattactccttccttccacggtctcggtttcccacctctcagctcgttctgccttagtgacctttgctggccgctgtctcatcctgctttctgaacagtgctcctgtctgggtgccttgccctacccctgctcatcaccacctggacaccacggctacagccgcactgaaaccgtcctcattcccccagcagtaatgttcagaaagcaggttcctgtctgtgctgtgccttgccaggataaattaatatacattgttttaggtattcctaaagaaaggaagagaaggagactgaattgggatgataacaaaaagttctagagatctaggtattgtggcatatatatatatatatttttaattcttgacatcttggtagcacttgactgtagactgactttggaaatgtggcaacatttcaaatgattttaagaagcctgcagagctaacagtagctcagaagatttcgtttctggagtgacgttgagcatggtgtccccaagcaacccagtgacctgtgaggggaagttgatggtattttctgggcttcgataacatggactttctgtttttgttttttttttgagacagagttttgctgttgttgcccaagctggagtacaatggcgtgatctgggctccctgcaacgtccgcctcccgggttctagcgattagtagctgggattacaggcgtgcgccaccaggcccatatttttagtagaaacagggtttcaccatgttaaccaggctggtcttgaactcctgacctcaggtgatctgcctgccttggtctcccaaagtgcttgggattacaggcataagccaccatgcccaaccaacatggactctcttaaatagacttggttaatgtcttttgcacatggtggagttggtagagatacgaggctgcgtcgccccccaaaaaaatgacctttaatcctttctataaagatgtagctgacctttaatcatctcagcccttcacaaagcaccatacaaggtacatcaacattcagtatttgattttaatctcagtgaaataaatagtttagatgttgatatttatctaggaaaaatgagaatttcttcagaaaggtgtcagtttttcagatctgattatttaatactctgatcaatagtaatgaatcattgtttaactatgtgtgacaataactctttttcagctgaaaatgtgtgtctgacatgcaagctcagtggggcagagacccgtggattgctgtgccctgccctccggacctggatcatgaaggtgttgggaagaagcttcttctgggtgctgtttcccgtccttccctgggcggtgcaggctgtggagcacgaggaggtggcgcagcgtgtgatcaaactgcaccgcgggcgaggggtggctgccatgcagagccggcagtgggtccgggacagctgcaggaagctctcagggcttctccgccagaagaatgcagttctgaacaaactgaaaactgcaattggagcagtggagaaagacgtgggcctgtcggatgaagagaaactgtttcaggtgcacacgtttgaaattttccagaaagagctgaatgaaagtgaaaattccgttttccaagctgtctacggactgcagagagccctgcagggggattacaaagatgtcgtgaacatgaaggagagcagccggcagcgcctggaggccctgagagaggctgcaataaaggtcagtcctagagagggagagagagagagagggagagggagagagaggtgaagagagagggagagtgcgtgcccacatcctcatcctagagacagcccacacggagctggggagcagacaggaagggaaggcgtgaatgctgctgatgtcgctcaggtgttgtctttcacaggaaatcgcatctagaaaaatctctcatgtgagggagaatcttttccttttgcataatagtgtagctcttacttctagaaggagccagtctcatacttttctctatagagaaatcccctggtaattcaaaaagttattcaagttgtactagtaaactgatgcaaagataaatataacttaaatcaacatttgctgagtttctgacaggagttccttttagtgtgaagtttgacttttcttcagtgtcatatatcgaaaataaaaatactaaaattagttttaaactaatatatacatttgaattaaggactttgaccaagtatgcttttaaaatgatgggaagtttctgaaattactgtatcagatgttgtattagctgtttacattttttaaagccatcatttcttgagtacctctactataccaagcatcatgccaagccctttaaatatataaagtatcacgtcatcttcatagaaaaacctgtgatattattacacagcataaacgttagagaaaatacagacattaaactttctttaccaaaatatattttgggggagagaaatatgattatcaggcaaatgtataaatcaaggttttcaataacactgattcatttgtcttgcctgtgtgatatgtgcatgagctactgtgaccctgtgtacagtggagacgtgaagatacattggtaaggtccagatttgtggtggttttattatagagaaaaaacatgagtttgagtaacattggctcctggtatgcacacttcataacatatcaacagtattttaacatatgctagttattatctcctatgctgagattctccaggtgccggtgacctgcagctatactagccctccagttgcgtgcttgacctgcagctgtgtgtcagacctgcagctgtgtgatagacctgcagctgtgtgtcaagtctgcagttgtgtgtcagtcaaacctgcatctctgtgataggccccagctgtgtgctaacacctgtagctgtgtgtcaggtctgctttggtgtgctagacttgcagctgtgcatgagacctgcagctatgtgagaccagctgtgtgcaagacctgcagctgtgtgtgagatctgcagctgtgtgcaagacctgcagctgtgtgtgagatctgcagctgtgtgagacctgcagctgtgtgtgagaccagctgtgtgtgagacctgcagctgtgtgagacctgcagctctgtgtgagaccagctgtgtgtgagacctgcagctgtatgagacctgcagctgtgtgagacctacagctgtgtgagacctgcagctgtgtgagacctgcagctgtgtgtgagacctgcagctgtgcgagacttgtagctgtgtgagacctgcagctgtgtgagacctgcagctgtgtgagacctacagctgtgtgagacctgcagctgtgtgagtcttgcagctgtgtgagagacctgcagctgtgtgagacctgcagctctttgtcagtggcatcagatgatgtctcatgactacttagtaattgaggcgatgatgttcttctaggctctggtcctctctgctctggccttgtcccacccctttagctaagaataaatgtttaaaagtaagattattgattaaatataattgtgtaaaatacattactaaattatattgccagcatcatccatcagttcttcaaatgattaatgctgttggtttctacatgtgttttggaacagctttcccttgtaacttgaatttgactgtgcattgcatttagatagtagctccacattcaggtctcacatctggttttaaagtaccgctgcactcacacacatgatagacctggagcacagtcactgttgagtaaatgagttttgtgtgaatggatgacctacagatattacatttacttttgtgtaacaaatgtttcttacgtgtgttgatgtacgtacacaaaaacctttccctaaacatttggctaagctcagttatgtttgaataactaggacacgtgacttccctagctgaccagaattaagttattgacatatgaacagggacatttgacaaagcaggaggattgattaagaaagtcatgtcctagcttatttcttaatatatctcactcttcttttcttacaaatgaataggaagaaacagaatatatggaacttctggcagcagaaaaacatcaagttgaagcccttaaaaatatgcaacatcaaaaccaaagtttatccatgcttgacgagattcttgaagatgtaagaaaggcagcggatcgtctggaggaagagatagaggaacatgcttttgacgacaataaatcagtaagcgttccagaacagctgcttcttcacctcctgagccactcactaatcagaagacatgttgttgaaattgttcacgtgtatgtttttaatgtagattgaaaatgaagacaaactaaaatgcttctctgtcgtagagaaaataatttggtcttgtagaagtaagctaattatcttttattttccttttatatttttaacaccgacagtcagttcccctcctcagcagcttgtctgcattttccagaggccagatggattgggacactgggactctagtctcaggacagcctggacagttgggtttaatgctgatctactggggtgttaccagaaacaggtcctaatccagaccccaagagagagttcttggatcaggggtagtccatagagtaaagtgaaagcaagtttattaagaaagtaaagaaacaaaacaatggcaactccataggcgagcagccctgtgggttatttttatgattatttcttgattacatgctaagcaaggggtaggttattcatgaattttctgggaaaggggtggcggtttactagaacagagggttcctcccattttagaccacatagggtaacttccagatgttgccatggcatttgtaagttgtcatggcgcgggtgggagtgtcattccacatgctaatggattataattagtatatagtgagcagtgaggacgagcagaggtcactctcattgccatcttggttttggtgggttttggctggcttctctactgcatcttgttttgtcagcggggtctttgtggcctgtatcttgtgatatcagtcttggcgacctcctgtctcaccctgtgactaagaatgcctgtcccggacatgcagcccagtaggtttcatcctcattttaccctgctcatattcaagatggagtcgctctggtttgaacacctgtaacaggggaacattgaacttcttatagaaaatgatcttcatctctgaagcaggaattcaggctgctcatttgttgtagtgtgtttaagattctaagaaaaaaagtgggactgatgacgaaaattgactgtgggtcttgaggactcacaaaaaggttgggtaataaaaacaaatcagaataagattagaaaagaaagcagagagaataaaaatagagcagaagaaacaagttgttttaaaatctactagttatggaattagaggagaactcgtattttaagggctatgaatttcttgaaagaatggtgaagtagatcttggaaagtagcagaaatcctaaacctatccattcttaaattacttctttaattgaaaaagaagtcctaattcactgctaatgaacactgattgatgtatttttaacattcttctgtttagcgttcattctccaaaaattgaaagcatttaatggattttaattgcataatattattattcttgcaggtcaagggggtcaattttgaggcagttctgagggtggaggaagaagaggccaattctaagcaaaatataacaaaacgagaagtggaggatgacttgggtcttagcatgctgattgactcccagaacaaccagtatattttgaccaagcccagagattcaaccatcccacgtgcagatcaccactttataaaggtagtgagtcatggtggggatgcctgccttcccccaattcctggttcatggtgtcagtatgaccgagctttatcttctgaacaaggcacagccttccttctagcagagattttactagaattccgtacattatctgtgatttgaggcatcttcccttaatttctaatctttttttctaaaggaataagatactttaatatttaaaatgaaagttaattttgttttggagaatttggaagactttgaaattaggagttactgtaatgggattaaagctttagtcatctaaaaaccattttcactaaaattaaaaatccttaaaaggcagagaggtcttggctaaggagtcatatatggcttcatttagccctggggtgcagagcatgagaacccatccagcagtgcctggcgttccagatggaactggattcagacctgtttcctcccaggaacttggtctagacaaaggctatgcagggaggtacttgaagctgagagcatcatggttcgggtggtcactcaggagggagtggcacgaccatgacaggtgcagcccctcagggaagcttggcaagatctgatatactgtcaggtctccagcagagactggaggtttgtacaggagcagaaaccaagccagagaatctaggctcaaagacggtgctatctcaggcgagaggaagaggactagccagagagagatgtggtcacgatggagtgggtcccaggagggctggggctgccgagtgactctgtcagtgccctccaagaaggggtggaggtatctgtaaaactattctttctccctttgtaatgaataatcaatttccagggagagattttgagactgtaagtatcctgctcctcactgaccttcagggctgcaggtgcagcagtgccagcgcccactaaagattcctgcctgcacccgtcatggcaaagccacgtgaattacagtttggacaccagcactgagagtttcccagattagaaaactcagtggaattctaggactcagaattcttagaacactcttatggggcttaagcaaaacaaaaactttgctgtatagtcagccctctgtgtccacgtgctctgcatcctcagattcaaccaactgtggatgaaaatattcagaaaaaagacccaagaataacaatacaataaaaatacaaataaaatatgacatcaatttccattgtgtaggtatcataagtaatctagaggtgctttaaagtatataggaagatgtgctaggttatatgcacataccatcccgttttgtatcagagacttgagcatccgaggattctggtctggggggcaggggaggatcatggaaccactgccccaaagataccgaggggtgactgtaatctttaggccatgaaaaactaactccatctattcccagaatacactcttcatattttcagcttctctgggatcctcagcatgaggaaaatcggtggttttgtcttcacccttcattcccatcaggtgaaatcggggaactacgtcctgttctgtgcctcagccagccagcccccttcttaccactgttatcttatacttctgtttcttatttattttattcttcaggacattgttaccataggaatgctgtccttgccttgtggctggctatgtacagccataggattgcctacaatgtttggttatattatttgtggtgtacttctgggaccttcaggactaaatagtattaaggtaagaacaaaattggattgttttggtatctgtttaacagaatataaaaagagaattcatgaagactaaaaagtattgaatgtgattaatgcagataccagcttcgtataaaccatttcaaagatgtcctttcaggtgtcacgggaagtctctgaaccctcaggaagtcgctgtgcctgttagtgaaggggcggtgttactggagacaacgcccctgctcgtttccattagttttaaggactccatttccagtaacgtgctggaccaggttattcagaccacctttcacgtgctgaatgtaaccaaagtgttgcattaaccgtttttgttgttgttgttgttgttgtttttgagacagagtctcgcactgtcacccgggctggagtgcaatggtgcaatcttggctcactgcaacctccgcctcccgggttcacatgattctcctgcttcagcctcttgagtagctgggattacaggtgcacaccaccacacctggctaattttttgtatttttagtagagacggggtttcactatgttagtcagactggtcttgaactcctgacctcataatccgcccgcctcggcctccaaaagtgctgagattacaggcatgagccaccctgcctggcccattaactgtttttaagcatcccattcacaacacatggaaaagctgattagccccagtcgaggcagtgggcagtggggctgtttgctgggccccgtcacactgatggcacttctgacagggaggaaaggttcccaagcttccagctgtctccccacaacactcacggtgcgagcagcgtggagaacgggtgccagagtgggtgccatgagtcccactggagggaggcgtgccagggggtgggacggggaggagtgcagcctgctccctccaagcctctttccctctgctgctggttgagcctgggactaggcccaggagccccagggctttctccagatcgcagggcggcaggaggggtctgaggagctcgagccccagctggtgaagaggagcgcgcccagcaccctgggcctggggagcggctggccggcagaggagccgcaagcccacgtgtgggggctcccaggacagggctcgccttggcagaatggcctctgggaagaacggctgtttcaatgtagtttttggagtaggtctttttcacgtgattcaagtataaaacaccagaggtgaaaaatcacttcctgccctttgcaaataaaagcaaatacaaatttccttccttctttttcttaatagcaaaggtgctcataaaccaacaaataaggtgaagtggctgggtaacacatacaactggatgctgtaaaaattataattcttaataaatcagctaaaccatggaaaataatgtaattataaatagaccaagataaaaatcaaagcacatactagccaaaagtgagaagtggttaatcgaagtacactgtgtgattgtgtgtgtgtgtgtgtgtgtgtgtgtgtgtgtgtgtgtatgtgtgttttggatacttccaccgggcatactagggcatgattgttgagttaagtatacttaatatgttaaacatgtacaattatatggtttttcttttgtgtttttcagtctattgtgcaagtggagacattaggagaatttggggtgttttttactctttttcttgttggcttagaattttctccagaaaagctaagaaaggtaaggacctcatcaacctgttactgcagctaaggagcttcacatcatgtggttttggttcatacacttttaacacttgttgatgaattcactatcaaatgtttttagaatagaatatgatatttcggtttgatgttatttttgggacaaattcagaaagataaaaaatatcaggtttgaaagcgtagaaattcagtgaagaattggaatttgccttcacatggctaacttcaggaagggtctggaaagtaatgtgtgtgaactttaatagatggctccctctaaggtgcgaaactgttagagggtcagatgtcatagagcttgcatattcagtgtgttaccctagaaaaaactttgtcaattggaagtgagttaattaaaagacactttgtttttccagacaccgcacaaaagaggaaagtagctgattaaaagccagggtggggagaggtaaaatgaacactgttcataacaaaaacaccctgtgaattaagatcagataccactttgcctgcagtgctagctggaaaactagcatcgacttagcaaaagtttttaagtgactgtcagatgtaacaggcattcttgaaccagattcgtgagaatcacaactgtacaccctttctgtatttttggggttttttttccacgaaagacttggtcattttaaacaaagtgacttaatttacagtgtctggtttgcctaatcattcagctctctcatgtagtattccttctttttttaatttaaaatttttttatttcaataggttgttgggaacaggtggtgtttggttacatgcgtaggttctttagtggtgatctgtgagattttggtgcacctgtcaccagagcagtgtacactgctcccgatgtgtagtcttttatccctcgccacccaccaccctttgccccaagtccgcagagtccagtgtgtcattcttacacatttgtgtcctcatagcttagctcccgcttaggagtgagatcatacgacgtttgattttccattcctgagttactgcacttagaataatggtctccagttccatccaggttgctacaaataccccttttttgttcctttttatggctgagtagtattccatggtatataaataccacattttctattgatgggcatttgggctggttccatatttttgcaactgcaaatcgtgctgctctagacatgtgcatgcaagtctctttttcgtataatgacttattttcccctggcagtggggttgctggatcaaatggtagagctacttttagttctctgagcaacctccacactgttttccttagtggttgtgctagtttacgctcccaccagcagtgcagaagtgttccctgttccccacatccctgccaacatctattcttttcattttttggttacggccattcttggaggagtaaggtattgcattgtggttttgatttgcattttcctgatcattagtgatgttcagcatttttttatgtctgttggccatttgtatatcttctttagagaattgtctatttatatccttagcccacttttggatggggttgtttgtttttttcttgctgacttttttgagttctttgtagattctggatattagtcctttgtcggatgtatagattgtggagattttctccagctctttggatttgtacactctttttggagagctgtctagcaatttgacctaaaagccttaaaatgtacatatgccttgacctggtagttcttctaggtctctctccaaaggaaagaatcaaacataagtttttaaaaaatttacccacaaaaggtttcacctcctcattgtaaatttttaagaaacagtggaaccagtcctgagcatctaacggtcagttcagctgcggcgtgactaccatggagtgttaggtagccactgcaaagtaacaagagcatcagcaacagagcaaaatatcggttggaaagctaaatgtggggaaaaaaggagcatgtaacatgaccgcggcaatgtaaaagaagcaccaatacatgggggaaaaatgggaaagaagcgttccgggtagccatgatgacttctggtttcttctccatattttccaaattttctataataagcagtcaatactttgtcattaggaggaagaataaacttttcttttaaaggcttgtgtttactttcagaagtcaactctgatctcactggcatgtttttctttatactctcttcccatttgcttcctcagttcatcctcttacctagaactttttgttttctttatctttctgtttttccactaaaagctccgtttttccatcttcccattactctccctttcctgtgtacactcctgaagacaggcatcctcataaggtgttctgaattaactttagggtgttctccaggtactttgcatctttttatatttcttgtaaattgttaatttctaagctccatgattaaagagaattcaccactctcctgggtcctaatgaaaagctgtgtcatccttgccgttaatcctgtggaggagactgttgtgggtggggagggtaagggagcgtgggccgcgtggctgcctggcctgtggaggaaggagcctgttacgggtggggagggtaagggggcgtgggccacgtggctgcctggcctgtggaggaaggagcctgttatgggtggggagggtaagggggagtgggccgcgtgctgcctggcctgtggaggaagaggctgttatgggtggggagggtaagggggtgtcagccagtggctgcctggcctgtggaggaagaagctgttatgggtggggagggtaagggggagtgggccgcgtggctgcctggcctgtggaggagcctgttatagggggtttggggatgtggctgtccagtgccctgtctcaccagtgtcccacgagactccgtaaaaacacaaggcctccattccatggtgcagcatgggcgtgtgtgtgtgagtgtgtgtgtgtgtgtgtgtgtaatttagagaggtttgcagcaaagggcaatttagggccaacccgtaggggaggtgggagggatgaagttctggctgtgcagcagagcgtcaacaaggcactgatctgcctggacctgtgttcctctcctgtacagtgaggaatctagaaggctccagtgtcttctggctctgcattttcatagtttgtatttttctccactatagtattcacagttaaataaaaaataatgttgtataacgtaaggtggaggtaattgtgagcagcgtgagcatgtgcttcatcaggcctgctgtcgtctaatggtgcttccgagggtttgcacccggttctgaagtgcctgcttggtggtgtagactcgggggcttggcaagaggctggcgttctctgttagtaagttgtgctcagctgccctgcgtggtgacagagtcagatgcgtggaaggacactggattgggactcaggagacgtctgtgaaactccttgctgacatctgattgagtggggctgggcagggttccttctgtgtctgggatgtgcgggtgtcttggcgctgacgagggtctcccggtcccaactcctctcacccgttgccgagcctgtgctgctgtccccggagggagccgtcggagtctggccccaccctggttcatggagacggcatcccgctgtttttctaagtctgtggactcggattgcagatctgtatccacccagaaaacgacattattaagcaatgtgtttattttcccctttttattactcaggtataaatatctggccaagctttagaataacctgagatacccggagtgacttttctgaactgatgagcctcctgccacgtgggttagcttgcacaccacacttatgggtgggaaaataatttccttgggtttttgaaatgttaatacttgccagaaggcccctcttaggacttctaaagatatgattagaaactacttggaacactgaagccccgaaactgcgccgtgcatagtgctgaggaaagctgcccactctgttctcgcccttgtagctgctcgctcctctagcctgacttcaactgttccttaaacttgatctcttaagagtctgtcagtttctgcctctctccagattgtttctcaagtcattgtggttgggagtttcgtttgcttctgtcttgtatcttctctgttctaactacaaatacctgttgagcacctgtggtgttccaggcccttcaggggctgctgggtgaggcaggtataacgtacgtgtgtgcctaccctgcggcttgtattttgggatttcaggagaatgtgtcttggcgccgggggtgccaaggggccctcccgtcagcgcctcctgaccttcagcccacaggcagccatctggggggcttggtaacccacagattctgacctgggcgcacctgcagatggggtttctgatgcatgcacgggtcccgtgttgaacaggaagcttcttactctcacctgtgcccctgtggcctttcctggtgccgtttcccactgtggtgtctggacacctttctcccagggccctcctggctggaatgtggggtaacacaagataataacgtcagacaaggttcaccctggtaatgacctcagagataacagagtctcgcctgttctctatagaaactaaagctagagagattgctacccacccagggcgcacagcgagttagtggcagatcaggcctcaactccatgtgtcccttgagggttaggaagacccagaattagagctggctaacactgcttgcaggagtaacccccacgcccgtggcctcctcaggctgcagccagcgtggacagcacgggtgcttccattgctcttcggccgtgatattcggaagaggaagggtgtgagacgcgctctgtgataaccatcacaattgccaagcataggaagtagagaaaagaaattcagaggcaggctttgtgggaccgacccttcccctccttgtggaaggagagagggggccgagcagagtagagacttacctgagtctccgcagcccagagctgttaagtggcatctgctggcctcctgtcacatgacatctcagtgttcagatgaagtgagcccgggcctcatggggttggaaggcactgtgcttcccctttggggtccggaagctccatggtggacaagcaggccagctggtcacaactgtgggaagctggggcgtgtctgctcatttccctgattctcaaaaaaaaagttgtaattttgcaagaagtgttatttttcactaagaactaggtggggagggaaaggctcacatgctccaaagcacccaaggtacattggggctggcgggcttggtgggtgggtccccccggagctgcctgagtacgttgggactggcaggcttggcgggtgggtcccccctggagctgccggtgtatgttgggactggcgggcttggcgggtgggtcccctgacactgcctgtgtatgttggggctggtgggcttggcgggtgggtcccctgacactgcctgtgtatgttggggctggtgggcttggtgggtgggtcccccctggaggtgcctgagtatgttggggctggcgggcttggcaggtgggtcccccctggagctgcctgtgtatgttgggactggcgggcttggtgggtgggtccccctggcgctgcctgtctatgttgggactggtgggcttggtgggtgggtcccccctggagcttcctgtgttaggatggcaggcttggtgggtgggtcccccctggagctgcctatgttggggctggtgggcttggtgggtgggtcctctggagctgcctgtctatgttgggactggcgggcttggtgggtgggtcccccctggagctgcctatgttgggactggcaggcttcttgggtgggctctcccggagccgcatgtgcccggctgctccatgacgcctatgtttagccacacagcccctgcaccccttccttctagggcccccaccccaactttcactttctgtagagggcctggaattagggaattgatgcttatattgattgggaccatgcagtgaggagaaaaaaatatgaatgagcacttcacgtggaataggaggagttccaggttaatttctttggttgatgtatcgtatttatgtttatatgtcggtagtttttattattttacgattgaagcgtgctttcttccaccttcccgtctggtttaacacagtgctgagtgcaccccgaggcactatagagccgcttcgaatgccgagccacagggcctgggtgcacttcctggctccaacatttactggccacgtgaccttgggcgagtcacttaacctgtgtgtgcctcggtgttttcatctgaaagtggggaaaatggtcatcttgagctcagggtgttctgaggattaggttctattcacacacatggggagagagtgcgtgtgcgtgtattgtgtgtgtgcagccctgtgacagtgcctggcacagaggaagccctgtgtgaggattcaccatgttcagatggtgaccccagcgttgcttcacaaaagctcagctctgcctcctttcctggatgcagaaatgcgtgaagtctgtgtggtgtggtcattgcctgttgtcactaaaaagtgtgtgactcactgtgttctctttaaggtgtggaagatttccttacaagggccgtgttacatgacactgttaatgattgcatttggcttgctgtgggggcatctcttgcggatcaaacccacgcagagcgtcttcatttccacgtgtctgtccttgtcaagcacacccctcgtgtccaggttcctcatgggcagtgctcggggtgacaaagaaggtaggtgacggcatgttctgagtgcgtgtctaattcatgctcgtgtgtaggtgacttttggattcacagttgagggcatgtgaggaaaaattgcaaagtcttatttcccctcttaggactttcctaaccatggtggataccagggcttacattctgcaaggaaatggtgtccctgtgaactcagctcctccaaacctccacttctccacttgattaagaaaaatgcccgtgaggattgattgagggccagagagaaattggaccaagattttgaaaaaccagtcagcactggaaaatgacctgtggaactggtggattttaggaagttgcgtatgttttgctgctttaattctagcaggcactgggaattgatacacttttgatactttcttcctgtgaaatcaaggtgctttggtaactgaaggtgttcccgactctttggctttggccttagtttcatcgtatgtatgaaacattgccgcttctaagtcgtgactgtttagtggaagccgacttgctcggagcctaggcaggaccgtgtccctctgcggggaggacagtggaagccgactcactcggaagcctaggcaggaccgtgtccctgtgcggggaggacagtggaagccgacttgctcggagcctaggcaggaccgtgtccctgtgcggggaggacagtggaagccgactcactcggaaacctaggcaggaccgtgtccctgtgcggggaggcttggcaggtggctgtttctgacagcctgcctacccactgggtaagctgtcactgttttgctcttattttgtaaaagtcagtaaaatacggggtcgaaatgtcacagtcacttcactctgacgttcaccctgcacagaacacacaggcatagaagagaaaatacggaaagagaaaaccaaagaggtatgtctgacctctcccataaaccgagaggctctgtgccggcaactgagaggctgagcagagctggccatgggccgccaagcagggtgctggagcatgtgggacccacatgtgccctcactgtgtgacaggcagttgggaagcatctgtctgtgaaaggaggcagggaaaactttttaaaaatctgcggctttctgcggggcctgaggcgccagtaggacacggatgcagcctccctgctagacgctggacgggtggccccggccatgggcctcctccgtgctggtgccagcatccctgtgggctggtcctagggtcagccccatcgtgagactggacagggttggagggtcgggggctgagtgaaatgaaaaaagaccaagtggggaccaggaacgacgcatgaaaacagctcctagtttagtggcccgcacacgggacacccacacctgtgaagaaatctgtggctggaaaagagctgacggactcagcagtcacagcgtgaactgcccttatggacagagaagcttcacaaagacttcaaaatcagtgcacggtgtatatacactcggaggtgtgcagtatatatacactcggagtcacggaggccgggactggagaggcagagggccggagtgtagatggagagggtcagtatatatacactcggagtcgcgggggccgggactggagagggagagggttggagtgtagatggagagggtcagtatatatatatacttggagtctcaggggccgggactggagagggagagggttggtgtgtagatggagagggtcagtatatatacactcggagtcgcgggggccgggactggagaggcagagggccggagtgtagatggagagggtcagtatatatacactcggagtcgcgggggccgggactggagagggagagggttggagtgtagatggagagggtcagtatatatatacactcggagtctcaggggccgggactggagagggagagggttggtgtgtagatggagagggtcagtatatatggactcagagccccaggggccggagtgtagacggagagggttggagtgtagatggagagggtcagtatatatagactcagagcctcagtggccggagtgtagatggagggggttggagcgtagatggagaaggttggagtgtagacggagagggttggagagtagatggagagggtcagtgtacatagactcggagccccaggtgctggaactggaagggggccggagtgtaaacggagagagtcagtatatatagatttggagccccaggtgctgggactggaagggggctggagtgtagatggagagagtcagtatatatagatttggagccccaggtgctggaactggaagggggccggagtgtagacggagagagtcagtatatatagatttggagccccaggtgctgggactggaagggggccagagtgtagacggagagggtcagtatatgtggactcggagccccaggtgctgggactggaagggggccagagtgtagatggagagggtcagtatatatggactcggagccccaggggccagaatgtagatggagagggtcagtatatatagactcagagccccaggggccgagactggaaagaggacctggtaggttttcagaactcgagacaggagcccatctccaacactgatgggataaggggaaataagtccacccaggcatgtcatgttctgcagctgagcatgaagtagaagggaacgtctgaacacttggcagaaaagacaggtggtttaaaaaggaacagcaaataattgggctgataggacacgtctcctcggcaacgtcagatggtgggagatagcggataggtaacccacaccctggggagacaagtcatgtgtgcccagtgaaagtaccatccaagagtagggggtaaaatgcaggcatttctgatgtgcaaagaccccagagcaccgcccacccagcagtccccacagggcccagacccaggccctgcagaggcagagctgggcgtggaagcagcagggagacagagggggctagaaggtgatacatttagtcagttatgactgttagaaaaggagatgtttgagtttgtttttttaaaggccaggctaaaactctagatagtaagaagataggagggttgcatgtttgggaggtagttagagtcaaggacttggacactgaaaggaaatttacagttagacatgttaaatgtgtaatatacccacagcacagttagaaattgtaatttgaaaaaaaagctttgggaataaacttatcaaaagagagctgtgacctttgaggataaagtcacaaatggagtgaattcatgctcacagagttcataaaaagactccattcataaagatgtcacttctccccaaatttataaactcatagctgttccaataaaaaaaatctggcaggagttttcatgaaactgaagaaactgatcctaaaattcagtgggtaccaaaaagctaagaataggcaacattaatttgaggtgaggagtcccccgccagctctcaagactgaggatgtcccggtggatagcagcaccacaggctgagatggagccggggggtcggggcccacagcccagacgctgcagagaagctggggagatcgacttaccaggagtgggaattagctatccaacgtaagaaaatgaaattagcttgactttagaactacgagaaggaaatagaaaatatccttataaccttagggtagaattccttaaaatataaaatgcagaattcaaaagagaaaatactgatacatatgacacatttgactttgtaaccttctttttcatactaacctcactatggggacaactgtaacttttattgaaaggcatttttttttaataagccacaggccagaggaagacatttcctatagttatttattgtttgtttagagcaaaggattaatattcagaatgtatcaagaacgtctgtaaatccaaaccaaaaagtaacctaatgggaaaataggcagaatatctgagcaaataacttacgggagaagaaacctaaatgatgaacaaaaaggaagacatgagcctcgctagtattcggggtgcaggctgatgggactgagatcgacgccatccacacaagcctgctgccaagctttgttttagaccgagtcttgcaacaggaagacatgagcctcgctagtatttggggtgcaggctgatgggactgagatcgacgccatccacacaagcctgctgccaagctttgttttagaccgagtcttgcaacaggaagacatgagcctcgctagtattcggggtgcaggctgatgggactgagatcgacgccatccacacgagcttgctgccaagctttgttttagaccgagtcttgctgtcacccaggctggagtgcagtggcttgatcttggctcactgcagccccaacctcctgggctcaagtgatcctcccatctcagcatcctgagtagctgggatgacaggcgtgtgccaccatgcctggctaagtttttagtctttttgtagagatggaggtcttgctatgttacccaggctggttttgaaccctggcctcgagcagtcctcctgcctcggcctcccaaagcgttgggattgcaggcatgagccaccgcacctggccctggcagacatttttaacctgatctaccattggcaagaatgtggagttgcaagatctaagcattctccatgggaatgtaaattggttcagccactttggagaacaattttgcaatcagaaaattccatttctatatacatatcctagaaaattcttgcaaattattataattcaaaacagcattatttttagtagcaaaaaattaatcaactgaatattcagtaacatgctggacagttaagatgtattcatacattggaatgctgcagaagcaaatgtgaattctgtagcatggagggaaagatagaagatgtggaatgcaacatgttttatgtgtttaaagtctgaactttacatacatgcaaacttttacactaaaagcaacaagaagtgtttgagaatgacagatgtggccgggtggctgtgccagagatggggaggcatgccatcagagagagacgcagggcagtcggctgcttgtgacatttcttccagaagctcagtgatggctctggttgttcatgacatgctttgtaccttttttcttgatccaaagtattttataataattgtttttaaaaacaaggtaagtggctgggcacggtggctcacgctggtaatcccagcactttgggaggccgaggcgggcggatcacgaggtcaggagatcgagaccatcctggctaacatggtgaaaccccgtctctactaaaaatacaaaaaattagccgggcatggtggcgggcgcctgtagtcccagccactcaagaggctgaggcagaagaatggcgtgaacccgggagacagagtttgcagtgagccgagatcgtgccactgcactccagcctggttgacagagcgagactccgtcccaaaaaaaaaaaaaaaaaaaaaaaagaaatgcagctgacttgtgtgtgtttattttgtgccctgcaactttgtgaactggtttattgtaatagatttttgtgtgtggaatctttaggattttctacatatgagataatctcatctgcttacaggatcattaaattcattcttcccaatttggacaccagccttgtgtcttagagatgcacattgaaaggtatggttaagaggatgactggggtttcccttaggagggtagagtggaggttagtgtatgaaacaaggttagtctgcctgatcatggaaactggattatttgttccttgagatgcactgtatttttctttctacttttgcatatgcttgaaattttattagaaattcctatatatgtccaggcatggtggctcatgcctgtaatcccagcactttgggaggccaaggcaggtggatcacatcaggtcaggagttcaagaccgtcctggccaacatggcaaaacctcatctctactgaaaatataaaaattagccgggcatggtggcacacgcctgtaatccccagctactcgggaggctgaggcacaagaattgcttgaaccctggaggcggagcttccagtgagctgagttcacaccactgcactccagcctgggccacagagtgagactccatctcaaaaaaaaaaaaaagaaaagaaaagaaaagaaatttgtatatagcccaaacttaagactgtctcaccagagcttaaaggtgttagctctggccacagcagcggcctcagtcactcttcttacatggattttgatgcaaattctgctccttttctatttctcaagatttctagccccttcgaggggcccaaccctcgaaggagtccagtaaatgtgtaactccactctgccttgcctgtgctgaaaacacatagaaagaggaacagaggaggcaggcacctggaggtcagaatggcagctggattgtgaagaaggtgtggtttgcatgcctggcagtgatgagcttcttaggcttcattcttaacctcggagcaagactcattgtccagccacaagcagcgttggcctccagaggcctccgtgggcagggcctgccctgtgaaactcaggtctgcaagagaaccttgagaccaggtgccgtgggctggctggttcacaaaggaagacgggctctatccatttccaggaagagcgcccttgtctccctgggagtaatgtatgtgggaccaggcaagaggccaggagtggtgaggaaacattcccttcttgtgaaaatgcaagcgaggggaaaggaggtttcccccacaatgtgctagaatattcatgcagcctttgttgttgttgttgaggaggagtctcgctctgtcgcccaggctggagtgcaacggcacaatttcagctcactgcaagttccacctcccgggttcacgccattctcctgcctcagcctcccgagtagctgggactacaggcgcccgccaccacgcccggctaattctatttttagtagagacggggtttcaccgtgttagccaggatggtctcgatctcctgacctcgtgatccgcccgccttggcctcccaaagtgctgggattacatgcagccatttttgtattagtgaataaatggaattcctgaacgtccaccaagagatgaatggataaactgtggtctgttctacaacagttttaaaaatgaatcagagctttgtgcatcaacatggataatttgcagatatagtggtggtcaaaaacggcaagtcgcagaaatgttgattctgtgaagtttaatattacaaaataataaactcagtgttgcctccagatctataggtgttaacattaagtagaaatgcattcaaggggatgatgaactttcagaataaggtcaagtggggactgtgggtggagggaagaggggccccacagcacggggtttacagacctccttgtggggagtgtgggtggagggaagaggggccccacagcaaggggtttacagagctccttggcggcacccttaggactttatttctttaaaaatctgaagcaaatatgttacaggtttaaaatttagcaaattccttagtgggtatgtgagcatttgatatactccttgttctctgtatatttaaactgtttaataaaaggaatggaaaacaggaagaaatcaaaatgcttatagtagtgataagcacaaaaaggtagtgcagatttcagaaagatgacaatagtgaaagtgttgagaaattagagaaattgtaatatttcagtgtggtaatattttcatcttgtctggttgcactgctgaagttttgtgcccgtcactactccgagcacttgtcttcctcctgcagccccgtgaagtccctcgtgagcagtgtttcctgcgcaggccctgtgggtgtggactcggggtcctgcatcagggaccttggtgaagacctggtctctgctctgtggtgcccatggcctagcgggcaacagttgagtgtctgttgatttcagccagttcactatgatcggtgcaaaggaagagaacaaaatatttaaaacatttacaaaatgctggcagtaatatcatcaaaggctatctctaaaaagtgagatgtagtgagagattttgtttcttttaaatagaaggggcgcaggtgtgaacgtgttatctgcggaagatgtggggtggccgtggctcctttgcatcccacagactcatctcgcagcctccctcccgtcttgcgaaggctgcgagatgaagagagatgcggtgaccacaagcccatgcgagccttagggtgaaaatcgctgatctgtgaagcctccgcatggacaatattagttgggaggcaattttatcatctcctgaatcgtgtaaccctaaaaggcacaaagctgtagccacaacagcttaacgtcatcgtctgttcagactgttttaaaattctaagccaagatattttgttcaccaaaaatttaattttgtacaataagtcaatcaagccttctaaaacaattacctgaatctctatccagaaagagatttttgctggcatcaaggggttttgtgtggttctgctgtttttttaaaataagccttttctatcagattggtcttttaaaatctgttgataacagtagcttttttttttttttttgagacggagtctcgctcttgtcccccaggctggagtgcagtggcgtgatctcagctcactgtaacctccgcctcctgggttcaagtgattctcctgcctcagcctcccaagtagctgggactgcaggtgcccgccaccatgcccagctaattttttgtattttttagaacagatggggtttcaccatgttggtcaggctggtctcgaactcctgacctcaggtgatctacccacctcagcctcccaaagtgctgggattacaggcgtgagccaccgcgcccagccgctttttttttttttttgtaagaaaaagtaccttgttcggggtggggttgggggaatgacaatttaatttttagaagcatatttacagagttcatagctggaactgtacattgaaaattgagacctttggaggcttgtgcaagttactgaatttgtgaagaaggtctcattttcctttcttctttccagagttgttccttagtctcttcagctagtcatggctactactgttctgccctcgtgagccggtgtttgtctgccgggcccgccttggtcacacagtgaaggctcattccgtgtggtggcttgggtgcgtctgcaccatttggacaccaagtctgtgttggtcacacagtgaaggctcattccgtgtggtggcttgggtgcgtctgcaccatttggacaccaagtctgtcttggtctcacagcgaaggctcattccgtgtggtggcttgggtgcgtctgcaccatttggacatcaagtctgtgttggtctcacagagaaggctcgttctgtgcagtggcttgggtgggtctgcacacgtggaacacaccacgtgaccagaggggcctgagtcaggcctacctggagtagctcagggaagctgtaaaggtgagaagcaaaggcttctccatgtgtttctgggacgcagtgaaattggtgtgattatccaagcctgtcatcttgtttgccatgtcacctttttgtcatgagatttttcaataattatataaataacaagtaagtcgtggaagtaaaaggtgttctgatgatttgctctacaacatttttaatcttaaaatgcttcagtgttctcaaagagattttaaagtctattcttaaaaatgtaaagtgccggccgggagtagtggcccatgcctgtaatcccagcactttgggaggccagggcaggtggatcacaaggtcaggagtttgagaccagcctgaccaacatggtgaaaccccgtctctactaaagatataaaaattagccaggcgtgatggcaggcgcctataatcccagctactcaggaggctaaggcaggagaatcacttgaacccgggaggtggaggttgcagtgagctgagatcgagccactgcactccagcctgggcgacagagcaaaactccatctcaaaaaaaaaaaaaaaaaaagtaaagtgccaaaataatttgagttattttggaagtgtgtacaatggcaatattttgactttggatacttttgagttgtcgtagacctgtcttcaatgcctttccccccacaggcgacattgactacagcaccgtgctcctcggcatgctggtgacgcaggacgtgcagctcgggctcttcatggccgtcatgccgactctcatacaggcgggcgccagtgcatcttctaggtaaacgctttgtgtacgcaatttgtttttatagtttaaaatcacttgtgcataaaaatactacttaataccttttccaaagagatgttctgagctcagatggctcaggattccgtgcacagtccctggagcaacactgccttgctcacgccctggctctgtgcttagcagctcctcaccacgggcaggtgacttatcctcacagttcctcagtcctgtcttccatcaagtaggggtggtagtagtacccactgatggagtagtcaggaggaatgaatgagttccgatagaaacatgcttagaacaatgtccagaacgtaataagtgatgtggagggaggggggtgtctgtatgcatgtgtatgtgtgcacggggagggagtatctgtgtgtgtgtgtgtaggtagggtatatctgtgtgcttacgtggtatgtgtgtgtatgtattcacgtgtatctgcatgtatgtgtggcgcacctgtggtgggggggcatgtgtctgcatgtgtggtgtgtgtgtttgttctgtggtatgtctgtgggggggtatccacgtgtgcgtatgtggggtatatctgtgtgtttgcatgtgtctgcatgcatgtgcgtctgcatgtatatctgcatgcatgtgtggtgtgtgtgtgtgtatgagagctatcattgtatggttgtatatctgcatgcatgtgtggtgtgcgtgtttgttctgtggtatgtctgtaggggggtatccacgtgtgcatatgtggggtatatctgtgtgttgcatgtgtctgcgtgcatgtgtgtctgcatgtacatctgcatgcgtgtgtggtgtgtatgcgtgtaggagagctatcattgtgtggttgtcattgtcactgtcatcatcattaccacttccccgatccttcttttcattctcccaatatcgtattgccaaacgtaaactgcacctgcttgggttcgtatggagagagaagccaaatgggaagaattaatttatccagaaagttgtaggttgtgccgcatatacaaatacattccaagaatatcagccagaaaataaggacagttgcaaagtctagggtgccctatgaaacttaaagtgggataggactgtaagcttgagtgtgttttaagccaatatactatactttatgtatgtaaatattgtgctttagatctaatctccagaggctacctttattgcatttcttacagcaatgagtacaactgatcaaaaattaggagacctttttgaaacttcttttggaaccagattgaggttctaggacctgtctcgtgtgctttatttcttcctttccaacccgtatgcttttgggtttcttcttgccttattgcactggctggaatgtccagtactttgttgaaaaagattgtgtaagaggacatctttgccttgctcttgggaagcattcagtctctcaccactaggtatgatgttagctgtaggtttattgtagactctctttgtcaagctgaggaaattcccatctattcctagtttgctgagagtttttatgatgaatgggtggtggattctgtcgattgctttttctaaaccaattgatatgattatgtaatttttctttgttgttgttgttgttgttgttgtttgagacggagtctcgctctgtcgcccagcctggagtgcagtggcacgatctgggctcactgcaagctccgcctcccagcttcacgccattctcctgcctcagcctctggagtagctgggaccacaggcacctgccaccaagcccggccaattttttgtatttttagtagagacggggttccactgtgttagccaggatggtctcgatctcctgaccttgtgatctacccacctcggcctcccaaagtgctgggattataggcgtgagcaaccgcgcccggctgttgttgtttttgagatggagtctcactctgttgctcaggctggatgcagtgtcgtgatctcggctcactgaaacctccacctcctgggttcaagcagttctcctgcccagccttccgagcagctgggactacaggcatgcaccaccacgcccagctaattttcatatttttagtagagacagggtttcaccttattggccaggctggtcttgaactcccgacattgtgatctgcccgcctcagcctcccaaagtgctgggattacaggcatgagccaccgtgcctggccttcttttttagctagttgacatgatggataacattgatttttggaagttgaaccagccttgcatacctgggataattccccgttggtttaggtatataattatttttatacattgctgccttcagtttgctaatttattgaggattttggggtctaacttcatgagagatattggtgtgtagttctctctttttttttttgatactctttgggttttggtaataaaagtcatactaggttcacaaaatgttttgggaagtgttcctttctttttattttctggaaaacattgtataaaattgatgtcagttcttccttaatatttggtagaattctgcagtaaaaccctctgggtcatgagatttccttttggggagttttcttacaaatttaatttgcttaatagtcacagtagatattcagaatatctacttcatattgttgagttgtggtagcttagctttttgaggaattgttccactctgtctcagttgtcagatttatatatacagagtttttgtgttgtattcctttatcattcttttgatgtccacagggtctgtagtgatatcttctgtttcattgcttatgttgataacttgcatcatctttgtctagggatttggcaattgtattaatctttccaaagaattcgttccttgttttattgattttctttattttgttgttgttttcaatttcattagtttctaccctcaccttccttcttgctttgggtttattttacttttctttttctaggttcttatggtttaacttagattattgattttaaacttctcatcttttctactgtaagcatttactgctgtaaatttccctctcagcactgttttagccgcatctcatattttgatatgttgtatttttattttcattttgttcaatgagttttaaaaatttactttgatacttctttgactcatggattgtttagaagtgttgcttaatttccatacatctggagattttcctgatgtctttctgttactgatttgtagtttgagtccactgtggcgcgagaacattttgtatgatttcagttcttctacatttgttgaggtttgttttatggccagtgatactgtctgtggtaaatgctccaaagtcacttgggaggaaaaaaaagtgtattctgttattgttgagtggagttttttttaatatatgtcagtcagttaactgcgctatttcgtgttcttgctgtagttgtatcagttgttgagggagatggtattgaagtcccccgttagaattggatatttgtctgtttctcctttgagttcaatcagcttttgctctatgtattttggggctcttttgtttggtacatacacatttaggatcattttgtcttcctggtgaattgatcttgttatcattatgtaatatttctttttttgttgtttttcgagacatagtcttgctctgttgcccaggctggaatgcagtggcgtgatctcggctcctgcctcctgggttctagtgattctcgtgcctcagcctcctgagtagctgggattacaggcgtgtgccaccacacctggctaatttttgtattttttagtagagacaaggtttcgccatgttggccgggccagtctcaaactcctggcctcaagtgatcttccagcctcggcctcccaaagtgctgggattacaggtgtgagccactgtgcctggccatatttcttttgtttctagtaattttccttgccgtgtaattcactttatctgatattaaaataatattatttttttttttggtcaatgtctgcaatggtgtatccttttcatacttttcctttcaacttatgcccttgtatttgaagtgagtttcttgtggagaacatattgttggatgatttttttaaatccactcagccagtctctgtattttaattggtatgtttagaccatttacatatcaggtaaatattgatatgttgcaacttaagtctgcattttatttgttttttgtctcgttactctttttcttttacatctctgtgggttgactgcgtgttttcagggattctgtttaggctcatttataatgttttgagtgtattgctctgtgtggttttcctggttgctctgggtatcacagtggacacatgtaacttatcactgtttgctggaatccacgttttaccacttcatgtgaaatgtagaagccttatttccacttagctccctccccctgcccacatgttaaatagtcacgcgctgcataatgacattttggtcagtgatgggccacctgtacagcagtggtcgggtgggattctctggacctgaacaattcctgttgcctagtgaggttgcagcccttgtaacgtcacagggcagtgtaatgcccccatgcttgtggtgatgctggcacgaacaaacctgctgcactgccaatcatataaaaggctcacacacccaattaggcatggtacggaatacttgataacgacaataaatcactgttactggtttatgtatttactatactttttatcgttagagtgtactccttctacttataaagagaagtagaactgtcaaaacagcctcaggcaggttcttcaggagctattctagaacaagccatcatcatcataggagacgacagctctgtgccggttattctagaacaagccatcgtcatcatagcagacgacagctctgtgcctgttattctagaacaagccatcgtcatcataggagacgacagctctgtgcctgttattctagaacaagccatcgtcatcgtaggagacgacagctctgtgccggttattctagaacaagccatcgtcgtcgtaggagaggacagctctgtgccggttattctagaacaagccatcgtcgtcgtaggagacgacagctctgtgcctgttattctagaacaagccatcgtcgtcgtaggagacgacagctctgtgccggttattctagaacaagccgtcgtcgtcgtaggagacgacagctctgtgccggttattctagaacaagccgtcgtcgtcgtaggagacgacagctctgtgccggttattctagaagaagccgtcgtcgtcgtaggagacgacagctatgtgccggttattctagaacaagccgtcgtcgtcgtaggagacgacagctctgtgccggttattccacctgaagaccttgcagtgggacaggatgcggacgtggaagacagcgacactgatggtcctgaccctgtgcgggtttaggctaatgtgtgtttgtgtcttagtttttaaccaaaaagtttaaaaagttaaaaaaaattaaaatagaaaaaaacgtatagaataaataagaagaaagaaaatattttttgtacagccatacagtttctgttttaagtgtcattacaaaagagtcaaaaagtttttaaaaaccttaaagtttataaagttaaaaagttacagtaagttaaggttaatactgaagaaagaaaaatatttttaataaactcagcacagttggccaggtgtggtggctcacacctgtaatcctagtctttgggaggccaaggcgggaggattgcttgagtttaggagttcaagaccagcctgggcaacatagcaagacctcatctctaccaaaaaaaaaaaaattagccaggcgtggtggcgcacacccatagtcccagctactctggaggcgaaggctgtaggattgcttgagcctgggagataaaggctgcagtgagctgtgatcataccgctgctctccagcctggacaacacagtgagacactgtctcagtttagtgtagcctgagtgtacagcgcctgtggcgtctgccgtggtttacagtagtgtccaaggctctcacattcactcaccctcactccctgactcactcagagcaacctccagtcctgcaagcgccctgtacaggtgtgccatttttacctttgatgctatactttcagtgtgtattttctgtgtttagatatgcaaatacttatcattgtgttacagttggctgcagtattaagtgcagtcacgtgctgtgcaggtgtgtggtccaggagcaggaggcagtgccaggcggcctgggtgggtctgggtttgtgtaaatgcactctggaatgtctgcacaatgatgaaattgccttatgatgcttctcagaatgtgtccccattgtgaagtggcacatgactgtataattgttgtcttttctcttcttttattgaataccacagcagatggtgttgtaatgtttactgcagacatcaaatacgattttgaaaactcaggaggaaaaggataatctcttcttctcatacctgtttttacccattctggtgttcttctttcccttctgatgttcccatctatcttctgtaatcatttcctctctgtgtagagaactttctttggtcattctttcatggttaatctgctggccacaaattctctaagtttttcttcgtctgggaatggcctttgtccccgcgtcactccgagggcatctcacgggatgtggatttccaggtggtggctctcctcatccagtgcctgggaagcgcgtgtccctgcccccggcttctgtgttccagctatgaaacctgctgctgtttagacttgtgcttctctcgaaggaatgaggggtttctctctggcagctttcaaggtttttttctctgtctttagttttcagaaattgtattaccatacatcctggagcagatttctctgggtttgttctatttggattcagttggcttctcgcatctgtgggtttatgtctcttggctaacaggaagttttcagccatcatttcctcacatcctttttcagtccacttgttctctcctgcgattgcggaaacttagaaatctgctctttggttagggtcctgcgggtctctgaggccttgaccgtcctcggtccgtttctgtgtgttcaggcagatgaattctgtctgtcctcggggtcaccggttctgccctctctcgtctccactctgccacttagcccatccccagagatttttattatgactgtatttttttagttgtataatttccacttacttcttttatgtagcctttatttcttggctgagattttctattttttatttgtttacagagagtgtttgtggccttttgaagcgttttagtcatggctgctttaacaccctcatcagataactccagtatccgttcgtctcgatgtgaagtctggcgcttgtcttttctccttcaagttgtgattttcccgattcttaatatgatgagcgacttttcgttgtatcctgggtggttcgtgtgtttattaggaggctttaaaccagtgactcccctggggagggtggtgtgaggcctggccagggggttctgcttcctgccaggcctccagccccaccccggcccaaacagctggcaagcgcttcctcatggcaggcggtggggtggaagaattttttagtatttgccttttgccagatcttctgttacatcttccctgctgtcggtagctcagccaggcaggcaggaaagtagaaggaatgaagggctgtttacctgggttttccagaggttcagcccaggctagagccccagcttggccatgctctggccgtgcaagccctggcagctttctgtgaattggggaggacgtgggaacagtgcctacctggtggaccgtgggaagactgaaagagaaaaccaggcagggcacttagtgcagccgctggtggaggcagtggttagagttcactcgctagagggtccttgtgataagagggtccttatgataagagggtccttatgataagagggtccttatcatggccattttcctttgatccagatgtctttaaatatcagaaaaataacgcttttagtcccaaccgccacatcggaatcagttcttattccttctggctacaatgtccaacataagttgaacaacataatttggacaacagaaggaagggttgtcatgctagccggagatgacttctagttaagaggtctgagcattttccacgcacaaccagttattctcaacggagggcggactctccatacgaaacaagcagagccctggcagagactgcagggcatttgtaaaactcaaacaccacgttgatctcactgccacgttctttccagttacacgcaggtctaacatgctggcataagacattgtcttaatcagaacacttttaaagcttttttttcccttttttccaattcaaaaaattaatgcagtacaggtattgatcccaccgaaattgttctaattcagtcatgacacttcatgtttacaaagagttgatgacttggaaaaatactctgtaatgctgttaaacttaagaaacagaatcgggccgggtgcagcggctcacgctgtcatcccagcgctttgggaggctgaggcaggaagatggcttgagagccgggcgcagcggcttccgcctgtcatcctagcgctttgggaggctgaggggggcggatcacgaggtcaggagatcgagaccatcctggctaacacggtgaaaccccgtctctactaaaaatacaaaaaattagccaggcatggtggcacgtgcctgtattcccagctactcgggaggctgaggcaggagaatcacttgaacccaggaggcagaggttgcagtgagctgagatcacgacactgcactccagcttgggcgacagagcaagactctatctcaaaaaaaaaaaacaaaagaaacagaaacagagtcagaattgtagaccacgttcctcctgacgctaacacagagctcccatttgacccagctgttcgctcctcggtatttacccgcaagaaacaaaaacacacatccacattcagactgatacacggtggtgatgggggtacaacagtgtgaatccacctgataccacagagttacacactcagaaatggttaacatggtacattttattgtatgagagtttcaccacaatgaaaaacttgtacctgaatgttcaagcagcattattcgtatagttaaaaagtattaagaactcaaatgtcaattagataacaggtagatatacaaaacatactatattcagcaaaggaatattattcagccataatatagaatgaacattgattcatcctatagcacagatgaagcacgatgcttctgaaagaaccggacaaaaagtccacacgctgtgtgattccattcataccaacgtccagactaggccagtccgtacagacaggatgaattactggttgccggagggtggggaggttgggggagatggggaggaagtgctgatgggtacagggtttctttttgggatgatgaaagtattctaacatggattgtggtaatagttgtgtaattttgtgaatatgctggaaaccattgaattgtatactttaaatgggtaagttgtatggtaagtgaattatatatcatagctgttaaaaatatatacgatattttaattagacatagaagaacatgaatagagactagaaatatatatatgtatatataacaaggtgttaatgattttctactagtagactggtagatttgtactaagttttttctactatatatacttttctgtaatttaggaaaacctccctttcaattttaataacgagggaaaatttatatttaaaatatcaaagaaataaaattagttgcaacataatagactctgctttcttattaagctttattcagaattaaccttgatcattcctagaggaaagaactctttccctcaaaatatttcacaggtaaagaacagaacacagaaggctgtaataaagcaaaacagatgtttatgcccatattaaagacagaggcttatgtttcttattttataaaggtctcctataccttaataagaaaaatatgaataactgagtttgaaaacaggtcagcagcaaagcagctattagacttgagtaaagtaggaaacacccaccctcacaccaaagaagggtgatggcaccacccgcccatcagactgggcaccattagaagctgggtggtgcccaggttgggaagtggggtaccttgggcatcattgttgggatgggaattggagcaacttcctggcggcccaccagacagcacctgtcatagtgggaggcacccggctcccttagtgagcacccactgccaccatcagtggacccacaggctccttggtcaccgcagcgcccaagaaccaggatggccgtggagtcagtgtgagaaccgggacagcccttgcatctggctgagcaaatgatggtgcgtcccgccagggagcccttcctcacctgtccgctggccagacatgctgatgggaagcttgtccactcacctgtccgcgggccagacgtgctgatgggaagcttgtccactcacctgtccgcaggtcagatgtgctgatgggaagcttgtccaaacacgctgagacagtcagaacagccgtggacacggcgccccgtatgtgcagatcaagagcagcacacgcgtggacctgcaggtggcacggcgccctgtacatacagatcaagagcagcatgcgtgtggacctgcaggtgacacggcgccccgtacgtgcagatcaagagcagcacacgcgtggacctgcaggtggcacggcaccccgtacatgcagatcaagagcagcacacgcgtgtggacctgcaggtggcacggcgccccgtacgtgcagatcaagagcagcacgcgtgtggacctgcaggtgacacggcgccccgtacatgcagatcaagagcagcacgcacgtggacctgccggtggcacggcggcaagccggaatcctgagaaacttgtcacggtgattgtctttcaaagaggtcagagttgagcgcactgtggcttctgattggcatctttctgagccctcatcactgtgcatttaatggacactgtgggagtcttctgggaattagacctaaatccaaaccctggggatggtggctgtggagagcttgtgtagccgttaggggcttggtcctggagccagatacctgagttgtccccagctctctgcactgggcgtgtggcctggagcagatcacctggtctctgcccctgttctcatctgtgacgtagcagtggggatcgtacagctcttaccaggctgccataataggtggcacacagtgctctgcacacagtgctctaggggctcaggatgcaagggtgagctcagcagaggacgttccccatgtggggagctgctgttgtgttttggagaggcaatgaatgaatgatgcacaaatgagtggtagacaagacatccgcagcagggaaccgccctgcgaatgattcaaacaggaagaggagctggtgagcagccgtgagcccccagacgcacaggctctacctttggagatgtggctggaatttgaggaatgcagctaagcctgttgggagaagagtctagggtagggacctcccaggcaaggggctctgtggcctgtgtgggtgggctggggcagtggaagggcatggcagggcagagaagcctgggttccatcccagcgtccaggagctgattgagggtcctgatgagctgtctgggcctctgtgtggagagcagatggatcaggaggaggccactggagctgtgggggaaggggtggcagcccaggcagggaccacggtgctgggcccagggccagacgtgggcctggcagtgtggcaaagctgtcaggagtgcggcaggcctggtctgcttggccgtgagtctgtctccgttcctgccagggctgcagaaaggggcctctctctgagtcgcggacttgggccctgcagtgagctctgaaggacgctgcctccctccttctaagtcgcagacgtgggccctgcagcgagctctgaaggacgctgcctccctcctgaagtcgcagacgtgggccctgcagcgagctctgaaggacgctgcctccctcctactgaagtcgcagacgtgggccctgcagcgagctctgaaggacgctgcctccctcctgaagtcgcagacgtgggccctgcagcgagctctgaaggacgctgcctccctcctgaagtcgcagacgtgggccctgcagcgagctctgaaggacgctgcctccctcctgaagtcgcagacgtgggccctgcagcgagctctgaaggacgctgcctccctcctactgaagtcgcagacgtgggccctgcagcgagctctgaaggacgctgcctccctcctgaagttgcagacgtgggccctgcagcgagctctgaatgatgctccttcacagctgcttctgtggccgttgttgatcccttcattccatcccttcattccatcccttcattccatccctctctgcttcaagcccagctctgctgtggttccccgaaggaatcatggcagtttgagatttgcgtttccagcacttctgctttaagccagactgcagaggctgacgcccttgggaatcataggtttcctccaccgaggaaactttcaccagaattgtggcctgagtggtggaaggctaaggttaaatataggtatatttgtgaagacggcagatagtggatgtccgctggctgagatggtgatctattctgagatctgggtagtatattctaaacagaacatagcaaaggatcactttctctgtgtctgaatcacagacacagacctcagagctggctgcctcgggagtgccttgctgacggtcgctggagttcgtccatcaggcgactgcggtggggcacggagagcaaccgctgcctggcggagactttgatgtgcggctgaggcctggcgaggaattttatcgtcaggcatcagctgagataggaacgctgtcagtcgagaattttcacattctagaatacgcattcaccccagagtattgactgcaaaccaatgcagcttccacctttggctcaacacaacttaatttctgagatgagtatgattcataggtgtttttgtatttgaaaataaagatgtgtatgattcaggtaatttattttgtagcatgttaaagaaaaaaactgaaagattattttattgagttttagagaactgtgttttggaagtgaaatcacgtctcttttttctttcccagcattgtcgtggaagttctccgaatcctggttttgattggtcagattcttttttcactagcggcggtttttcttttatgtcttgttataaagaagtatctcattggaccctattatcggaagctgcacatggaaagcaaggggaacaaagaaatcctgatcttgggaatatctgcctttatcttcttaatgttaacggtaattctcaaactatgtgttatttatgtaatctgatacataatctctttcactgaaatcttgtgatccattctttacctttccattttaataatggttaaaatatttgaaacatttactagtattttttattttatacacactttcttatactacccatcaaaatataatacagggagctaaacccgtttaactggtttgactcatactcttaagcactttgctaaaatagtgtttgtgagtatttcattaaaaacaaatccgtgggccgggtatagtggctcacacctgtagtcctagcatgtggggaagctgaggcaggagaatcacttgagctcagaagtttgggagcagccaggacaacagagtgagaacccctctgctacaaaaaatagaaaaaccagctggggcgtggtcgcgctcatgtatagaccagctgctggagagactgagctgggaggatggcttgagcccaggaggccaaggctgcagggagctgtggtcgcaccactgcactctagcctgggtgacagagcaagaccccatatcaaaaaaaaacggccgggtgtggtggctcacgcctgtcatcccagcactttgggaggctgaggcgggtggatcacaaggtcaggagatcgagaccatcctggctaacatgatgaaaccccgtctctactaaaagtacaaaaaaaattagctgggtgtggtggcgggcgcctgtagtcccagctactcaggaggctgaggcaggagaatggcgtgaacgcgggaggcggagcttgcagtgagccaagatcgtgccactgcactccagcctgggcgacagagcaagaccccatatcaaaacaaacaaaactgtgatgataaaaagcgccataaacactaatatcaaaccatgctactctgtcttaaattttcaaatagctttgcacctgaaatacaaaattaagtttggaaaaacagtttttaactgtgttgctcacaagctaattaactgtataagttctgccatgtgaaaggttaaaaaataaagttcattttggaaagtgggcttctgcttaccgagacgacagtctttacatgagagtggcgggagatgctcctggacccccatagagtctcagtagtcctgacagcgcacctgggcaccgtcaccattgtcccaacagtgcacctgtgcaccgtcactgttcagcccggcaggtgctcttcctgctgtttatcccagagaaatgaagccgtgttcacacagtagcctgtacacaggtgtttatagcagctttattcgtattagccataaacagtccaaaggtacttcagtgggtaaataaatgttcaacaaactgagctatgtccataccacggaacgccacccagcagtaaaaccaccggcacacacctccgagaactgcgcagagtgggcaggcagcccccaaaggctgcgtactgtgtggttctttttatgtcacatttatgaggcgagaagattctgaagttgaggaaaggctcgtggttcccaggaattgaggatgggcagtctggggaggggctggggatggcactcgctgtcttcgctgtgtctgtatcggcacctgagtgggggtctggggaggggatggggatggcattcgctgtgtttgctgtgtctatatcggcacctgagtcggggtctggggagggactggggatggatggcactcgctgtctttgctgtgtccgtatcagcacctgagtgggatcttgtgctgtaatttggcaagatgttaccattggggaaactaaagggtaatgaggactttgtattactcttaaaactgcaggttaatatataattatctcaaaataaaaagtttccggctgggcgcggtggctcacgcctgtaatcgcagcactttgggaggccgaggtgggtagatcttctgaggtcaggagttcgagaccagcttggccaacatggtgaaaccccgtctctaccaaaaatacaaaaattacctgggcatggtggcgcctgcctgcagtcccagacacttgggaggctgaggcaagagaatcacttgaacccaggaggcagaggcagagttgatagagcaagactgcctcaaaaaaaaaaaagtttccatttaaaaaaagtaaattaacaaaaattgtttcttatatataattgcctgctaatgttttgtaaacctgggaggaaattatgatttgcttctggttgtagtgattttaactatttcaagagtgtgacttatttaaattcttacattgttttatccattccagagtatttttctctttgaaaataactcccagcagaattgtcttatctggacaacttccgtgttgccctcccagtggcttcttccattacagtgactctgcccggctctcaggttttctcgctctctgggcagccctcaccgtgcacctgctgccagctgcttggggtgctgggccttctgcacatctgcacccgatgccacaatgtattctttccactgttcagtcttaggattcgtttccatttagagctgctgcccattctcgtgtttctggaaggtgctttcactgctgatgagcctagtagagtgcctgtggaggtagggttgcagggccacagtaaacaggagctcagccgtagccatgacgtgggtttccccaaagtcgccatgccagcccgtcctgctgctgtgccgtgagcacgccgtgccccacagcctccttgcacttgctccaggagtggagcatctcagggctctgatgggggctccagcgtccacttcccgatggctggtccctcaagccctttccaaagctcagtggcacctgggtgttgtcctggcggtgttcctattaaagcctccaggtcgttattctgtagggtgaggattctcttctcatttgtaggaattattttttatatgccggcagatttttttgtccttcttaaaaatttatttactgagatgaaattcacataaaattcgccattttaatcatttgaaagtcagccttcaaaatgttttgccaccatcaccactacccaattatatccacctccccaaaggaatccccatggcgctcagttctccccccagctcctcgaggccatggagccacttcctggccccgtgggccgctgcttctggccgtgtcgcgtggcggcttccgtgtctggcttccacttagcaccacgtcctccaggcctggccgcgtcgccgtgcgcaccagcacttcgcccctttttatggctgaaaaacattccattccagcatgtcagatatgtttttgcaaatgtcttgcagtttgtgactcgccttttcactctcttaacggtgtcttttgatgaacagaagttcttaatttcagcatcatcgcttatgaattgttttcttcgtggctatcttctgtgttctgtgtgaaagatccgcctgcccctgggtcgtgaagatgctctttactgttgtcagtgagcgttctgctgtgcttttctcattagatcttcagtccacccagaggtgagcttcggttgtgttggaagtgagggagtggatgaggattcattcattcacatgcgtttctgaatgccatgcgttgaaaagacctccttccccccttctatagcatcaccctgtcaaaaaccaagtagccgtgtgtgtgtgcgtgcatgtgcatgtgtgtgttctttgtgcatggcatgtgtacctgtgtgcatgcatgtgtgtgctttgtggtgtgtacatgtatgctttgtggtgtgtgtacatgtgtgtgctttgtggcatgtgtacatgtgtggggtatgctttatgtgatgtgtgtacatgtgcatgcattcgtttgccttgtgtggaatgttacatgtgcatgtatgtgtttgtgcatgcatgtgtgtgctttggtgtggcatgtgtacatgcatgaatgtgtactttatgtggtgtgtggtttgtgtacgtgtgtgtggcatgtgtgcatgcatacatatgtgctttgtgtggtgtgtgtgtggtatgtgttcgtgtgtgtctgctttgtgtgtggtgtgtgtacccgtggcacatgtgcgtgtgtgtgtgtgtgcacatgcccctctgactctgcccacctgccctcggctgcaccgcagcttgatctccgtgtttgggtccagctttgttctgtgctagggtcgtcttggctctattcgtgctctttccaaattccactcgagtttttagattcagctggtcagtttcacacacatgagtctcttggcgctcctgtgcgtctgttggccaggggagggagcatccgccgctccgccgtgctgagcccttggcgctgtcatctgagtcttccgtctttcgtgggtctctgtgtcttgcagtgtcaggtgcaggccttcttttgggttgaatcctcaggatgtgatgtttttgttgccattataaatcgtagttctttacaagtttcttttcttttcgtctgatgctgctatcgtctacagttttgttttctcaagataaaaatcatctttcaggttggccggtgtcagccgtgcgtcatccggaaggctgccataagcctgcgtttcgcagagctgcgctgaggctcccgtgtcgcggccgtccggccggcgcgctgatgtggctgcaaacctgggtatcagatcagccgccgtggacacgccgatgcttctcgctggcttcgtgccctcccggggctgttgcttgtcgtcctgtcgctttctctctgctttgaggctggtagtgggaatgcgtttctaacactcccaccgggctattctgattcaaggtcaagaaaatgtatcacaaatatttaaaacagttggaaaatattctcattcaaaaatttcagcgcaatctgtatggatatttgtttcaaatatttttaaacaatttttttctcccagtaaggttaattcaactaatagcagcctccacatgtcacctctcagacccagcagacgacccaggaccagacacacacacgctctgtttgtgcagcttctgtgttttgtcgtggtggctctgctgggtctcggggtggccttgggatgggggtgaccctggtgcactgtggggtctcatgtaaagctgcgtcctgcctctctcaggtcacggagctgctggacgtctccatggagctgggctgtttcctggctggagcgctcgtctcctctcagggccccgtggtcaccgaggagatcgccacctccatcgaacccatccgcgacttcctggccatcgttttcttcgcctccataggtaatcttccttctttacattatgattgtgttggttaaacgtatgcagagtggttctgtaatatgtttacgtgcatatatatttatatagcaaaaatggttatcttaaaaattaagtgtattcagcatatttcaatttggattgctagtagccagaaactgttttctgctttatagagcgcagagaaatcttattttattatactgtttcttctgtccagcttttcctttaggctcagggtacgtgtgtgggtctgtgacacgggtagtgagtgtcacagggctttggtgtacagatgattttgccacccaggtaataagcataggaccctcggcagtgttttaatcctcaccctcctcctcccagcctccaccttgcccaggccccagtgtctcttgctcccgtctttgtgtccacgtgtactcggtgttgagctcccacttgtaagtgagaacatgtggtatctggtgctctgttctggtgttaattccctgaggagaacggcctccagctgcatccgtgttgctgcaaaggacgtgatttcattctgttacggttgcgtaacattccctgatgtatatgtaccacattttctttatctggtccacggttgatggacagtgggatccttggaattcacaatctgggccgattctgtgtctttgctgctgtgaatggcgcggtgatgaacgtgtgagtgcgtgtgtctttatggcagaaggacgtatgttcctttgggcgcaaactcagcagtgggattgctgggtcgaatggtaattctgtttgcagttatttgagaaatctccagactttccatcgcggctaaactaatttactgtcctaccaatggtgtctaagtgttgccgtttctccacaacctcgccagcgtctgttgccttttgactttttagaatcgccattctgactggtgtgagatggtatctcattgtggttttgatttgcgtttctctaatgaccagtgatgttgagcattgtttccacatacgtgttgtgttggccgtgtgaatgtcttttgagaagggtctgttcctgtccttccctatttcctaatggggctgctttttgcttgcagatttgtttaagttcctgatagattatagatataagacctttgtcaggtccatagtttgcaagtattctctcgcattcgtaggctgtctgccctgctgagagctgctttgctgggcggaagctccttggctcacttggtctcacttgtcagtttgttaccgttgcgattgcgtttgtagtcttcttcatgaaacctttgccaaggccaacgttcagaggttttcttacagggattttacagggttcggctttacatttaagtttttgttacaccttgacttgatttttgtatgtggtgtcaggagggggtccggtttcagttttctgcatgtggctggccagcgatcccagcactgtttgttgagtggggagtcctttccctggtgcttgttatcgtaggctttgtggaagagctgatggctgtgggtgtgcggcctgatttctaggtcttctgcctgtcccgatggcttgtgtgtttctgtgccagtgccatactgttctggttgctgtagcctgtgctagagtttggagtcaggtggcctccggtgcctccagctttgttccttttcttggagttgctttggctgttggggctctttattctgcaggaggaagattatgccacgcacacgattgctgatcactgccatgctttattaccgccgagatgtgtggatgatacgcacacgattgctgatcactgccatgctttattaccgctgagttgtgtggatgccatgcacacgattgctgatcactgccatgctttattactgcccagatgtgtggatgatacgcacacgatcgctgatcactgccatgctttaataccgccgagatatgtggatgatacgcacacgatcgctgatcactgccatgctttattaccgccgagatgtgtggatgatacgcacacgattgctgatcactgccatgctttattaccgctgagttgtgtgggtgccatgcacacgattgctgatgactgccatgctttattaccgtccagatgtgtggatgatacgcacacgattgctgatcactgccatgctttattaccgccgagatgtgtggatgatacgcacacgatcgctgatcactgccatgctttattaccgccgagatgtgtggatgatacgcacacgatcgctgatcactgccatgctttattaccgccgagatgtgtggatgatacgcacacgatcgctgatcactgccatgctttattaccgccgagatgtgtggatgatacgcacacgatcgctgatcactgccatgctttattaccgccgagatgtgtggatgatacgcacacgatcgctgatcactgccatgctttattaccgccgagatgtgtggatgatacgcacacggtcgctgatcactgccatgctttattaccgccgagatgtgtggatgatacgcacacggtcgctgatcactgccatgctttattaccgccgagatgtgtggatgatacgcacacggtcgctgatcactgccatgctttattaccgccgagatgtgtggatgatacgcacacggtcgctgatcactgccatgctttattaccgccgagatgtgtggatgatacgcacacggtcgctgatcactgccatgctttattaccgccgagatgtgtggatgatacgcacacggtcgctgatcactgccatgctttattaccgccgagatgtgtggatgatacgcacacggtcgctgatcactgccatgctttattaccgccgagatgtgtggatgatacgcacacggtcgctgatcactgccatgctttattaccgccgagatgtgtgctctcagtgggcattgaaagcggccagatcaccttcaggggagaatgcgtgttattctcatcacctcctcatcacaggcactggtgcccacacagggcaagtggtgggagctcagggtcagccacagaaactaacatgtcagtggcaaatttggaggaaatactaactttgacacagaaagtttaaactgagcacagtgagatgggccgctctggaaatctcccttgtcagggtctgtggagcagcctggagtagtgatttgagagggtggaatcacaagggatctggtgtcgggccacatccctggcagctgtccactcagcacagggtctgagatgccctgtgctttacaggggccacagactcagcacaacctcaaccaaacggaaaattcaaaagctgattctgaattttatgtggaaatttgaaggccataaatagccgaggcagtcctgaaagcagcacagagttgggaggcttgggccccttgtcgcaggtgaaataggaccattcagcaggggcttcgtgacctcctgaccccaatgcagcctcacgagtcagtgtgtcccgggagagcctctcggctgccatttgatccccttgctctgcacccccggccctccgtgtgtgtgacccccacctcctccccctgcctcccgccctacctctgtctgtgacccccacctcctccccctgcccccagccctccctgtccgtgaccacctcctccccgtgccccccgccctacctctgtccggaccccacctcctccccctgcccctcgccctccctctgtccgtgaccacctcctccccctgcgcccctaccctccctgtgtgttacccccacctcctctccctgcccccactctgtccgtgacccccacctcctccccctgcccccgccctccctctgtgggtgactccacttcctccccctgccccccgccctccctgtccgtgaccccacctcctccccctgccctccctctgtccatgacccccacctcctccccctgccctccccctgcccatgacccccacctcctccccctgcccatgacccccacctcctccccctccccccgccctccatctgtgtgtgacccccacttcctccccccgtgcccccaacctcgctcctggtgactcctcctcagcaagctaaataaactgatttcctgatcttcctttcacttcttttagacgaggactaataaaatggatcaggcctgacctgatttttcccacattgctccagccccaggctgccctggccgtggcgtgtgacctggtgtcttgtccgccggggctttgttgagtgtgcatgtctgagagctcctgttaaaaatctaaaatttcataaatatgtgatttacacagacatgcttgccttgtcttcaaactagagttcttttatgttgagaaccctttctattcacatcattctacgtgtttttgctctagtttttggtactgagtatatcagggaattcaagttaatttttctgccatctgagaacttgtttatagctcacttttttctctaactcggccaggaccttatttttgttctggagtccaggcagcacgtagacggcatctgcccgcttcagacggcacctttgcctctgtgcgtgggacccgatatccacttcagggcggcagaaacccgggtggagctcccagttccaacagatgtgtccgggctgcctgcccggtgcagccgcagagactcctctgcaggtcagccacagccacagccacagccacctgcaggctggcaggcgtcgctctcaggttcccgccccgaggctcgtgcccgctgggtgaggcccaggctgtgcttctgagtcgaggctgcatctgaagggtgtgaaaggggcagggcaatctttaggccctgagtgaggaagggctgctgcgccgaaggatggcccagaaggcaccacagagcaaggtcggggtctcgtggacggcacgtggcagtgtggctccggcccaggtttcggagcaggtggtcttcccactagatgagggttcgccagctgcggcccaaggcctgctcaccacctgcctttgtaaatgcagctctatggaaacagccacgcttgctcatttactctttatcagcagccgctgttgggctacttattagctcgggccatcaacaaaatcctccagaccgggcactcaaacagtagatgattatctctcaccgttgtgggggctggaagtccaagatccaggtgtctggcgagggccatgcctgctccacagatggtgcctcctggctgtgtcatccgtggctcagccgccatggcctgcgcggagagattaggttctcacgcatgtggcctcattttgccttaagtagctcccgcagaccctgtctccagatacagccacactggggctggagcctgaacgtaggagttcgcaggacacagctcagtccacagcaggtgttcgtccataaagcacgaagtgttttccatcttggcctttgtggaagatgcctgcccagctccctaattcctagtcactccagctttatcgacaatgtcagtcattgggtgtgtcttgtgaaatttacagcaaggatttcatcctcttctcatgttccccgcattcagaagcaggcagctggctctgggacagtgctgggagctgccttgctgttgggcgtccctccctggtggatgcaggtgtgcgcccccgccagcctcgctcaccttcacgccatggcctggtgcctgtgcaggcagcgtccttagcagccctgaaccaggcacatacctcacatggcaaatttcctttactcagcctccaaatccacattcacagatgaggaaactgaggcacacagagattgaaacatcgagctgggtccacagtgaatgtggtgctcctgggtgctgtggagccggtggggcccaggaacccaagacttgagcccagagcccacatagtttctcagtgctacaccaagtataggtttgatgtttgttttgagaataaatgaccctgcatagaaaagtcagcatagctcattaaagaaattgaagggaggtttcctgtctctcattttcattgctgtttctgggactgactggaatgcattaggctccataattattggctcactccccccacccccactccgcccccagggccaggaactcttagctcaggcaggggtggagtgagccatgttcccagggcagccctgccttgaaggagcttgcactgagctcaggcaggggtggagtgagccatgtccccagggcagccctgccttgaaggagcttgcagcccagggttgggtggggggcagatgcagggacacagctgtccagctcagctgagagcacaggagcctccggggcatcagcgactggccggggtgagggatgccaccaggtgcagaggtggaggctcagggcgtgctggggaggaagagaggcttgtggaaaagtccagaggtaggagatgggaaggaagcctggaatctctggaacaggacattcccaagcaggaaggaagccagtggggctggagatgaaggggaggctttccaccgggcagcagcggggagaaaacgcagcccggaacgcccaaggtggggagccctgggtacctgtgtggccgcgatgtgaggccccctttggggagaggtgggagcgtcccctgtgccatacactgttgtgagcttgtctcagttgtgccggcgtggacatagggccgtgacggtagtgacttcctagacaccagtgtggccaaaggcagcctggaccgggcattgcagcagggcagaggcacagacatcctgaggggaagcaggactggggccggggctcagctgacagctggggagagagggaggtggaccccaggccgccgtggggctggggctgatgagggggacacagtggggccaggctggtggccggggtaggaggggccgtggggagcactgggagtgggcatggagggggcagctctgagacccagacccaggaggaggggccgtggctagaagactgggtggccagagaaggcagccctcaagcgcaagagaaccccgggtcgtggcaagagaaaaaaggccagtgtttacatttgtgtttctgggtcaggtagagacagtggtttgtgaacggcagaaaggtcatgggcctgctccgtgcacctaaccctggggtctgggtccttccgatcaagaggaggcctctgggctgccgggcttcctccgagggctgacatgcatcactgggcagctccaggctgtggctggagagctgagcccaagctcaggtccagccccagcaccgccggcccctctgcgtcactcggcagcacagcaggactgagcagcccagtccgagagtcctgagagcagagagaagaaatatgtggagacaacgtttcccattgtttttaaaaatgtgtgagccaaataaaggaaggaaaggaacattgaccacaggcgtcctgtgagcgtggcactcctgggcactcctgggcactgtggggctgtgggctctgggatcatctgcacctcagctggaatatttcctgaaggagtgccagaccgagtgccgcctctgtgtgttttgctgtgtcctctgcagttgaggcctgttgcagggagtggagctgggatcccaccacatcagacaggtcatcccagggcaggcttttccccggttcgctcaggaaaggggcggctttttagcatttgctgttgctttcacacgtgcacttgggaggatttaggattttaattcctgtattgaagcaagtgacacactgaagttgtgagaaatagtgtgcgctgggggaggctgtcctgcggtcgtaacgtgtctgtcctgttcccaacagggctccacgtgttccccacgtttgtggcgtacgagctcacggtgctggtgttcctcaccttgtcagtggtggtgatgaaggtatggactggaagggtccacgcccctcgcagtttgcaggctcagcatagccctccctgtggccctggtttccagtggggcccacatcgggcctgcagagccggccctgctcctcatctcggaggaggcccactgggccactggaccccgggggaggcagatgtagacgaggctgggcggtctgggtttgtccatgtgatcgattgtttcagaattgagcgtgtttaaaggggggaactaaccttttgggaccctcaggacgggccttggctgcagtccagcccgtcctcctctgacagatgcagacatgctttttaaagactggaaaatggtgtaggcactttctgtctgtcccccgtgactgccagtgatcgagctgcctgtgtccacatttaattgaaggtgtgatgacctagtcagcaaccagtggctttctggctcatagacagtgacttaggtcatttccgttttaaggagccagaagctgtgatgatcgttggaccactccaccagctcttagctactcggcccaaagacacaccaccagctcttagctgctcggcccagagacacacatctctctgtattaaaaagaaatttccaccttgagtaccccacgcttaatgctattaatctagtttggttggggcgggggcgggggggcttgggcaaggcttattattttctgctaatgaaccgaaaggcttaattttgccttattgttcagtgtggattatttaagaggttttgcgtgtatttggtgccttcgggtgtttggagtgcttctgtgcctttccctacttgacgtgttattcagggaccatcgcagcgtgcctgtggctcgtctgggttctctgtttcgtgtgtgtttaactctgtgtgggtccagtcttcagcagtgacgtaatgaaccgctcttgcagtttctcctggcggcgctggtcctgtctctcattctgccgaggagcagccagtacatcaagtggatcgtctctgcggggcttgcccaggtcagcgagttttcctttgtcctggggagccgggcgcgaagagcgggcgtcatctctcgggaggtgagtggcttccccccgcggagcgcttctcgggcggcacgggctgcactctgggtttgagtcgggtgtggcgaaggcggctcggcagcacagcggggcctgggggcagggtcctcctccaggggggcacgcagaggcctggctgctctctgctcatccagcatgtggcgttttcagaggaaagttgcagttagtactgcttgaactattgcattaaccttttacaacaagtctaattaaatgtcagatatttcttctgaaagaaaactaactttttaaagctgaactgccagtgtgcacataagtagcaccccagaaacgtgaaatacccgtaatggcagtgtgcccggagagctgggtggaggttcctgtggacactgagatggccctgggcattcggactcacggccttgtctccttgcattgtgtaagtgtgaggcgggtagaagtccaggtgttgagtgcagtggaagtaattgctgaaaggtagaattgcttacaggaagctccacctgaggcctgacccaaggccgcatccccagggtcagggaagctgtggggcaggctggcttgttactgtggcccggggttggccttcaggcaaacacaggctaaagctgttatcctgtggcccatcaggactaaccatgcatcactgatcttgaaatcacagtctctcctacatcccaatgtcctcagcttctggctgtacttccatgtgctttaaagagatagtagtgaatttatgatgtgcaggcgtccctcccagcactcggcatgaccgcgcttagcttccatcccccacccccccgtgcaggcatccctcccagcactcagcgtgactgtgctcagcctcaggactctagctttgcaggcgtccctcccagctcagtgagaccagccctgtgctttcctgttgcaggtgctagtcctgacagtctctgtgacccgctctgcactttgctgttgcaggtgtacctccttatactgagtgtgaccacgctcagcctcttgctcgccccggtgctgtggagagctgcaatcacgaggtgtgtgcccagaccggagagacggtccagcctctgatggctcggagatgatggaccgtggaagggaagcgtctgtggggagtgagcgcttagatggccagcagctgctccttctgggaagctcgcaccttggcaacagaacagccctctagcagagcgtcagtgcagtcgtgttatcccggcttttacagaatattcttgtcctattttagaattttccggagtagtttatttgcagtctgttgattatgtgcagtagacccgggacactgcgttttaccgatcaccttgaatgtggtgcctggatgtgccttttttttttttccctgaaattattattaattttctattgtgagttcatcagttcatagtttttttagtaaagaagcaaaattaaaaggcttttaaaaatgtacaacttcagaattataatctgttagtcaaatatttgttattaaacatttctgtaatatgaagttgtaatcctggccgtgagcttggaagcttacttttgattcttaaagcctatgttttctaaaatgagacaaatacggatgtctatttgccttttattgtaacttttaaatgaaataatttcatgtcaatttctattagatatatcacttaaaatatttggttttaaatcacaagaatatgtattctttaataaagataatttatgatcatggtataattaattgaaatttattaaaatctgtttttattaa

SEQ ID NO: 31 - DNA, 62490 bp, Homo sapiens
attggaggagcgctcccactcccaagaggccacgcgtagacggggcgcttcatgcggaagtcagcggcgtccggtcccagcctcctctgggagcgggcagttggcgaccctgcactgacccgcgtccctccgtcccgagcccgcgcgccctcagagggtgcccggacaggtaaatggagtggggtgcgcctgcgggaggcggggagagaactgcggagggagggcggaggtgtcgatggaaaggtgctggggtggagcgaggaggcagtgcaggggtgacttgggcttctctggtgtcgacagttccagttgtcgggcaggaccagttttggcgaggtgcgtcttatgccactggaaaggcctcgagttaaagagtgtcagaatgcgtcacttaagctgtcattacaggagggaaaaaatgttaactttctctcagtttgtattctacaagacctttctgtagcatttaaatctcttgagatcgccagagtcttctaaaaactctctacgtccttgttcgatgacgtcactttctgcttcaccttctacttctggctgtttatgctccttcgtgggttcctagccccttattcgcccttcctccactgctcagtattgacagtccccttcttcctctgttcagggactgtatttctgcctagacccgtttcctcagcttcagacctgtttggtgtttttattaatggccaatgtttatcaaattctgactgcgtactttggtaaatgctttacatctccgtctcccataactctcacaaccaaccaactgtcttcatttggcctcattaattgctttcaactacctgtatctccattatccctcccttgatcccagaggatacagtcatgtttaggatattaattccctttgaatacctgtggctgagagcagatccattcatacatttaacaaatatttattgaacggctggtatatgcttgacactcttttaagtgcaggggatacagctgtaaacaagacttaggaggttgctactctcaggaacttacatgtttgtgtctagaggggaaaacaggaataatcaggattatgttatatattggttaatgcaaaataaaacaggtggttgacttgaaaggatgggatcctatcctaagaaagtcagaggtcagggcatcgtccagaaagaatagttgtaataccaacaggaataatcttgatctgtaacatgacttttcgtaaacacctcttcttttcccctgtctaagcagtgtttattcttcattcttctatctcctccaaggttattgcatcagaattcatggtttatctgtagttggtttattccttctaagacccagagagaagagtgggggattggattactattagctcaactgctttatcttacttagaaagatagtttggttgtgaaaatattattcttaccaggtccttctgaatataaagttatctaccatttatagtatattttaaaaccaaaatatgctcaatgttcactcatttattcaacagatatttgagggaatattagatggtaggcactgtgctgagcactgggaaaatagggtaaaatagacactttgacctctcttccaaggagaaataatcctaacagtatactgaggaaatttctaaggcataggctgacacctgcattcctgttcttcatccgaggtgagatcatcacaaaacattaagacatttcctgagcaattgcggacattcttagattattcacttattatactttattgcatttatttatatctgtcttccccattgttctatggctccctcaagtataggagtcccttcttccttaactttatacctctagtgtctactttgactgtcatatagtaacccaccagtatatacgtgttgaactgaaatagactccctatttgatcaaatttaaatgacatgatttatacaaggccttctttatgtaaggccatcagccgtattcctcaaccttctcattcaccaaaggtggaccattccatcttatcaggctagcttatgtaccttctttaccttgctctcagtgccttctcttcttccatccatccctcctaaaaggatctcccatctcttcccaagcaccttgtgtacctccctccattaatttggtgggccagttaatttaataatctgctcatgatacaggggtggaaaaaaattaatttcctttttatatttcctatgaaacattctgccaatgaactcttgcaagaattaatgtaatagatcctactgcaataatataatgatacagaatactttttaaagattttgcattgactatcaccatgtgctatgtaatgagttaattctactactttatttgaacagttgtataacctctgttcacacagcatgttttggtatcatttggtttctacttggtagaaacacatctttttttttttttttttttttgagacggagtctcactccgttgcctgggctggagtgcagcggcgcgatctcggctcactgcaacctccgcctcccaggttcaagcaattctcctgcctcagccccctgagtagctgggattacaggtgcacaccaccacgcctgactaatttttttttgtatttttagtagagacgggatttcaccatttttggtcaggctggtctcgaactcctgacctcaggtgatccacctcggcctcccaaagtgctgggattacaggcatgagccaccatgcccggccaagaaacacatctttgagtattactttctcagcctgaggtaatttaagtggtaatgttattctgccacattgtcattttcaggatgtcagataaaagcctcaagtattaaaattaaacttttttttttcttttgagacagagttttgctcttgttacccaggctggagtgcaatggcatgatcttggctcacctcagcctccacttcccgggttcaagcgattctcctgcctcagcctcccaagtagctggaattacaggcgtgcgccaccacgcctggctaattttgtatttttagtagaaacggggtttctccatgttggtcaggctggtctcgaactcctgaccttgggtgatccgcccgcctcagcctcccaaagtgctgggattacaggcatgaaccactgcgcccagccaaaattaaagtcttattccatgcaggtatctttcaattgtaaatcattactgcaaaagacaaattttgtctttataactgattaaaaacaacagcagtacaagagtgcttgagtcatgactgtcgtgaatttaggatgtgccaacctaagatcagccagatacttctaagatgtaaacattaagcattgttattttaggtgatttattgacacctatttctttatagacaggaatgcaagtgcagcactgaattgtgtgccattgctcgtttataagatacacatgtagatgatccagaatattcttatacatttttcagtgttatcaaaatacaaatgcagaattaaaagatttctcaaaacacatggacttggcctttccccttactcagttacctgaaactgtcttcagcctctacttgaagatgcttctgctgaggaggagcattttcatcattgctgttctatgttattaccaaattttttaatacaggcaatttcttacttacaaatggatatattctaaaagtactgttgtaagcttattgtttggaacgctggatgcatttccttctataaataatgctatccatgacatttacactgttatgccaaccagtatcattttattaacttttaatttagtggactcgaagaccttccccacaatttacaataattcctctattaaaaaactgcatttataattctcatttgaattcccttatagcatatctttttttagaaacccaacaactagaacaaaaatatcctttctttagtcccttaacatagtaaaaacaggcttttctaactccaaactgttgtgggtgacccttctagcccttagctctaaggacagtcctccaatatgagcaaggaaaacgaagggacagaggttttagagagggaggcaagttgggtgatatgagtatctggaaagggaagggtaggatttatttgggatgaacagtgagtttctaaaatggaagtttgcattgcttgtcagccttttggctaagatcaggtgtagtatcagtttaaaatgggggtttgttgtgggttgaattgtgtcctccagaaagctgtgttgaagtcctaacccgtggtacctgtgaatgggatcttatttagaaataggatctttgcagatgtaattaagatgtaattgaaaatggggtcatactggagtagagtgggccctttatccaatatgactggcatccatataaaagaagagagacagagagaatgcagtgtgaagacacagatacagagaacaccatgtgactacagaggtaaagattgaagtgctgcacctccaagccaaggaacaccaaggattgccaccaaactatcagaagctagaaagagataaggaaagattctcttctacaggtttcagagggagcataaccctgccaacatcttgattttggacttttaaccctcagaactggtaggcgatacatttctgttgttttaagcaaccaagtttttggtactttattactgcagctacaagaaactaatacaggattcttagcaggaataaagtagaattgggatggtggctgtgggaccaagtggggagtgaataggagaacaaagaggaacagtgttgatatggggctttcctttatgttgcattatctttttttcttcccttctctctctggcttatcttttcattctttttcttcttggatcttatctttatatagcactttatggtttattaggcatttacatactgctaataattagcagagccaggttttctaacttcaagtgcagtgttcattgtgccacaattgtttctgttatcccaatactcatcaagacgttatggattctattacaagacacttacaatgggggcaggtaagacttcataggtgggatttttagcagtatagcagagaggaaggaattcctattagtgacatctggaaggaaagtaaagtttctgttgctatgtacccactgtttaacagtcatttttaagttggggactgcttttattggaagaaacactacttgcgtataacttatattcattgttcctagttatattctgaataatgtgctccctgttccaggtgactgtactttatataaactcaaaaactattgtcatgttccctctaagtcctctctttctcatgttacatatctctagttcctccagccagtcttcagatgacacaatctccatgtctctcacccatattgtattgcctcccttttgtctagtcgttaaatattctacccagaattgaattcagtattttacatatgttctaaccagcacagagtgtaatgggactagtacttaaacaggtcaagacaccctatttcttaatgtactttgagattatgtaagcatttttaagcaatatcgcataccgttggttcataatgaacttacagtccactgaaacactagatctttttgtattaattgttgccaaggtcaagtttccttctgaacctgcacagggactgaggctgctgctactttttcatctctctgttccagggaccatatgatttcttatctctgtttctctttgtgtttttgttcctctctactgtgtctctttgaccctaagcaatgacctccttccttgttataaaatttcactgattgttttacagtcttcattctctttctttcctttcggcttctgggccaccacacttttggctttcccatttggtcctcctcagtctttgtgagtctctatttatctacctttccctcaactgttggttgtgctttgggttttatctttggcactattttttttttctgtatgcaatatatcttcagcaaataaatcatgtttaaaatggcagatctaactgagctcatctgggaataaaagggcacagaatcagtcccggaggaaagtcgacatttagaggtcaggtagaggaggaagagtcagcaagaagacaaaaagagcagccagagatgtaggagcatttcaagaaggagggtcggtcagcagtgttgactgtgcctaagaggtcaagtaaggtaagaatagagaagcaaccactgtattttgcaatatagaggctgttggtgaccttaggaagcatggttttctggagttttaagggcaaaagctggattatagtaagtagaagagttgaaaggaggcagaggagcagagataatgcgtaacgatgctttgaagaaacagaacagggccaggtacggtggctcatgcctgtaatcccagcactttgggaggccaaggcaggtggatcacttgagcccgggagttcaagaccagcctgggtgacatggtgaaaccctgtctgtacaaaaaaaaatacaaaaatagccggacatggtggcacacacctgtagtcccagatactccagaggctgaggtaggaggatcacttgagcctgataagtggaggctgtagtgagccaagattgtgccactgcactctagcctggagcttgggtgacagagcaagaccctgtctcaaaaaaaaaaaaaaaagaaaagaaacagaacagtaggatccacagttagggaggctttaggatcaagggagataaagtataagacagcaatttggaaactataacttactgcatatgtgtaaggagaattctagaaagaagatggttgagatcacaaccctggggaacaacttcagttagagagtaggaatgaaaaagagatccccaaaaggcattcagcccaagagacagatgagcaccttctgctctgtgtgctgtccttccatgctgggattgcaataaggaatctgcacattccttgatctcaaacagtttatagtttgctgttgtgtttcacaaagtatgtttgtgtgaatcacctgcatccagacagacttgtattaaatacagattccagggccctacctcaggcctacggaatcagaatttcaggaagtgatgccaagagtttgaatttttagcaaatgactcatactctgccacacaagatgattcgtattcccactacagtttgagaaccactggtatgttgggtactgagcatgttaacaaataagagtaggtttaacagttaatcgaagactagacaaggatttgttcatctctttttatgtttatgccattaaataagagaagctgggcttgttaggtgggaaataatagcacatattcataggcagacataaggaaaataatcttaaactcatgccatatggttttagtaatgttttgtttatgaagggtcttaccattcctttcttgtggaagctttgagttattttcactttgtttctgttatggataatgcctttatactggcagtgtacagtaaaaggctaagattatgagctctagaaccatactgcctaggtttaaattgcagctccacacttactagctctgtaatttgggggaaattatttaagtcatctgtgcttcagttttctcatctataatagaagtatcataatagtgtataatctcattgagttgtgaggattaaatggattaataattataaagtatttaaaatggtacctggcacatagtaaacaataaatataggctatttttattgttaatagttatctttgtgaatctagagtcttaacttctgttgaactatttctctaggataaattttcaggatggaatttctacattaaagaatgaagacatctttatgtccctttgctatctatagtcattgcttttcaaaagggtgatatctgtttgtgctataataatttgtaaatgcaagctatcaatggtgtgtgtgtgtgtgtatgtgttttgtatgtctctttatatgaatgcatacaagcatggcttaggttgtaagtttgtagaaaactttgaccttctttttaagcctgctcttaagtctgttgttaagtttcatgttatagtgcctcgttagatactatctccaggtagtatgttgataaatgatagtaagttacctttgaaagattatgtcaaagaaatattctaaatctgtgtctttttccttttgatagactgaagccatggcgattctttttgctgttgttgccagggggaccactatccttgccaaacatgcttggtgtggaggaaacttcctggaggtgacagagcagattctggctaagataccttctgaaaataacaaactaacgtactcacatggcaagtgagttctgttctgcatgtggtaagggatgaaagaagggaattctgttactctaatcagaacggtagaaaagtagaaaacaagcttctaggtacataatttgaataagctgacagaatagtaaccttcaccaacttagaaaatatatctggttttgttacttataaatttaacttgtaattattttattctattattgaagtgatattttattttgaagaaagatgaaatgttaaatgtaaaaatgactttgctctagagctgtgtgatatgtgaaaataattcagataagatagataatgttcctttgttcattctttcagtaaatatttactgagcacttaactattgccaggcactttgcttggtgctggggatataacaagatatgtggtatttgccctcataagggttatagtttaatgagggagaaagtcaaatccacgatgtcaagggttggggggatgggaagtagtagataggagaatggtattccaagtagaaggaacagcaggtagagaagtatggaggcatgagatcatagggcgggcatatttagggaactgcagactgttctctgtgactggtgcccaggatggtgaaaataaagctagagagatgggtagaagaaaagtcatgtagggccttgtaggccatattaagagcttggactttaccttgtgggcagtggaaaggcattgaaggttttcagccagggtgtgacagagtcaggtttgttttatttatttatttatttatttatttagaaacagagtctcactctgtcacccaggctggagtgcagtggtgcgatcttggctcactgcaacctccatctcccaggttcagatgattctcgtgccttagcctcctgagtagctgggattacaggcgtgcaccaccatgcccagctaatttttgtatttttagtagagttggggtttcaccatgttggccaggcttgtctcaagctcctgacctcaggtgattcgcctgccttggcctcccaaagcgttgggattacaggcgtgagccactgcccctggcccttcagtcagtttttgctttagaaagatcactctggtggcttattagagtggccatagttgggaaatcttagtaattagttttaaaaagtgcctcaaccttccccgttggcacttaaaaatcttttcttacttaacccagccttacttccttagttcttatctcagaatgaggtccttattactttctatggctaaccccttatacagtttaaggtgtactctaagctactatgagagagacccccaagatacagtattaattttaatgagatagtccagagatgagtggtttgggatgttggggtggctctgccatttccaattccctaattcccaaagcaattagtgctttccacttctggccaaggcagctcctttggtgcttgttatatcccagtgcttgcccagtaattttaaaggcagggcccagaagtggcctgatattgttgagaagcttccacttacatcttactgttcactacacagtcatgtagctagcatagctagaagggaggccaggaattgtcatctctggctatgtagtcgtaggctcaactaaaactctgttactctggaggaagttataggatatcaggggatgacttgcagtcttccagtctactctcctggccacccagatatttcagtgaacctttcttcccaaacatagaatacgcctcttctctgagagaggtagctccaaagacctatctagtcactgtgtttggctccaagtccagcatgtctaggtggtacacagtcctatccatcaggccctggtgtggctcctgtggtccactgaccataaagtaaaagataagtcatatgttttccctgctttcccagcctaacccagtagacaatggtgaaataagaaaaggatcatcacagtgagagttacaaactcccatttggaaaagggaagaatgagaaacatgtagaagtcattgctttccagtaatgatcaaataattgcctcacacaatttcaaagactccctattctgaccaggaagtggttagtggttctgctttcttggaggaactccctcaccctttttccctgactcctggctttgttctccaggaagtttttcctttctggccacatccaaaatggtagttagagagtatatcatctttgggaattgtacccattttgtagtcctcttgctgccagcgtaggtttgtgggcctagaggttaggggttaaataatcttagcttcttatgattttggctttatactttctctaaaaatgtattagacttacagtctttgtgtttctaggcagttcctgggaaaatgtccagggaaagcacatgtagtcgtccttttagaggcaagactgggaaatagggcatatatcttccactcatgtattatgagccagaatttagtcacagccatatgtagctttaagagagtatagaatatgtaatccaattaaaatgcagttatagtagaaggagatgttatctgtctgccatgcctctctgcctgtgtctctgatctagctgtgttatttcgagctttggtacctttttttcatgcttttgttatcttctaggaatgctgttctccccctaagcctccttgtaaacttttgctcactttacaggtcccaagcgaaatactttcttaatttgtactttaatgcttctaaaagggcagttctgatcatattccttccttcaacagatactgtctgccctcaaggtaaaattccttaacgggacttggaatattcttcaagatctgccactttttccttctgtgggctcatcttttactactttagtcctcagttttgctttccagccatacttcatacttagccatttacaattcaatgctaggttctttctctcttcctagcctttgcaatagctgttaccttttactggaatatatttatctacttaattttttaaaaatctcactttgtgtgcctgagcttagatgtttccttttccagaaacccctgaacattaacactgagtcaggcaccgcaatcagacactctttttatgtgtctacatagcatctagtttgttcatattgtaacacttttcacactgtattattattattattattattattattgagacgaagtttcgcttttgttgcccaggctggagtgcaatggcgcaatctcagctcaccgcaacctccacttcctgggttcaagtgattatcctgcctcagcctcccgagtaactgggatgacaggcgtgtgccaccacgcctggctaatttttgtatttttagtagagatggggtttcaccatgttggccaggcaggtctcgaactcctgacctcaggcaatccgcccgcctcggcctcccaaagtgctgggattacaggcatgagccaccgtgcctggcctcagactgtattataattgaaatgattgtttatttctgtaccctgactgtaggcttcttgatggcagggatcataccttgttaccttttgtggcctgtgcaccaagtgacttacaagtctggtttaggagaaacaaattttatggggaaagtgatgactttcattctgggcatgtcatgtttaagctgtctatggtatgtccagttggatatgtctagtagacagtagtgtaggtagtcctggagctcaggagataggtcagatggagatttgggaatcattggcataattgtggtagctgaaaacaaactacaacaaaacatgagagtgcatgctgccctccagggagtaagtaagtgtgaaaaaagcaggaggctaaggaagctagaaaacgttagtgtagagggaaagggactatgatataaaccaggtatattagcctgcttgggctgctataacaaaataccatagactgagtggcttgaacaacagatacttgtttctcacagttctggagactgcgtgaggtgcccgctaattcagttcttgatgagggccttcttcctggctggcagatggccaccttcttgctgtgttctcaggtggtggaaagagagtgatctttttcttcctcttttttaaagccactaatcccatcacgaggaccccaccctcatgacctcatctaatcttaagtgcctcccaaaggccttgtctccaaatatagtcacactgtaacatatgaattttgaaaggacacagttcagtctatagcaccaggcaagcctgatgtcaagaaatctagtgaagataaaacactttccaaaaggaagtggtcaacactatcatatgtttcagagagagccactggatatggcaatgtggaagtcattggtggaaatggtgcaaatagttttagagtattggaggaaaagattttgcctgagttcctgtatctccttgtaattcatgtcagtcctctgtgaacattaatataattcaacaggtacccctatctatccacttgcccaaggtacaaatgtgggaggcaaaatttagttaacctgtctcacgccagtcaccaagttctataaatgctgcctcctatctcttctctgtccctttttctttattacccattctactttagtttatttccctcctcatttcttacccggtatactgcagtagtctcctgtctggtcctcctttgagtcagttttccgcactctagccaatgtgtcctttgttttttttttttttttttttttaatgtgtcctttttaaagtgcaaatctgatcacaccctccctaggctaaaacttttggatgtttattcattattcttaggataatgcacagtgtggtttataaagtcttgtataacctggtttttgcttacttctccagtcttgtctgtccagataattcactttttcttcacattctgtactctagtcatgtgagccaattttactttcctaaatctattaggtgctgttttacctctaggcccttatgcttgctgcttcctctctggaaaaactctttgctcacttttttttgttgttgttgttttttgaaacaaggtctcactttgttacccaggctggagtgcagtggcgcaatctcagcttactacagcctcaacctcctgggttccagcgatcctcctgcctcagcctcccaagtagctgggactataggcgtgtgccaccacacctggctaatttttgtattttgtgtacagacggggttttgccatgttgcccaggctggtcttgaactcctgagctcaagcgatctgcccgcctcagcctcccaaagtgctaggattacaggcatgagccagccaccacgcctggcctttcgctcactctttaccttgccatctgttacttattcttcaggtcttaaatcagacatcacttgttctgggaagtctttctggttaccctttggcaaatctccatttcgtgcctcatctattaatgtgtccccagagcaccatgtactgcctttaactttcctgtcatcctgtttgccatgctgcactgtaattccttacactgtgatccctatgaagactgggacttggtggttttgcttttttgtatcctcagcatccagcacagtaactaactcaaagtggatactcaaatgttgagaatttggtagaaaagatgtttgctttaagaacttaggaaaaagcaaagaaaaccatatggcctattgggggttaatcttaattacatcctcctcctaagatgtcatctcttgttcatgctttaagagtccaattatgcttttgcagctatcgttctaatgggtaatacacatgctgttgtgctatgtagctagaatagagatctttttatttcttatgtacttctatcagtttgacttgaaagaaacaggtatattgggaaggggaagagggagaagagactgtatccgtaagtaatatggtgacattggcagtactgaacgtgcttatacatagatagaagatagaagtaaaagtgatgttgcttataaccacagtaagttttatatcttttattctacagttatttgtttcattacatctgccaagacaggattgtatatctttgtatcactgatgatgtaagtaacttgaagacatattgctatttaactatgtgtactgttaatacagccagttcttaattatctataccaggggtccccaacccccaggctgcagaccggtacaggtctgtggcttgttaggaaccaggccacatagcaggaggtgagtggcctatgagcattaccacctgagttctgcctcctgtcagatcagcagcagcattagattctcatatgagtgtgaaccctgttgtgaactctgcatccgagggatctaaattgcatgctccttaggagaatctaatgcctgatgatctgaggtggaacagtttaatcccgaaaccattcaccctcccccagtccttggaaaaattgtcttctacaaaaccggtccctggtgccaaaaaggttggggactgctgatctgtacctatagtgggcaaacgtgatgcgaactttacatagctggaattgttaatattttgcatttgtcatatagagcagcaaatgttaagaaaacttgatactggggtatgtgcaaatcaactcaattttggtagagttttagcttagcctcttgcaacttctatatttattctattttgtagtgagaattgatgttcataattataattctttgatatcaaaacctctcaaaaattgtttacgtggaatgttaaattagatagcatcatttcttctatcagtagttaatgaatcctttaatgtatgtgaactttggaaaaacaaaattacaatacattatgatcagctatataaacctgtagtttacattggttaggtatgactgtttgtcggctctcagcccaaaattctcagtaacttaatgatgtcattaaggtcctttctcttctctgcttatctccgtgtctccttcttcccagacaggttgccattatggtttcgtagagctacatacttatttattcatgtccggagtagagggactgtgtcttcttgagtgtcttattgtaggaatgaggaagcttttcccagctgcatgccctcccctccccctgctttcaaagtgaacttcctttcatgtcttattggctgcatgctcatttctaaactgcctactggcaaagagacttggaattggcatggttgccatagatcagggttcctaatctttattgtatcacagactcgtcacttgtgggacactcccagaatgtttttgttttctttttttaattttccttttccagaatgcttttaaatgtataaaacacacacaattctaacaaagccaattatattgaaatatatatatatatagtattcaaaatattttaaaaacttgatgtagtaatatatatgcttctttatgaactcattaacaagatctagtcataggtctaataactaatagtcttgatgtgatgggtgttgacagtattttgagatatctgtaactgtgatggtatacaaaaaaagatttctgttggtgacagttacaggtactgtttaatactaccccgattatgaatatacaacctatattcacaattgaaatataagttaacgattgataaaaataatgatgtgattttctttttttctatccaagttcaaaggccccttgaatttggaccattgaccccaatttaagaacccttggcttagactaagcatcttgggtgaaagggaaatgactgtcaaccatagtgatcatcacaatgatttttatctctggcttcacaatattttccaaaagtacgaaaaaatctagctatatgtgaaatgactgatgtgaaacagcttggaatagaaggaaaatactaatgaaatctgggatagttagagtcgagcctcatatttcttgagctataatttgatacacacatatacatgtatacataaacacacatacacacattcatttttttcctctaaggtattcttacagagaacacacatactttttggctggctgggattagacatgagtatgtcacttgatcttttcaaatataccaccactattgaaaaaattcgatttgaagttaatatcagtagtagtatctgtatgtgtgaaagactctatgattattatgggatttattaaacatattcttgtgctgggccttctaatagatcttatgaaatatatggaggaagtaaaattcaattcctgatgtcaagaagttgataacctaggtatcattatcttcagttgtcaatgaccagatatatctggattcattctcagctctttcatttactagttgttggacctttggacaagttagttactttttcagagccttcctttacttatctttaagataggatcaatgctagttcctcctcagataatcattgctcagtaaatgttagctgttttttattgttgttcttaatcactcacatcatctttgtttactttctaaatgtgagttctgtgttgatctcttttcaggattttgaacgttcccgagcctttaattttctgaatgagataaagaagaggttccagactacttacggttcaagagcacagacagcacttccatatgccatgaatagcgagttctcaagtgtcttagctgcacagctggtaagatctttctcaggataaggtattttgatttatatcttcttcattaccttcaaacactatgaatctagggggccctgacctgcaatatagttttctgattgtgttactgtaagccaacataataaaacttccctgattaaaaaaaaaatgtaaaggggccattttagggtagaaaacagtgatagtctttattatctctattaatagtggtcacagtgtctcatgattggaagagcattaaagatcatctagttgaactacccatctgatgcttaaatgtgttcagcatgccaaatgatcttttaaactatacgtaaaccttctacccttccatgagggaaatttaattttctaacaacccaaattaataatttgaaactctcctcatctgtatgaatccctaattgtcagcttagtgaggttttacatgtgaatatacctgtgaaataccactgtacttaagacagcattttaatcaccctaaaagttccctcatatcccttaccagttggtcccctcccctacactttgccccaggcaaccacggatctgttttctatcactataaattagttttgtctttcatagaactttctgtaaatagaatcatacagtatgtaaactttctgtaaatggaatcatacagtatgtacttttttgtgtcttgcttgtttcagtcagtgtaaggctcttgatattcttccatgttgtataaatcagtagtttgttcccctttttgctaagtagtagtatatgcatataccacaatttgtttatccatccacctgttgctggatatttgggttgcttccagttttcagctatcatgaataaagctgctgttaacctccatgtataagtctttgtgtggacatatgtttttatttctctctgataaatacctaggaatggaattgctgggtcatatggtaggtgatgtgtaattgaaaaaaaaaaatcaccacttttttttccaaagtggttgtaccattttatattctcaccagcagttccagtgtctctgcgtccttgccagtacttgatgtggtcttaagttttgccattccagttgatgtgtaatggtatctcattgtggttttaatttatgttttcatgatgtcagacacctttcgaaatgcttcccttttatccatgaaactatttgagtataaagacgtaagctctagctatgattttgttgtgagtttaaaaaaaagctgtattgtaatggaatactttcacttctcctgtggttttaatactctgagtattacatttctaaattttatgcacacacacacacacgcacacacatactcttctggcaataaagtccctttaaattggttacttataaacctttattattcaagcagttggtttgtttcatactccccactaggaaatgttcatctgtgtaaaactgtgtaaaacactacccacaacaaaaataccagtacttagtcaaaagtaaagggtcagctagaaacaaaactttcaaattaaccaatttgtcattagctctagatctgtgtgaccttctgaacaaaatctctacctgttcctttgtctgtaaatagagataatagcatcgtttcatagagttttggggtggattaaataatatcccgtttgaagcacttaacacaatgaaatgactggaacattgtgtattaagcaccccataattgctagctatggataaataatttcaaactatatattatcagtgtcttagattctagatcctgtgagaagccaataaaaatagtttatatgctgtgatcctggcagatacaagaacagattctgagaagctgggccagcccctacctcatcatactcaagaagtggggaacaattttgcagcattctttcccccactgccccaactacagtcttctttttctcctttcttccttgtctgagcacagattatatatcccccccaatctctgccccacaagtcacatgtatatttgatataatgtttatttttattttatttaaaataaggtaatttttagactacatacttatagtttgtatagaagcattttttatgctgcccatattttttcctgggtattgtaacatttttccagtgaagtgacatgtatcttttatatcaatagagacataattttatagcattcctcagtgtaaattgtcattccccttatttttgttttcctattgtaaataatgtctaggtaccataagttaaaacttattttcttatagaagcatcactctgagaataagggcctagacaaagtgatggagactcaagcccaagtggatgaactgaaaggaatcatggtcagaaacataggtatgtttcatggcatagtttcatgcatgtgggcaaaaatgataaagattacttgactggggtcaaattattctagagaagccaaaatagcacttccttattcttaccattggaagttaattgtcagctgagacaactgtgatactgtctgcttgtgcaaatggtttcttctttgtccttgcaactattcttcattctaaatttactagtttgcttaacaagactaatttctaagaaccttatgataattcagcagtttagaataatttggtcagtgtgattgtacagtatttcactgagttaatgtatcacgggttacctaaccttgcctgaattttggacgcataggttctttagcacagtgttagagtgctgttttgcaaccagataaggagcttgctgaagaatgtcaatcaatattgtgcttccttcactgaggccctcttgctatgaaaatgtcaattggactgaacagtatgcttagagacttagtcaaccagttgcaaatactcttaagtaggactgatttagaagtttatcctacagtagtaaccatactgttatatttttgtgcctattatgtttttcttattttcttgagattaattatcaggaatgggattaataatcaaaatgcgcaaacgttttcgtggttcttgatatgtacgtcttggctatttaaagtgatttcctttaattgattttagttttaattatatatctagatagagactagagaatctgttgagacaactactatttatttttattcttttttttgtcaccaaatgtatttattttgcccgaaagtggaggcagacaattgctacaatattatttattgcagatgcataaagtttccagaaaaatcaacgtttttaatcgactccttttaaatgacttatttatttttagagttatagaaacagcaaatttaatccatcttgaattaatttttgtataaggtataaggaagggatccagtttcagctttctacatatggctagccagttttcccagcaccatttattaaatagggaatcctttccccattgcttgtttttcttaggtttgtcaaagatcagatggttgtagatatgtggcgttatttctgagggctctgttctgttccattgatctatatctctgttttggtaccagtaccatgctgttttggttactatagccttgtagtatagtttgaagtcaggtagcatgatgcctccagctttgttcttttggcataggatggacttggtgatgcgggctcttttttggttccatatgaactttaaagtagtttcttccaattctgtgaagaaagtcattggtagcttgatggggatggcattgaatctataaattaccttgggcagtatggccattttcatgatattgattcttcctacccatgaacatggaatgttcttccatttctttgtatcctcttttatttcactgagcagtggtttgtagttctccttgaagtggtccttcacatcccttgtaagttggattcctaggtattttattctctttgaagcaactgtgaatgggagttcactcatgatttgactctctgtccgttattggtgtataagaatgcttgtgatttttgtacattgattttgtatcctgagactttgctgaagttgcttatcagcttaaggggattttgggctgagacaatggggttttctagatatacaatcatgtcatctgcaaatagggacaatttgacttcctcttttcctaattgaataccctttatttccttctcctgcctgattgccctggccagaacttccaacactatgttgaataggagtggtgagagagggcatccctgtcttgtgccagttttcaaagggaatgcttccagtttttgcccattcagtatgatattggctgtgggtttgtcatagatagctcttattattttgagatacatcccatcaatacctaatttattgagagtttttagcatgaagggttgttgaattttgtcaaaggccttttctgcatctattgagataatcatgtggtttttgtctttggttccgtttatatgctggattacatttattgatttgcgtatactgaaccagccttgcatcccagggatgaagcccacttgatcatggtggataagctttttgatgtgctgctggattcggtttgccagtattttattgaggatttttgcatcaatgttcatcaaggatattggtctaaaattctcttttttggttgtgtctctgcccggctttggtatcaggatgatgctggcttcataaaatgagttagggaggactccctctttttctattgattggaatagtttcagaaggaatggtaccagttcctccttgtacctctggtagaattctgctgtgaatccatctggtcctggactcttttcggttggtaagctattgattattgccacaatttcagagcctgttattggtctattcagagattcaacttcttcctggtttagtcttgggagggtgtatgtgtcgaggaatttatccatttcttctagattttctagtttatttgcgtagaggtgtttgtagtattctctgattgtagtttgtatttctgtgggatcggtggtgatatcccctttatcatttagacctaaaaccataaaaaccgtagaagaaaacctaggcattaccattcaggacataggcatgggcaaggacttcatgtctaaaacaccaaaagcaatggcaacaaaagccaaaattgacaaatgcgatctaattaaactaaagagcttctgcacagcaaaagaaactactatcagagtgaacagacaacctacaaaataggagaaaattttcacaacctactcatctgacaaagagctaatatccagaatctacaatgaactcaaacaaatttacaagaaaaaaacaaacaaccccatcaaaaagtgggcgaaggacatgaacagacacttctcaaaagaagacatttatgcagccaaaaaacacatgaaaaaatgctcaccatcactggccatcagagaaatgcaaatcaaaaccacaatgtgataccatctcacaccagttagaatggcagtcattaaaaagtcaggaaacaacagttactggagaggatgtggagaaataggaacacttttacacagttggtcggactgtaaactagttcaacccttgtggaagtcagtgtggcgattcctcagggatctagaactagaaataccatttgacccagccatcccattactgggtatatacccaaggactataaatcatgccgctataaagacacatgcacacgtatgtttatagcggcagtattcacaatagcaaagacttggaaccaacccaaatgtccaacaatgatagactggattaagaaaatgtggcacatatacaccatggaatactatgcagccataaaaaatgatgagttcatgtcctttgtagggacatggatgaaattggaaatcctcattctcagtaaactatcgcaagaacaaaaaaccaaacaccgcatgttctcactcataggtgagaattgaacaatgagaacacatggacacaggaaggggaacatcacactctggggactgttgtggggtggggggagggggaaggatagctttaggagatatacctaatgctaaatgacgagttaatgggtgcagcacaccagcatggcacatgtatacatatgtaacaaacctgcacattgtgcacatgtaccctaaaacttaaagtataataataataaaataaaataaaaaaagcaaatttaaaatgtgacaagaacattcctagttaattccctttcatttttttaacagcttaattgaaatataattcacatatcatataattcacccatttaaagtatacagtcagtggttactatattcacagaattgtacaaccattgctgcgatcaattttgtaacatttttatcatccctaaatgaagccctgtactcatttgcagttgctcctcaactctcagacctaagcaacaattaattcccttttcttcttcataaatttgcctattctggacatttcgtataaatggaatcttgtaatatgtggccttttgtgtcttcgttcacttagcgtaatgattgtgagattcattcatgtcgtagcataaatcaatacttaattcttttttatgactaataattccaatgcattaatgcattttatgtatctactcattagttcatggtctggttattataaataatgctgctatgaacatttgtgtacaagtttttgtgtgagcatatatatatattatatattatatatatatatatatgtttttggttctcttgcttacatacctaggaatagaattgctggatcacatggcaactttgtaacattttgaagaagggccaaactttcctaaagtgactgcacctttatacattcctaatagcaatgtatgaggattctgattcctccacatccttgccaaaacttatcttttttgattatacccagtctagtgaaatggtactttattgtgattttgatttgcatttccctgatgactaatgatgttgagcattttttcatgtgcttataggccattcgtatattttctttacctttggagaaatgtctatttaaaaatactttattgtttttaagtgggttatttgtctttttatggttgagctataacagtactttatatattctggatactagacccttatcagatacatgattttcaaatattttgctctattctgtgagttgtcttttcattttcttgatggtgttctttgaagcacaacagtttttatgaagtccaatttatttttttctttagtttgtgctttgaataacatatctaagaaactgtcgcctaagccaagatcatgaagatttactactttgttttcttctaagactagttttagctcttacatttctatctatgatctattttgagttaatgtttatgtatggaataaagaagagatccaacttaattctgttgaatatgtatatacagttgttccagaaccatttgctgaaaaggcttttctttccctgttgaatgatcttagcattcttatcaaaaattagttatcaatggatgtatagctttgtttctggaccttcagttctgttcagtttatctttatgccagtaccaggctgtcatgattattatagctttgtagtaggttttaaaatcaggaaatattcatcttccaactttattctttctcaaaattgctttgactattctgggtacctttcattttcatgaactttaggatgagcttgtcaatttcagatagcaaaaaaagctatctgggattttgatagggattgtgttgaatctgtagatcaattagggagccattttaacaatattaaacttctgatccatgaacatgggctttctttctattcatttaggtttctttaattttttccaacaatgttttgtagttttcagtgtgcaagtcttacatgacaaagactctgcttcaccaaattttagacaagctcctctgagcactctgttaaactaggtctcatcctcgggctctgtccttggcctgcctaaggaagtcttagcaaagaatcctgctaataccccacccttgatcaagttccttgtcccctatatttgttatataagtccggccagcttttagcaggaatcctgttaggccagtttagagagaatccccttgcccttgatgcctcctcttagtaattttccatcctctgaccccctcactctgttcattggccacaaatccccactggtcttggttgtgttaggagttgagctcaatctctcccctccattgtgatagccttgacccctattgcagtaatctcaaaatctgccttaccattttttaaccagtgtcagaataatttttctttaacaatatctcttctaacatccttcttgccttgttcctaagtatttttttatgctattgtaaatggaatttttctctttcattttcggattgttcagtactaatgtatagaaattttattgatttttataaattggtgttgtatcatacaaccttgttctcctttattagttctaatagctttttaatagtttccttaggattttctctatatagaatcatgctacttgcaaatagagatagttttaattcttccttttcagtctggatgcttttcatttctttttattgcttatttgccctagctagaacctccagtataatgttgaatagaagtggtaagagtggacatcattgtcttattcctgctcttagggagatcttgaagaatcttccacaattaagtatgaggttagctgtgggtttttcatagatgtcctttatcaggttgaggaagtttctttttcttatttgttgagtggttttatcattaaacagtgttggattttgtcaattttttttacatctattgaaatgatggtttttgttctttattaatatgatgtattataacaattgattttcagatattaaatcaaccttgtgtttctgaaatgaatcccactgcatcatggtgtatagtcctttttgcatattattggattcatcctgccagtagtctgttgaggatttgttaaatgtctgtatttttaagagttgttggtatatcattttcttttatttatttatttattttattatttttttttattgatcattcttgggtgtttctcacagacggggatttggcagggtcatgggacaatagtggagggaagatcagcagataaacaagtgaacaaaggtctctggttttcctaggcagaggaccctgcggccttccacagtgtttgtgtccctgggtacttgagattagggagtggtgatgactcttaacgagcatgctgccttcaagcatctgtttaacaaagcacatcttgcaccgcccttaatccatttaaccctgagtggacacagcacatgtttcagagagcacagggttgggggtaaggtcatagatcaacaggatcccaaggcagaagaatttttcttagtacagaacaaaatgaaaagtctcccatgtctacttctttcttcacagacacagcaaccatccgatttctcaatcttttccccacctttcccccttttctattccacaaaaccgccattgtcatcatggcccgttctcaatgagctattgggtacacctcccagacggggcggctgctgggcggaggggctcctcacttcgcagacggggcggctgccgggtggagggtctcctcacttctcagacagggcggccgggcagcgacgctcctcacctcccagaaggggcggcggggcagaggcgctccccacatctcagacgatgggcggccgggcagagacgctcctcacttcctagatgggatggcggctgggcagagacgctcctcacttcctagatgggatggcggccgggcagagacgctcctcactttccagactgggcagccaggcagaggggctcctcacatcccagacgatgggtgcccaggcagagacgctcctcacttcccagacggggtggcggctgggcagaggctgcaatctcggcactttgggaggccaaggcaggcggctgggaggtggaggttgcagcgagccgagatcgcgccactgcactccagcctgggcaccattgagcactgagtgaacgagactccgtctgcaatcccggcacctcgggaggccgaggctggcggatcactcgcggttagcagctggagaccagcccggccaacacagcgaaaccccgtctccaccaaaaaaatacgaaaaccagtcaggcgtggcagcactcggcaggctgaggcaggagaatcaggcagggaggttgcagtgagccgagatagcagtagtacagtccagcttcggctgggcatcagagggagaccgtggaaagagagggagagggagaccgtggggagagtgagagggggagggggagagggagagggagagccattttcttttcttgtgatgtctttggttttgataccagggtaatgctgggctcatagaatgagtcaagaagtgttccccttttcttctattttggaaagatttgtgaaagttttgtattaattcttgaaatgtttggtagaattcacctttgaagccacctgggcttgggcttttctttgtgtgaagcttttttgtttttgtttttgttttttgagatggggtctgtctgtcacccaggctggagtgcagtgacatgatcctctctaattcctctttcattcccttggtgggagggttacctgcagccttgacctcctgggctcaggtaatcttcccacctcagcctcccaagcagctgggactgcaggcatgtgccaccacacctggctaatttttgttttttggtttttttgtagagacaaggtcttgccatgttgcccaggctagtctcaaactcctgggctcaagcgatccacttgcctcagcctaccaaagtgctaggattacaggcatgagcctccatgcccggcctgaagttttaaaattactgatttagtctctatgcttgctgtagctattcagattttttatttcttcttgagtctgtttagcagtttgtatctttctaggaatttgtgcatttcatctaagttacctaatttatttacacactcctgtttatagaattcccctaagatcctcttcattttgtaagtttggtggtgatgtctcctctttcatttctgattttagtaatgtaagttttttctgttttacttggtcattctacgtaaaggtttgtcaattttattgatctttctaaagaaccaacttctggtttcatagattttttttctatagtttttctgttctctatttaatttgttcaccctaatatttatttccttcccactgctagctttagatttagtttacccttcttttctagatccataaggtagaaagttaagttgttaggttgttaatttgagatcatttgtcttagctcaggctgccataacaaaattccatagacgtagtgacttaaacaacagaaatttattttctcacatttctggaggctagaagtccaagatcacggtgccagtatggtcaggttctggtaagggctctcttcctggcttgcagacagcatcttctctctctgttctcccatcaggcaaggaaaagagagctagctgtctagtgtcttttatttaattgatacataatatttgtacacatttatggggtacgtgtgatattttgttacatgcaaagactgtgtaatgatcaagtcaggatatatggggtgtccatcagctcaagaatttatttctgtgtgatgggaacatttcaaattctctcttctagctattttgaaatatataatacactattgttaactttagtcaccctactctgctatcaaacattagaacttattccttctatccaactgtgtgtttgtacctattaaccatcctctcatattccctgctcggccccacatacccacacccttcctagcctctggtatctattgtgctattgtctacctccatgagatcaactgttttagttcccacatgtgagtaagaacatgtgatatttgtctttccatgcctgccttatatcacttaacataataacctccagttacatccatgttgctgtaaatggcatgacttcattctatttcatggtcaaatagtattccattgtgtttataaaccacattttctttatccattcatccattcatggacacttaggttgactccatatctttgctattgtgaatagggatgcaataaatatgcaagtgcagatatcccgtctatacactgatttcttttcctttgcataaatacccagtagtaggattgctggatcatatggtagtttaatttttagtttttggggaaatctccacactggtttccatagtagctgcactagtttactttcccaccaacagtgtgtaagtgttttttttttttttccttatactagccagcatctgttattttgtatctttttagtaaccattctaactggggtaacatgatatctcattttggcttttatttgcatttctatgatgttgagcattttttcatataccttttggccatttgtatgtcttcttttgagaaatggctattcatgtcctctgcccactttttaaggggattatttgtatatctcctgttgagttcattatatattctggatattattcccttatcaaatgaatagtttgcaactattttctcccattcaactggttgtctcttcactcttgattatttcctttgctgtgcaaaagcttttttgtttaatatagtcctatttgtctatttttcttttcgttacctgtccttttgaggtgttagccataaaatcttttcctagagcagtgttctgaagtgtttcccctatgttttcttctagtaggtttatagttctgggtctgaaatttaagtctttaatctatcttggttgatttttgtatgtgatgagagacagaggtccagtttaattcttccacatatggatatccagttttcccaataccatttattgaagaaagtgtcctttccccagtgtacgtccttggcacctttgttgaaaatcagttgcctatatatgtgtggctgtacatacgtggatcaatgtctggcttttctattctattccatcgaccttgtgtctgtttttataccaaaccatgctgttttggttactgtagccttgtaatatgttttgaagtcaggtagtgtgatgcctccagctttgttcattttgctcaggattgctttggctatttggactcttttttggttcctgaaatactaattttaggattgttttttctgtttctgtgaaaaatgacattggtacttcgatagagattgcattgaatctgtagattgctttgggcttatggtcattttaataatatacattcttatgatccatgaccataagatgtctttctgtatctttgtgtcatcttcagtttttttcatcagtgttttgtagttttacttgtaggagtctttcacctactcgttaaatttattcttcaatattttatatgttcataactattataaatgggattaccttcttgatttcataaagttttatttcaccaagttgattattgatgcatagaaacattacagatatttgtatgttgattctgtatcctgcaactttactgaatatatttatcagatctaggagttttttggtggagtctttgggtcttttagacataagatcatatcatctgcaaagagggataatttgacatcctctttttcaatttggatgccctttatttctttctcttgcctgattgctctggctaggacttccagtattgtgttgaataggagtagtgaaactgggcttccttccagtactatgttgaataggagtggtgagagttttccatttcttagaggaaaggcttttcgtttttcccattccgtatgatgttagctgtgggtttgtcataaatggcctttatcatgttgagggatattccttctatgcctagttttttgagagtttttatcatgaagagatgttgaattttttttgataccttgaactatatatttttatttgaatatataaaagtagaatatcctattttccttttgagctatgtcatcatactgctaaaattatggatgaaaatggaaatatttcaacctgacccattgcaatttctatgttacacatttgctctttttttattattatactttaaattctgggatacatgtgcagaatgtgcagctttgttacataggtatacacatgccatggtggtttgctgcacccattaacccatcatctacattaggtatttctcctaatgctatttctcccctagcccccctacccccaacaggccccagtgtgtgatgttcccctccctgtgtccatgtgttctcattgttcaactcccacttatgagtgagaacacgtggtgtttggttttctgttcctttcttaccttgctgagaatgatggtttccagcttcatccatgtccctgcaaaggacatgaactcctccttttttatggctgcatagtattccatcgtgtatatgtgccacattttctttatccagtctatcattgttgggcatttgggttggttccaagtctttgctattgtgaacagtgctgcaataaacatacgtgtgcatgtgtctttatagtaaaatgatttataatcctttgggtatatacccaataatgggattgctgggtcaaatggtatttctggttctagatccttgaggaatcgccacactgtctttgacaatggttgaactaatttacacttccaccaacagtgtaaaagcattcctattgctccacatcctctccagcatctgttctttcctgacttgttaatgattgccatttaatggtcgccattcttactggtgtgagaggatatctcattatggttttgatttgcatttctctaatgacccgtgatgatgagcttttttttcatatgtttattggccacataaatgtcttcttttgagaagtgtcttttcatatccttcacacactttttgatggggttgtttttttcttgtaaatttgtttaagttccttgtagattccggatattagccctttgtcagatggatagattgcaaaaattttttcccattctgtaggttgcctgttcactctgatgatagtttcttttgctgtgcagaagctctttgctttaattagatcccatttgtcaattttggcttttgttgccattgcttttggtgttttagtcatgaaatctttgcccatacctatgtcctgaatggtattgcccaggttttcttctagggattttatggttttaagtcttatgtttaagtctttaatccatcttgagttaatttttgtataaggtgtaaggaagggggccagtttcagttttctgaatatggctagccagttttcccaacaccatttattaaatagggaatcctttccccattgcttgtttttgtcaggtttgtcaaagatcagatggttgtagatgtgtagcgttatttctgaggcctctgttctgttccattggtctatgtatctgttttggtaccaataccatgctgttttggttactgtagccttgtagtataatttgaagtcaggtagcgtgatgtctccagctttgttcttcttgcttaggattgtcttggctatgtgggctcttttttggttccaaatgaaatttaaagtagtgtttttctaattctgtgaagaaagtcaatggtagctggatggggatagcattgaatctataaattactttgggcagtttggccatattcttcctatccatgagcatggaatgtttttccattcatttgtgtcctctcttatttccttgagcagtggtttgtcattctccttgaagaggtccttcacatcccctgtaagttgtatttctaggtattttattctctttgtagcaattgtgaatgggagttcactcatgatttggctctctgtttgtcttttattggtgtataggaatgcttgtgatttttgcacattgattttgcattctgatactttgctgaagttgcttatcagcttaaggagattttgggctgagacaatggggttttctaaatatacaatcatgtcatctgcaaagagagacaatttgacttcctctcttcctatttgaataccctttatttctttctcttgcctgattgccctggacagaacttccaatactatgttgaataggagtggtgagggagggcatccttgtcttgtgctggttttcaaagggaatacttccagcttttgcccattcagtatgatattggatgtgggtttgtcataaatagttcttattattttgagatgcattccatcaatacctagtttattgagagtttttagcataaagcggtgttgaattttatcgaaggccttttctgcatctattgagataatcatgtggtttttgtcattggttctttttctgtgatggattacgtttattgatttgcgtatgttgaaccagtcttgcatcccagtgatgaagctgacctgatcgtggtggataagctttttgatgtgctgatgggttcgatttgccagtattttattgaggattttcgcatcagtgttcatcagggatattggcctgaaattttcctttttggttgtgtctctgccaggctttggtatcaggatgatgctggcctcataaaatgagttagggaggagtccctcttcttctgttgtttggaatagtttcagaaggaatggtaccagctcctctttatacctctggtggaattcagctgtgaatccttctggtcctggaccttttttgtttggtaggctattaattactgcctcaagttcagaacttgttattgttgtattcagggatttgacttcttcctggttcagtcttgggagggtgtatgtgtccaggaatttatccatttcttccagattttctagtttacttgcatagaggtgtttatagtattctctgatggtagtttgtatttctgtgggatcagtggtgataccccctttatcattttttattgtttctatttgattcttctctcttttctcctttattagtctcgctagcagtctatcaattttgttaatcttttcaaaaaaccagctcctggattcattgattctttttgaagggtttttcatgtctctttctccttcagttctgctctgatcttagttatttcttgtcttctgctacctttgaatttgtttgctcttgcttctctagttcttttaattgtgatgttagggtgttgactttaaatctttcccactttttgctgtgggcatttagtgctataaatttccctctaaatactgctttagctgtgtcccagagattctggtacgttgtgtctttattctcattggtttcaaaaaacttatttatttctgccttaattttgttatttacccagtagtcattcaggaacaggttgttcattttccatgtagttgtgcagttttgagtgagtttcttaatcctgagttctaatttgatggcactgtggtctgagagactgttggttacgatttccattttttgcatttgctgaggagtgttttacttccaattatgtgatcaactttagaataagtgcaatgtggtgctgagaagaatgtatattctgttgatttggcttggagagtactgtagatgtctattaggtcctcttggtccagagctgagttcaagtcctgaatatccttgttaatattctgtctcaatctaatattgacagtgggtgttaaagtctcctactattattgtgtgggagtctgagtctctttgtaggtctgtaagaacttgctttatgaatctgggtgctcctgtattgggtgcatatatatttaggatagttagctcttcttgttgcattgatccctttaccattatgtaatgcccttttttgtcttttttgatctttgttggtttaaagtctgttttatcagagactaggattgcagccactgcttttttttgctttccatttgcttagtaaataatcctctatccctttattttgagcctgtgtgtgtctttgcacatgagatgggtctcctgaatgcagcacatgggtgggtcttgattctttattcaatttgccagtctgtgtcttttatttggggcatttaccccatttacatttaaggttaatattgttatgtgtgaatttgatcctgtgattataatgctagttggttattttgcttgttagtcgatatagtttcttcatagtgttgatggtctttacagtttgatatgtttttgcagtggctggtactggtttttcctttccatatttagtgcttccttcaggacctcttgtaaggcaggcctggtggtgacaaaatctctcagcatttgcatgtctgtaaaggattttatttctccttcacttataaagcttagtttggttggatatgaaattctgggttgaaaattcttttctttaagaatgttgaatattcgcccccagtctcttctggcttgtagggtttctgtcgagagatctgctgttagtctgatgggcttccctttgtgggtagcctgacctttctctctggctgcccttaacattttttcctgcatttcatccttggtgaatctgacgattatgtgtcttggagttgctcttctcgaggagtatctttgtggtgttctctgtatttcccaaatttgaatgttgacctatcttgctaggttggggaagttctcctggttaatatcctaaagaatgttttccaacttggttctgttctccctgtcactttcaagcacaccaatcaaacataggtttggtcttttcatatagtcccatatgtcttggagcctttgttcattccttttcattattttttctctaatcttgtcttcacactttatttcattaagttgatctacaatctctgatatcctttcttccacctgatcagttcggctattgatacttttgtatgcttcacaaagttctcgtgccgtgtttttcagtcccatcaggtcatttatgttcttctctaaactggctattctagttagcaattcctctaaccttttttcaaggtccttagtttccttgcatggggttagaacattctcctttagcttggaggagtttgttattatccaccttctgaagcctgcttctgtcaatttgtcaaactcattctccgtccagtttgttctcttggaattttcagcctttttgcactggtttttcctcatcttcatggatttatctacctttggtctttgatgttggtgacctttggatggggtttctatgtggacatcctttttgttgatgttgatgctattcctttctgtttgttagttttccttctaacaggcctctctgctgcaggtctgctggagtttgttggaggtccactccagacccagtttgcctgggtatcaccagcggaggctgcagaacagcaaagattgctgcctgttccttcctctggaagcttcgtcccagaggggcacctgccagatgccagccagagctctcctgtatgagatgtctgtcgactcctgctgggaggtatcttccagtcaggaggcatggagctcagggacccacttgaggaggcagtctatactttagcagagcttgagcactgtgctgggattgccgctgctctcttccgaactggcaggcaggaacgtttaagtctgctgaaactgagtccacagccaccccttcccccaggtgctcggtcccaaggagatgggagttttatctataagcctctggctggggctgctgcctttctttcagagatgcgctgcccagagaggaggaatctagagaggcagtctggctacagggactttgcggagctgcggtgggctctccccggttcaaacttcctggccactctgtttacacagtgaggggaaaactgcctactcaagcctcagtaatggcagacgcccctccctccaccaagctcgagtgtcccaggtcgacttcagactgttgtgctggcaatgagaatttcaagccagtggatcttagcctgctgggctccgtgggggtggaatatactgagctagaccacttgcctccctggcttcagcccctttccaggcgagtgaacagttatgtctcactggcattccaggcgccactggggtatgaaaaaaaaactcctgcagctagctcggtgtctgcccaaatggccgcccagttttgtgcttgaaacccaggtccctggtggcataggcacccaagggaatctcctggtctgcagattgcgaagactgtgggaaaagcatagtatctgggccagagtgcaccattcctcacggcacggtccctcaaggcttcccttggttaggggagggagttccccgaccccttgtgcttcctggatgaggcaacgccccaccctgcttcggctcaccctccgtgggctgcacccactgtctaaccagtcccaatgagatgagccgggtacctcagttggaaatgcagaaattacccaccttctgcattgatttcactgggagctgcagaccagagctgttcctattcggtcatcttgccaaccaccctgagatgttgaattttatcaaatgctttttttatcagatgctttctctgcatctattaaggtgatcatgtggcttttattctctattctattgatggaatgtttcatgtttattgatttgcatgcattgaatcatcattgcatccctgggataaatcccacttgatcatggtgtattatctttttgatgtgatgtttgatttggtttgctagtatttcgttgaggatttttgcatctgtgatcatcagggttgttggcctgcagttttgtttttttgttgagtccttatcaggttttggtatcagggtaatgctggccttatagaatgagtagggagaattccctcctcttgaattttttggcatagtttgagaagtgatattagttcttctctgtaagtttcatggagttctccagtgaagccagctgattctgggcattgttttggttttgttgggagactttattactgattatactttattactgattcaatcccattactcattactggcttgttcaggttttctatttctttctgattcagtcttggtaggttgcatgtgtcctgggatttatccatttcttctgggttttcaagtttattagcatatagttgttaatagtatttctatggtcacttcttccaatttttagatttgctttaatatgcaaggactttttcttgaggatatatctatggtgttggttgggcagggcacttagactttgattatgggtacattcagtagtgtagtctgtataatttcttcagctataaacagcatcatcaaccatgtctgtatttttcttagtggcttagggtgtagttgttatggaggctgtggtgaagttttgatgggcatggggatttcaggtgggctagtccttgttttcgagtggtgtcaccagtgggtgaagcatgcctgtcctttggccccaggacagtgtattcattaagttatattacttttttaaaaaaagtttattttattctacaatggaaaacttgaccttttctacttttccaatattttcagatctggtagctcagcgaggagaaagattggaattattgattgacaaaacagaaaatcttgtggattctgtaagtatggaatctgataatatggagtctgatgtaaagtggagaaactatggatgatggctaacataattgggaaataccttaaattcaaatatttggtggtttttttttctttctcatttccattatgtgattactttgtaataatgaggataacaatgaggcatagaaaagaaacatcatcccctaatagccattaaggtagctttggtttggaaaacatactcagtatacagaaacaattttctaaagctttggattgaggcctatataatttagcacctcaactgcatgtaacagtctgttccctttacaaatttgtaaaacatgaaacaaatgtgcaagccgtttgtgacccagtatgaatcttgaaaactggacaattcacttttttgcttacactgatagtttcatcttgccttgtatcaatcaagagacatcgattggaaagcgccaataagccttaaaggagacaatgtgtccttgtgagctgcttatactatggttccgtatgtcctcacattttcaatgcagttactgtggatgaaagttttaaggaaagatgacagatatatggtgaacagaaggagggcagagatcagctacaatttgggtctacacaattataaatgtaaatgtacagtgcaggtttacaccttgaaagaaaacagtgattgattatgttcgttgtgactgacagctggattgtagtggttaagaacacaggctctagtatcaggttgcctggatttgaatcccacctctgctacttactagttgtgtgaccttaggcaaatgacttaacctctttgtgcctcagtcatcatcttctgtaaaatgaagatgtacccacttcagagcattttaaggattaaatcagataatgcatgtaaagtgcctaacacagtatttgatacatagtaagagctatttaaatgttcatcattattgttaattttacagggacatctattagcagcaggttttagtatatacagtctactatcaggttttctaggagtttataaacagttttttcatcaaagcatgtggtaggtggaggaaggatgctaccatacaggaagtcaaaacacctgggttctagatctcactttgtgacccattgctggggagcaaagaaaacagagaagtatctgattccagatctgcagaccaatttctttgatacttccaggctgtctcttagttattcttaattcttgaggattaccctgcttagggggaatggtctgtctttgaccaatagtagtatgatctgtactttacaaataaaagtcttaattttgttgacttcatgactgaaaacagaaggtactaatgaactaacaggtatctctctttatggtagaataacatacgtgcagcaaattgtatcaagtgtacaacttttaagtgtatagctcaattattttttatatatatctatacccatgtaaccaccacccagatctagatagaaaacattaccaacaccccagaaggctgcctcataccccttccagttaataatccccaatagacgtaattatgtttctgacttatatcaccacagatagtgttttgcctgttcttaaaatttatttgtgtctggcctctttcactcactgttatgcctgtgaaattcatccacgttttttattatagtaatcacttattcttttttattgttttatattattccattatacaaatctaccacaatttgtttatccgttcttctctgtggggctttatttctggattctctattttgttccattggtcagtttgtctacctttatgccagtaccacactgtgttgattagtataacttaatagaattcttgaaattaagtagtgtaagtcttccaactatattcttgttgtccaatattgtcttcactcttttaggtgctttgcatttccatatatgttttagaataagcttgttttccatctcttgaccccacaacaatgtgtatctttgtgactgcatttaatatataggtcactttaggggacattggtatcttgacagtatagagtttttcggtccatgaacgtgacatatctctgcttttgcttaggatttaaaaatttttctcagcagtattttttagtttttggtgtacaggtcttgcacatatttgttaaatttacccttgagaatatcatgcttttgtattgtgtaacaaatttttaaattttgtttctaattctttattgctagtatatggaaataaagttggttattgtatattgaccttgtttgtattctgcaaccttagaaaaattcatttaccagttctggttactgttttgtacattcctgccttttattttccttcccttattctggctagaaccttctacacaatactgaatacaagtgataacagtgaacatccttgcctattgaccatcttgtggggaaaaattcaatactttttgaaaaaaataaattcagtgttaagtttgtggttaactgtagattttttgtaggtaccctttaataggtggaagaattccctttaattcctcatttgagagttgtattcatgattttatcaaatgctttttctccatttattgagatctttggtttttctcctttattcagttagtatggcaaattacattgatttttcagtgttaaaccaactttgcattcctgcaaggtcatgacttactacccttcttatataacactttattggatttgctattgttttgttcaggaatttggcatctatgtttataagagatagtggtctgtaatttatttttctctttaggttttggtatcaggaatatgctggcctcattaaacaagttgggaaatcttacctctctatcttctgagtttgggtactattggtattatctgtcttagatgtttggaagaatttactagtaaagcagattgggcctcgagttttcttcgttggaaaatttaaaatctgccatcttgctgtttgtttcctatttataccatctagtctttgttccctttttgttctgccttccattggatttagtacatttgttattccattatgtctcctttgtcagtttattagctatagctccattctgtcattttctgattgctttagggtttacagtatgtctttgatttataatctcccttaaagtggcatttttccacttcatgaatagataagaaccttataatagtatacttctagctgtttcttcttggcctttatgctattgttgacatatttttatttacacatgtattaaaaacttcataatacattgttgttgtttttgtttaaagagttgattatcttttaaagagatttaaataataagggaagtcttttctgtttacccatgcagctaccatttcagtgctcttaattcttttgtgtaggccgagtttctatctgatgttattttctttctgcctgtatgctttaatttaacatataatcttccattgtagttcaagtgtgtaggtctactggaaatgaattctttcaggtttggtatgtctgagaagtttttatttcacttcctttttttttttgaaagacattttcactgagtatagaattctaggtcagtgatttttctttcttttaatacttgatgaacggtggttcatcactgtcttttacattgtttctgacaagaattctgctgtcattcttacatacataaagtgtatttttttttcttctggatgctttaaagattttctctttatcattggttttaagaaatttgattataatatatatgccttggtatatatttctttatgtttctttggctttgagtttgttgtagttttcatcaaattatgaaaatgtttagctctttctaggcttccagtgacatctgtattaagccacttgaagctgtcccacaactcactgatgctttgttcatttttaagtcttttttccactatgtttcatttagaatagtttctattgctatgtcttcaagtttacttaccttttcttctgcagttcgcaatctgctgtttctgtcctgtgtatgtttcatctttacaggtttgttttggatcttttttatatcttccatgtgtctccttaacatgtgcatactttcctctaccttgagtatatgaagtatatttataattgaagtgcttattccacttacatgtaatgcaaattttgatagagttaggtgtaggtatcttgctctttgttttttatttgccgcatccctgtcctcttcttttttattttgattactcaagtactttttaaattgttttttaaccatctctatttgttttttaacacttctattgagagataactcacagaccatacaaattgcccatttaaagggtacacttcagtggaatttagtatattacattattaaaattgtggtaaaatatgtatagcataaaattttgccattttaacctttttaaagtgcacaattcagtgatgttaattacatccacaatgttgtgcatccatcactactagctatttccaaaacttttttatcaccccttaacaaaaactctgtaaccattaagtaataataactccccattccccttactctcagcccctggtaactctaatctactttctgtctctgaatttgcctgttctagatatgtcatataagtgggatcatacaaaatttgcccttttgtgtctggcttatttcactaagcataatagtttattgcttaaaaaaaaatgctaacaatcacctgagccttcagtgagccttaatctttttgctggtggagggtctcaccttgatgttgatggctactgactgatcgatcaggctggtggttgctgaaggttgtggtggctgtggcaatttcttaaaataagacaacagtgaagtttaccacattgattgactctttcacaaaagatttctctgtagcatgtgttgctatttgatagcaatttactggcaatagaacttctttcaaaattggagtcaatcctctcaaaccctgctactgctttatcagctgagttgatgtaattttctaaatcttttgttgtcatttcaacagtgttcacagcatcttcaccaggaatagttgccatctcaagaaaccactttccttgcccatgcataagaaacaactcctcattcattaaagttttatcaagaaactgcagcagttcagtcatgtcttcaggctccagttctaattctagttctcttctatttctaccacatctgcagttactcactccactgaagtcttgaacccctcaaagtaatttgtgagggttgtaatcagtttcttccaaacacctgttaatgtttatattttgacttcctcccacgaatcatgaatgttcttaatggcatctagaatggtgaatcctttctagaaggtcttcagtttactttgcccagatccatcagaggaatcattatctatggcagctatactaaatgtttttcttaaataataagacttgaaagttgaaatcactccttgattcatgggcagcagaatggatgttgtattagcaggtgtgaaccccaaaagtctgagacaggtctcagttgatttagaaagtttattttgccaaagttgagagcgcacacccgtgacacagcctcaggaggtcctgacaacatgtgcccaaggtggtcaaagcccagtttggttttatacattctagggagacgtgagacatcagtcaacatatgcaagatgaacattggtttggcctggaaaggcggaacaactcgaagcaaaggcgggaaggctcgaagtggggagggggcctccaggtcttagatagataagagacaaatggttctattcttttgagtttctgatgagcctctccaaaggaggcaatcagatacgcatttatctcagtgagcagaggggtgactttgaatagaatgggaggcaggttggccataagcagttcccagcttgacttttccctttagcttagtgatttggaggccccaagatttattttcctttcacacaggcatgaaaacgacatttatctcctcgtaagtctccatcagagctcttgagtgactaggttcattgtcaatgagcagtaatactttgaaaggaatcttttctttttgagcagcagatctccacagatcttctgtacaccatcctgtaaacagatgtgctatcttccaggtttgttgttccatttcaagagcacaggcagagtatatttagcataattcttacgggccctagattttcagaatggtaaattaccattggcttcagcttaaagtcatcagctgcattggtccctaataaaagtcagcttatcctttgaagctttgaagccagtcattggcttctctctatgaaagtcctagatggcatcttcttccaaaagaagggtgttttgtttacattgaaaaatctgttgtttagtatagccacctttatcaatgatcttagctaggtctcctggataacttactgtggcttctctctcagcacttgctgcttcaccttgtacttttatgttatagagatggcttctttccttaaacctcatgaaccaacttctgctagctttaaacttttcttctgcaccttcctcgcctctctcagccttcatagagttgaagagttagggccttgctctgtattaggctttggcctaaggaaatgttatagctggtttaatcttctatccagacccctaaaacattctccatatcagcagtaagtctgttttgctttcttatatgtgtgttcactggagtagcactcctgatttccttcaagaactgttctttgcattcacaatttggttaactgtttgtcacaggacacctagctttaggcccatctcagctttcgacatgccttactcactaagcttaattatttttatcttttgatttaaagcaagggatgtgtgacttttcctttcacttgaatacatagatgccattgtaaggttattaattggccaaatttcaatattgtgtctcggcaaatagggaggcctgagagggagagagataagagaatagctggtcagtgaacagttagaacacacaacatttatccgttagctccgtcaccttatataggcacagtttatggcacccgaaaacaatcacaatagtaacatcagaggtcacagatcgtcataacagatagaatgaaaataatgaaaagtttgaaatgttataagaattaccaaaacacagacatgaggcgaccacatgctgttagaaaaatggtgctgccgcatgttctcactcctaagtgggagttgaacaatgagaacacatggacacagtgaggggaacatcacacactggggcctgtcggggagtgggggctaggggagggatagcattaggagaaatacctaatgtagataacgggttgatgggtacagcaaaccaccatgtcacgtgtatacctgtgtaagaaacctgcacgttctgcacatgtatcctagaacttaaagtataataataataataaaaagaaacaaaaagtgcaggccaagcaggaaaaaaaaaaaacaaaccagaaaaatggtgctgatagtctcatcatggggtttccacagaccttcgatttgccaaaaaaaaaaaaaaaaaaaaaaaaaaatccatgaagtgcgataatgtgaagtacaataaaaggggatatgcctgtaattctttctgtgtcctttattgttttcctgcagttctgtttcagtgtacgattttgtttgcttcaaactgaagaagttcttttattgtttcttataatgttgatctactgatgagagattctctaagcttttgtctgaaaatctgtttcatcatttttttaaagaatactttctttgcatagagttttttagtttttcacaatggcagtttttttttttttttaaagtgagtgctttaaaaatgccattccatttttctttggctttcatatgttctcaaagagattgtcatttctcttagtcttacttgaaaaataatgattcttaccccacctttggcttttgttgttgttgttgttgttgtttgttttgtttttttaagacagagtctctctctctcacccaggctggagtgcagtggcacgatcacagcttactgttgcctccacctcccaggctcaagtgatcctcctgccttgcctcagcctcccaagtaggaggaccacaggcatgcgccatcacacttagctaattttttaaatttttcttagagacgggtctccctatgttgctctggctggtctcaaatgcccaggctcaagtgatcctcccaccttggcttcccaaagtgctggaaatacaggcatgagccaccacacctggccccctttggctggttttaagagtgtctttttatatttggttttcaactttttatatatggttattagctttctgtggctgctatcacaaattatcacaaacttggtggcttaaaacaacaaaaatttattttctcccactactggatttcagaagttcaaaatcagtttaactgggctgaaattaaggtgttagcaaggctacactccttccagaggctctaggagaggatctgttccatgcctcttccagcttcaggtggctgccagtatttcttggcttgtggctatatcattgtagtctctgcctccatgttcacattaccttctcctttgcatgtgtgtcaagcctccatctactttcctcctatagagacatttgtgatgtcatttagggctcacatggataatccaggatactctcttcatctcaagattcttgacataatcacatctgtaaagaccccttttccagataatatcacatatgtcacattcatagggattaggacacaggcatgtcttagggcaacatttaacaattgttctttataggtgaacttgttttaaacagatggtttgtcagtgttcagatgttgacctgagagtggtggaggaatctccattacaacctgttgaatcacacagctatgttcggatttattagtttcattcctcactgctttttctcatctacatcatctttctctttcttgaattatttattgtgaattagtctttgtttgtagtatatcctcacacattttcttcatatgagtttgtggatgataatcccttcaagaataaaagtgttattttggtctcatatttgaacaattttttgactggtgtagaattctagggttaagatcattttctctcaaaattctctgaatattgctgcatttcagtgcatgaagaatttaggcatctgagaagttcaacaactatacagtttacacgttttttatttgggccaagtttgaggactgcaacccaggagcatagattcaagttgctctgaatatatgttctaattagcagcagttacaagtaggtttttaaaggaaaaaaggagaggcagtatctaatttgtttaccaagaatttacattaaaatagcataagctattgattgctatacattgtcctttgtatcacaaattccaggaacatgaagataatggttgaggcagctagtcagcaacaaattgcctttaaacagttgccccccctgggcattgtgtggggggtgtgactgaagtccccatactcatgtcttctgggcctgataaattttatatacctcacatagctcaggctgctctgagctgtttttcttttctcatttcccccttttgatcaaaatttttctcttctgaaagcattgatgatcagcattttagatataagtttatcccatgtcactggggaggcttattcccagatattcttgtcccgtgttggatggaaagacgtaaaaaaggtaccatggcttaaagaacttagtgaggtctcaaggccaaattgattggcaacacagaggagcagagcaacaggatctcagtcaagccatccactcacgctggagccatggcatgaacaactatacagtttactcaagtccaccctcacttaatggcaccaactgcaagtttggggattccccaaaccaccctcagatttgatagttcattagaaggatttataatactctgtgagcactattatactcacagttatggtttattacaggcaaattatacatagtaagaccagccaagggaaaaagtacatagggtggagtttgggaagataccaaatgtagagcttttgttgtcctcttcccatggagtcaggacacgttgctctcttggcatcagtgtgtgacaaaatgtgcagagcattgcctaacaggaaagcttacccaagccttagtgttcagagtttttattggggtttcattatgtaggcattattgactgactgccctctggcttgatctcagtctccagctccacttggtgtgatccaaagcctcctaaatcacatagtcattttttctggagtgtcttttccccaccctaaatcacattgttactatctagattacagtctattagaaaaataaatcaaggctgtgcatggtagctcatacctataatcctaatacttatactttgggaggccaaagctgaaagatctctaaaatccagaagttcaagaccagcctaggcaacaaagtgagaccttatctctacaaaaccaaacaaaaaaaaaaaaaaaataggtgtgattgggtgcacctgtagtcctagctacttggggggctgaagatggagaattgcttgaacccaggaattcagagctgcagagagctatgatcacaccactgcattccaggctgggttacagaggggtgacctccatctcaaaaaaaaaaaaattttttttcttttaattcttttttattttttattttttttataaatatatatattttttattatactttaagttctagggtacatgtgcacaacgtgcaggtttgttacatatgtaaacatgtgccgtgttggtgtgctgcacccattaactcatcatttacattaggtatatctccaaatgctatcccttccccctcccaccaccccacaacaggccccggtgtgtgatgttccccttcctgtgtccaggtgttctcattgttcagttcccacctatgagtgagaacatgtggtgtttggttttttgtccttgcagtagtttgctgagaatgatggtttccagcttcatccatgtccctgcaaaggacatgaactcatccttttttacggctgcgtagtatttcatagtgtatacgtgccacattttctgaatccagtctatcattgttggacatttgggttggttccaggtctttgctattgtgaatagtgccacgataaacatacgtgtgcatgtgtcttgatagcagcatgatttataatcctttgggtatatacccagtaatgggatggctgggtcaaatggtatttctacttctagatccctgaggaatcgccacactgtctttcacagtggttgaactagtttacagtcccaccaacagtgtaaaagtgttcctgtttctccacatcctctccagcacctgttgtttcctgactttttaatgatcgccattctaactggtgtgagatggtatctcattgtggttttgatttgcatttctctgatggccagtgatgatgagcattttttcatgtgtctgttggctgcataaatgccatcttttgagaagtgtctgttcatatccttcacccacttgttgatggggttgtttgtttcttttcttataaatttgtttgagttctttgtagaatctggatattagccctttgtcagatgagtagattgcaaaacttttctcccactctgtaggttgcctgttcactctgatggtagtttcttttgctgtgcagaagctccttaattagatcccatttgtcaattttggcttttgtttccattgtttttggtgttttagatatgaagtccatgcccatgcctatgtcctcaatggtattacctaggttttcttctagggtttttatggttttaggtctaacatttaagtctttaatccatcttgaattaattttagtataaggtgtaaggaagggatccagtttcagctttctccatatggctagccagttttcccagcaccatttgttaaatagggaatcctttccccatttcttctttttgtcaggtttgtcaaagatgacatggttgtagatgtgtggtattacttctgagggctctgttctgttccattggtctatatctctgttttggtaccagtaccatgctgttttggttactgtagccttgcagtatagtttgaagtcaggtagcatgatgcctacagttttgttcttttggcttaggattgacttggcaatgcaggctcttttttggctccacatgaactttaaagtagttttttccaattcagtgaagaaagtcattggtagcttgatagggatggcattgaatctataaattaccttgggcagtatggccattttcatgatattgattcttcctatccatgagcatggaatgttcttccatttgtttgtgtcctcttttatttcgctgaacagtagtttgtagttctccttgaagaggtccttcacatcccttgtaagttggattcctaggtattttattctctttgaagcaattgtgaatgggagttcactcatgatttggctctctgtttgtctgttattggtgtataagaatgcttgtgatttttgcacgttgatttcgtatcaagactttgctggagttgcttatcagcttaaggagattttgggctgagataatggggttttctagatatacaatcatgtcatctgcaaacagggacaatttgatttcctcttttcataattgaataccctttatgtctttctcttgcctgattgccctggccagaacttccaacactatgttgaataggagtggtgagagagggcatccctatcttgtgccagttttcaaagggaatgcttccggtttttgcccattcagtatgatattggctgtgggtttgtcatagctcttattattttgaaatacgtcccatcaatacctaatttattgagagtttttagcatgaagggctgttgaattttgtcaaaggccttttctgcatctattgagatgatcgtgtgttttttgtctttggttctgtttatatgctggattacatttattgatttgtatatgttgaaccagccttgcatcccagggatgaagcccacttgatcatggtagataagctttttgatgtgctgctggattcgatttgccagtattttattgaagatttttgcgtcggtgttcattagggatattggtctaaaattctctttttgtgttgtgtctctgccaggcttaggtatcaggatgatgctggcctcataaaatgagttagggaggattccctcattttctattgataggaatagtttcagaaggaatggtgtcagctcctccttgtacctctggtagaattcggctgtgaatccatctggtcctggactttttttggttggtaagctattaattattgcctcaatttcagagcctgttattggtctattcagagattcaacttcttcctggtttagtcttgggagggtgtatgtgtcaaggaatttatccatttcttctagattttctagtttatttgtgtagaggtgtttgtagtattctctgatggtagtttgtatttctgtgggatcggtggtgatatccccttttatcattttttattgcgtctatttgattcttctctcttttcttctttattagtcttgctagcagtctatcaattttgttgatcttttcaaaaaaccagctcctggattcattgatttcttgaagggttttttgtgtctctatctcgttcagttctgctctgagttatttcttgccttctgctagcttttgaatgtgtttgctcttgttcctctagttcttttaattgtgatgttagggtgtcaattttatatctttcctgcttccttttgtgggcatttagtgctataaatttccctctacacactgctttaaatgtgtcccagagattctggtatgttgtgtctttgttctcattggtttcaaagaacatgtttatttctgcattcatttcgttatgtacccagtagtcattcaggagcaggttgttcagtctccatgtagctgagcagttttgagtgagtttcttaatcttgagttctaatttgatttcactgtggtctgagagacagtttgttataatttctgttcttttacatttgctgaggagtgctttacttccaactatgtggtcaattttggaataagtgcgatgtggtgctgagaagaatgtatattctgttgatttggggtggagagttctgtagatgtctgttaggtccgcttggtgcagagctgagttcaattcctggatatccttgttaactttctgtctcattgatctgtctaatgttgacagtggggtgttaaagtctccctttattattgtatgggagtctaagtctctttgtaggtctctaaggacttgctttatgaatctgggtcctcctgtattgggtgcataaatatttaggatagttagctcttcttgttgaattgatccctttaccattatgtaatggccttctttgtctcttttgatccttgctagtttaaagtctgttttatcagagactaggattgcaacccctgcctttttttgttttccatttgcttggtagatcttcctgcatccctttattttgagcctatgtgtgtctctgcacatgagatggatttcctgaatacagcacactgatgggtctttactctttatctaatttgccagtctgtgtcttttaattggagcatttagcccatttacatttaaggttgatactgttatgtgtgaatttgatcctgtcattatgatgctagctggttattttgctcgttagttgatgcagtttcttcctagccttgatggtctttacaatttggcatgtttttccagtggctggtatgtgttgttcctttccatgtttagtgcttccttcaggagctcttgtaaggcaggcctggtggtgacaaaatctctcagcatttgcttgtctgtaaaggattttatttttccttcacctatgaagcttagtttggctggatatgaaattctgggttgaaaattcttttctttaagaattttggatattggcccccactctcttctggcttgtagagtttctgccgagagatcagctgttagtctgatgggcttccctttgtgggtaacccgacctttctctctggctgcccttaacattttttccttcatttcaactttggtgatctgacaattatgtgtctcggagttgctcttctcgaggagtatctttgtggcgttctctgtatttcctgaatttgaatgttggcctgccttgctaggttggggaagttctcctggctaatatcctgcagagtgttttccaacttggttccattctccccatcactttcaggtacaccaatcagacgtagatttggtcttttcacatagtcccatatttcttggaggcttttttcgtttctttttattcttttttctctaaacttctcttctcgcttcatttcattcatttggtcttcaatcacggataccctttcttccagttgttcgaatcggctactgaagtttgtgcattcgtcacttagttctcgtgccatggttttcagctccatcaggtcatttaaggacttgtctacattggttattctagttagccattcatctaatctttttttcaaggtttttagcttctttgtgctgggttcaaacttcctcctttagctcagagaagtttgatcatctgaagccttcttttctcaactcgtcaaagtcattctctgtctacctttgttctgttgctggtgaggagctgcgttcctttggaggaggagaggcgctctgatttttagaattttcagtttttctgctgtttttttccctatctttgtggttttatctacctttggtctttgatgatggtgacatacagatggggtttttgtgtggatgtcctttctgtttgttagttttccttctaacagtcaggaccctcagctgcaggtctgttggagtttgtcggagggccactccagaccctgtttgcctgggtatcagcagcggaggctgcagaacagtgaatattgctgaacaccaaatgttgctctctgatcgttcctctggaggttttgtctcagaggggtacccgccgtgtgaggtgtcagtctgcctctactggggggtacctcccagttaggctgcttgggggtcagggacccacttgaggaggcagtctgtctgttctcagatctcaaactctgtcctgggagaaccactactctcttcaaagctgtcagacagggacatttaagtttgcagaggtttctgctgccttttgttcagctatgccctgcccccagaggtggagtctacagaggcaggcaggcctccttgagctgtggtgggctccacccagttcgagcttcccggcagctttgtttacctactcaagcctcagcaatggcgggcgcctctcctccagcctcgctgccaccttgcagttcaatctcagactgctgtgctagcaatgagtgaggctccgtgggtgtgggaccctctgagccaggcgcgggatataatctcctggtgtgctgtttgctaagaccgttggaaaagcgcagtattagggtgggagtgatccgattttccaggtgccatctgtcacagcttcccttggctaggaaagggaattccctgaccccttgtgcttcccgggtgaggcgatgtctcgccctgcttcggctcacgctcggtgggctgcacccactgtccaacaagccccagtgagatgaagccggtatctcagttggaaatgcagaaatcatccgtcttgtgcgttgctcacgctgggggctgtagactggagctgttcctatttggccatcttggaacaggaatcaaaggaaattttttaaaaatcccatttatgatagcatcaaaaagagtacaatagttaggaataaatttaaccaaggatgtaataatgtgcacactgaaaattataaaacattgatgaaagaaattcaagaagacacaaatcaatggaaagataccttatgtttatggattggaagaatcaatattattaaaatgttcatactgcctgaagcaatacacagattcaacacaatccctattgaaattccaatggcatttttcacagaatagaaaaaaaaattctaaaatgtggatgaaactagaagacattatattaagtgaaatatactagacacagatagataaatactgtatgatttcacttatatatggaatctaaaaaaaatgttcagttcataaaagcagagagtaaaacagtggttgacagtgggtgggagacctggagagatgttggtcaaagtgtatgaacttacagttgtaagatgaataagttctggataccggacatacagcatggcaactatagttaataataatgtattgaatatttgaaatatgctataagaatagatcttaagcattctcaccacatacccaaaaaagtaactatgtgaggtgatggatattttacttagcttgattgtggtaataatttcacaatgtgtacatttatcagaatatcacattgtataccttgaatatataccatttttatttgccaattatacttcaaggcagaaaaaaataaaattagagtagaaacaaaagcttggaggtctgaaatgttactaaaagtgtaacattttccttttttcaatattcttgccacatggtgggtaggtccttttagtctgaagattcaagtctgtcttatttgggggatattttcttcaattagtcccttgattattgatccttctcttttggctgtattctctcctgtgactgctaataggtgtgtaaatcagtaccaggcacataataagcacatgttaaatatctgttgatcgtataaattgatcctggatttgcttgatcagttttccgtgtatcttacatcttctttcatgatttacaacctagacattttgctgttttcagaacaaattttttgaattgttactgcagaagctgcttttgctcatttatgttctgcttttaaaaaattatgccattttattaaaatatagtttttggaatgttgtcatgttatctaattttttatgtcctctgatgactttgtttaaaattagttcaattatgtcttgtatctgaggatacttattagaaatttttttattactgttattctatcttgtttcccatattaactttgttccattaaggactgtttgtccccattgctttttttgtctcctcactttaactgctgtttcttctcaaaagttctagtcaatgcatatattctattcaacatatatatttagctctagatgtaatcagttttggtatgtgcctccaggtggcatcctgtgcagtcttcatgaagtgaaacccaaagactggtgcccctgtcagttgttctactgcagagactttgtggagtatgtggttggagatgaatctatggttaagggagtggattttttaaaaccaatatgtgaagtataatatacataaagtgcatcaactgtaagcatacaacttgttgtgttttcacaaagtaaacataccatgtagaaccaacacccagattaagaactagagcacgaacagtaccccagaagctcccttctcccttcttttagtcactactcttctccaaaggtggccactgtcctgatttctccacatagattaataaaacatagcaggggccgagagtggtggcacacacctatagtcccagctactcaggaggctgaggtgggaggatcgtttgagcccaggaggtcaaagctgcagtgagtcgtaattgtgccactgcactccagcttgggcgacagagcaagaccctgtctcaagataaataataaaatatagcaggtattctgtttatgtcaagtttctattgctcaaaatgatgtttgtgagattcatctgtggtaaattgtataaatgtagtagtagattgtgaattgtcattactgtattgtattccatgttatgactctcctgtaatttatgcattgcacagttgatgggcatttgggtggtttccagtttaaggtatgaaaagtagtgctgtccaaaacatttttttatatgtcttttggtgaatttgcatacatctgtgggaccataccagagtggattgctggattattagggagttttgttggttggttgtttgccattttgttttaaactccttgtgtcctggtgggaattgttcagtagatactgagaaattgatgatgcaaaagaaaatggatagcagaaggaatgaagttctatgggttttggccctcacaaaagtaaatacatatcttcctacagaaatcaaacaggtttttatggctcaaagccccggaattatacggggcagaataggcgaatgtgcttgcagtcagctggctttaaaagagcctttcttattggaagtatagagaggaaaattcttttccactagcgggaagaaccacttctggtgctcaacatcatgtgcattgctgcagtggagaagaaaaaagagggaagcgttttcattgggctcatactgcttatgataggcctggcagagtcttgcttttggcaactattgagtatgaatggccagtctctacttgtaaagagaggtcattggacttaaatggaattaatggaagtaaaatgttctcaggttgttactgcaaatcattcatgtagtcagtgccaggggttaaacaattctcgcctcttttctagtctgtcaccttcaaaactaccagcagaaatcttgctcgagccatgtgtatgaagaacctcaagctcactattatcatcatcatcgtatcaattgtaagtttttgtccttttagtgtatggctttatttttcaatctctaagaaattaggtactagaattatttctcaatgattaacactctgaaatgagctacatatgtcttttaatagtgaaacacatgaccaggcagtggctttcctatgaagtcactatgaaatatctctacttaaacccctccttcctattgagaattattatatattctcaataggaagagatctataaaactgacctcacagaaatgtagttattttaaataaagacatttctggtttatatgtaatgggtttattgtttttatttttaaattaattatgtatttttaaagttttaatttctaatatggcaaatgctgataattataatcccccttaaacaagaactctttggagtcctcagtaatttttgagtgtgtaaagaggtcctaaaccacaactttaaaaactattgctaacaggtggggggtgctttaccctgttcatggtcagataaagttgcctttcctccccatcctccagtcatgtccagaagcccaaagttacctccaagcagataactctgaccctgcttctcctctaccacagcttgagggtcctctgccttagacagctggatttatctaaaagagaagagcagtcatagatctgtagattttatactggaagtaattgtcatggccttgaatggttccttgctcaggtttctctttctaatatcacattttaggctcctgagcttagcttcttacttattatttggtctgggagtttaggttgatttgtgcagctgaattgttaaattcagaatatatttactgattacttattacatgcagagcacagctctaaatgcaatatcaatctttgcgaaaaggtgttgtcacctaacgagatgtacttcagcttgaaaaatccttatattacagctgtgacaaatagtcaactttacatcaagttggtaaactttacatttgtggcatgtgtatgtgtgagtatgtgtgtgtatgtgtgaatatgatgtcagaagttcaacctattcattaataaacagaatttgctgtaatctgccccccaaccctggcaatatttatagttccctacaaggcaaaatgctttgctcacttttggagcaaagggcatgcaattcatcaatgcatccttttccaagcttgcaaataatgaaatcagtcacttaaagatctcaaaaagttgtaatttaaagcaaaataaagccaggcataggggcttatgcctgtaatcccagcactttgggaagctgaggcaggaggattgcttgaggccaagagtttgaagccagcctggtcaacatagtgacaccctatctctacaaaaataaaaaataaaaaataaataaaataaagtgactaatgcagtgaacctaatgtttaaaatctattttttgtgatataataatgtgaacaagtagtgacttttataatataatttaaaattataatctagaattaaaaagcaaacacatctgtaatagcaccagtatttttgcagtgttacttacatcatctgcttttcattgttttggtcatcgtaattattgtgtcattatccactgaacagttcgtagcagtgttcttgctcataagtgatatagatgaaagccttctactcaggcttttaaaatatattcttatattaatcaaaaataaaattcatgtgcaaaacctaaaaatataattaatgaaaccatacttcaggagaattatggttatttgtgatttttttatgacttgttaatgacacatcagtatgagttgctcatttagccttgattctgccgagttaccagtgaagagcaacaaccccactgctttctctcccactgaaggaaacgctagagttcaagtgggtgtgagttataccaaaaacgacaatgttaactacacttctgtcttggaaaatacttgtttagtgtgttccattactacataactgctactctaatggaatcagaagtatttcttaataaggctctactttcctatatatattatttagaataatatgattgattcaagaaaataaaattgctctcctcgtccctccaggtgttcatctatatcattgtttcacctctctgtggtggatttacatggccaagctgtgtgaagaaataggaaagaagaagttaccattaaccaaggatatgagagaacaaggagttaaaagcaatccatgtgactcaagcctttcacatactgacagatggtatctgccagtctcttcaaccctcttctcactttttaaaatcttgttccatgcctccaggtttatctttgtcttatctaccagtttattcctgtgaacttcagattgaaccattcattgcagcagtagccttaaaaaggcttttgtttatttctttggtttgttaactagtgtcatctatttagagaaacatttttgtttttaattgctcaaagctgtcgccgctagtcttatgagctatctactaaaactatggagaaactttgtatgtgcacacaaaagtattcaagagacagtattgctaacatctcatcttaatgtcttttgttattgagaagttttaggtgcttcaaaacaatataaatggataatagttgttatttggggaattgtaatgatgttggtgctgcttccttctaagagctcagacaagtaaagtatgaaacattcttatttcagttagatggggaacattttgctagcccattagaagcacacagaattatccttgtcctcctaatattgactttcaggaataaagttcagtgtgctgatcattcacaatacagtggatagcttgatatcttctgttttcccattgcagttgatttgagaagatgaaggtttaaatattgttgaaagttgcagttttttaaatgtgttcctttttcttctgtgaatatttagggcaatcgtgtcgctaatagaatatgtagtagagggggtggggaggtaaattcctctgacttgccaaagaaaaagaagggaaccacagtggatatgctagcattttagctgtgcaaagggaggtagtgtgggaaaagtgtttccattctgggaaaagcccaaaccgaatacggtcagcagtcaactccagggtttgggcttgattcctgttgaataatagttttgagcattctttgtggttaaataaattcttaaatctgcctagttttgatgaattcttttgtgaaacttgaaagagaatagacagtatgacatatagaattaatacaaaacagtttaacaaccatttaactgcagtgtaagaaaattggactgtaatcatatcgctactggcatctgttatctagtatgcatttctggtgtgtatctgaaaggaagacattttctaccctagatccaattgcatttatttatcaataagtgccattaaattgaaattatattacattttacactttctcaatgaatgaacaaattagtctgtagaatctagccacctgtttagcctagtcatgtgccttgaacatatatgtgtcccataatctggctcatggtacctgttcttctatccaaacctttcaattcatgctacctgattcatttatttgacatagatcttaggcccacttgaactcttttcttgtttatctagcatagcacaaacgtttttccagtcttctttatcaacactaatgcctcttaattgcatcagtatttcctattggaaaatacatctgttccagaaaaacatttggcattcctgaataatttccaaatgtttttaatccaaagaaaaaggtttaaagcttatttccctttcttatacacacctgaataaaattgatgtgcatgttttagggatcaattacctaactgttccttggtctatttatgtataagaatgctttttaaagcacatgtctcattttaaatgacgcacaaactgaagatgttaataaaatttaagagtaatacaatga

SEQ ID NO: 32 - DNA, 118509 bp, Homo sapiens
agaacaacttttttgacttcctgcaaagaggacccttacagtatttttggagaagttagtaaaaccgaatctgacatcatcacctagcagttcatgcagctagcaagtggtttgttcttagggtaacagaggaggaaattgttcctcgtctgataagacaacagtggagagtatgcatttatttatttacttttacatttttgattcgtttttacagagaaaaacttctacagagataacaattattttgcttttcagaaggacgcatgctgtttcttagggacacggctgacttccagatatgaccatgtatttgtggcttaaactcttggcatttggctttgcctttctggacacagaagtatttgtgacaggtaagtacaaggatattaatattttttaaattattttttctcttttggaggaatgtttgaaatagacataaaaataatttaaatgtgttggtaactggaagtgagaagcctgctgtaaaccatcaagattgttgtctcagggagacatagctagttgtgtgacagaatacattgtttctgtttacaaagacataaatgtttcgggacaaaaaatacaattttaaaaggaaagcaatgtctatctgtatctttatttacaactgttcaaagatattacaaaagcaacattattacttaacttccaaagtgacaataacacacatttataaaagcctgagaattttttaatgataaaataagtgagtttttattcttttaacaaatttgatcttttaaaaagtcataaaacagctttggttgtatgtaagccactccctcttttcagacctgaagtttgcttcctcaaattttgaatttaattgacatattttattgaatacttgggtatataatagttcaaaaatatattgagatatttagtaaaatattaactttctgcaatttttatcacagaatgtattttaaatcaagtttttagtttcttgttaatagttttaatacatttttgctttagaaattcttgtggagccaccgcccttcctgggtggtgggtaaatattacagccttgatgagatagaaatatttaaactcttaaaaatcatgcaaatgctgtattcagtaggaaaatgcaactagttggacttccagtgcctattaaagtttgaaatctttgcacatttatggtctattcaatggatagttcttgagcggcgtcaatatgaatcatgagtacatttcaatagattatagaatgtaactaataattaatatttaatatttctctttatgatgtagtatctaaaaggacattgaaaataaaatttttgtagaaattccaaaaagtataaaaagtattttaaaacaacttgcttattacaattcactttgaagtctttttttgacttttaccgttcttctttcctctgaaagtcagggaagtagctacctcttgagcatgttacattgacaatttctatttggagaggaaagaaagaggaaagaaaaacaacataagatttttgttgttgttgttgtggctgttttgctttttattgcaaaggtgaattttttaaaaatctatatatttgcagcatttgtcttagtacagaaaatgtttatcaagttaccatccctttaaagcttatgataataaaaagtaaattataaagaataataatctcaatgaagtgatatatgtatattatcacaaatcagaacagattttcatttaaaattcccactcaggaaatgtcgaaaagcatttttaaatgagcataaagaaatactgagacattttgtaagccagaatatttttcttctcttcatattcatttaacttctattattttcttcaggtctagctccattgctttttattccaggcaaacttcccaacctcctgaatagaccaaatatcctattatatgcttaaatcagagtgtgaaatatttcctttgtgaataaaaattcaactcattctattacaggatgtttttttaaccataagacacatctttgaatttataattgaaataatatgatggggtctagaaacctttatatcaactttgctgaatgatttataccatagcaaataaatggatatacataaatttattttgaaaactcaactttatcttcagttgctcacataaatattgagagcaaacatttttctaaaagacatttgtagactccctgagatatatgcttatttgtggaaaaacatatacagatataatcatttgtatctgcaaatattgtttataatcctttcaagttgcaagaaacattttgtgatttaatgtataatttggaaaattcttaatgctttaaattatttatttttcttttttagcaacaaatgagttggattctatgtttcattttaacgtgttaaaattagtttagtgcctacaggaaataataaacttttggggaacaaaatttatattgtatgctgtaaaggcataaagaaatagagccaaatgtagagagccatcaatggtaactctatgcataattcaaatattttatttaatatctaaaatgcacacacggacaaggccaaagttaatctttgccacggcaacaaccaggcagggttcagttttactcaagacttcctaatcctcttgctctgtgcctctttgccatggcaactggaagccaaactttgtttagaatttctaaataatgttaggggacaatgatggttttaagaaggcaggtgaaggtgagtgttctctggttctaataaagttgtaatgccaggcagatctaccacactatagcatggcagttaggagtatatgagttatggtatgtgaggtatatgatgagttttgttatgagtcataacagttaagactcatttcctggacataattcttcatttttccatctgtattaaaaatatatatctcatgttataaacatggactgtgccttgcacatcacagacattcaatgaaaattatttaattgaatttggtaagcagtcctattaagttctaaatactccataatttagagatttgggaatgtgattagaattacttattaatttgaaaaaaaatgtcctactaaaaacctgcctgtgacctttatcattgctaaagtttgaaatgtactttgttacaggaaagactacggctagggcctatattatctttttctcttttgttctgtgtaagtaagtataggggcagagtagttagcttgaacttagttctttctttgttctggactatttgctatcctctcaccagtgacaattaaccagtatagaaatatagatgtttctacattgttcatatacttgaacatatatttctttatgtagatactcacacataaactagttatatatttgtgggttatatatactagtcaatctatctatctgtctatctatctatctatctatctatctatcagttctccatgtttgtctatttggcgttcccatgaacttcagaccttcgcctgtgttctcttttctccatttggttacgtatcattgcctactatgtgttgatcactctgattctccatctctagactcatccctcagaaacacggaacttactacctttcctaaatccagacattaacatgctccccaagtcctgaaattttgctttgtaataatctctaataacttcttgctttgacacctccattgccatcatcttaattcatggctttattatttctcacctgtaaaattgtaatagtttttttaatcagtctgaagtctcatcctttttttaatgtaatctacagcttaaaaagtaaaataaaaagtgaagggttactgatttcttctcattgcctttggtataaattctaatcttttttgccagagaaactggttccactaatgatctgggggctaggcctggagctgggaagggatcttttttcttttctttctttcttcctttctttctttctttctttctttctttctttctttctttctttctttctttctttctttcttttttctttctttttcttctatgattgattaaaagaaaacaaacaggaggtagttttaacacccacctctatactttctcaaggtgtttaaggttctgggcaaatcctacttcttctattatgttctcttatgtcacttttgccacaaaatatttccattgaattgcacactttttatcaccttttcttggcatttttcaagtcatttcaatctgctcttttttgtgatgatgattgatgatgatgatgacatgtgaattagtggatttcttgacattgtaacctacatgaaatcaggtataggagacacaaaaggcataaactcatagttcccatacctaatttttcaccagacactgaataaatcatagattaaaaaaataaaactgcatattgtagtgacaaaggaaaggaaaattttcaaagagggaagtcaaaaagagggagaatatgagataaaaaaattaaccagaggcgaagtgggaggatgaagacagcaggactattttgtccagattaaattaagttgattttggatctagatgtttacagtcttgcctttttgtttttgtttgtttgtttgtttgttttttctttgctccctttcttactctccttatctcacctctcgtctggaaagagcctcctgacttcctaaaagttcatagtttgagaatgtttttcctaaattttctttgatctgctctttggacattctaggtaatgtaatttggagggtcaattttatttttcagatacacatacccataggagaaaaagcaaggaatgggagggaaatacaaatgtagcggagtgataacacaaacagatcaggtccagtcatggcaattgctggtttgaacactgatgctagtgctctgggattgcttgcaagggcagatggaatatggtgcaccctaggtgttgcattatttgcacgacaaaagtttgtagagagctgggaataatttctttacagacagtgtggtgatgaatgtcaatctgagtaggtaaggggcagagatttgtactgaggttgattcattctcttggtaaatacacaatgttcacaaaggcaaggtttcatcttcagaccatgtgtgtatatgtcaccttggtgcagagagagaaatttttcatcagtgctgacctttgatttttttttctagacatcttatagatttatgtagttatttacatgggaaacaattagaatggaaatttaacatatcttcagtttaaaattaatttctgtctagtctaaatatctttgtaagtactagatactcaatcccatagcagtggccttttaccaaaggcttagtgctatgacttttgcatacataaagacctcactttttaagatatgatacaccagaaaaaaaatatggcaagactttagcaatatgatttgatgcctatttctatataatacccaaatatacaggaataaaaattatggcaatcactggattttgtgtacctggctctaaccaatatttatattagaaaatatctaattattgtctaaaatatttaatcttcattcctgtttgtatgtcagtgtgctacttcaatatcagtctgttaaaagagtctaggaatgactactataagcagagaattatatgttcaggaatcacaacaaaaaacaagaacaaatagagaaacaaaagctttcctactctttcatctaggacaagaataaatacacataaagtcaatattagtgaagtaaacaagcatcttctatatccattcatagtaccttcaattgattgatttcttaacagacaatcagcaaaattatcagtttttattagagattttagtagagaccgagcttaaacaaatatattctatggtgcttaactctatagtatttaaagattcaatatttatttcctctaaaaatgagtcaagtgtctgaaaggaaaaagccacctaactgaaacttcagtttctactatacagggtatttattataaaactgtaattacaatgcaattatattgaagtataaatgatcatcattcatttatttaagaatataatcaaaatttgcatacctggaagaaaaccatccaccctccaaaatagggatttgctaatgtaggagtagaaggcaaaagttgagggtaactcaggtaacacactcatacgtattaggatatgaacagctggtatagcaaacttgatagaaatcactgatagacaagaagacattctctgcattttaaattaaagtacaatttgtctgtggtcattcaagagatagtttagagaaacctatacaaataacaatgatgctaagagacaatatcaaaatcacaataaatatcatggcaatacagtgtggccactatattttaaacacatccacttgatgaaaaatataataatttactgataaaacatattaagcataatagaaaatgaggcagaaaccactccaagctgggaaacatcatgacatctgtagtgataaatattttgaaaatctaactctatgaatcttgtgatttttagctaaatcaattttcacccttgagacccaatttcctcatctataaagtgttgtaagcattaaaagttataatatttgtgaaaatgctttgaaattatgtgatactctgagaagtaaattttttcatgtgagcccatgaaatcagagcacatagccttttagcataaacttgattccaaatgatatctcttcctttcagacactgtgagcagataaagggatagtttaaggttaagtgatagaggcataatcccttataggcctttgaattcttttaactttgcattctttatttcagagatttttcaggcttctccagattctacagtctaaatagtttgtaaatccacacacttctactttgccagggatttcttagtgtaaaaatatcctgaagtctcacctgccttcaatccttactgtgtccatacccaccattaccaggataatctttgtaaaaggcagaacttacctttgtccattcctcttttaaaagctcctattggtagaaaatatactgaacccgtgatttgataccaagtatgttttggctcaacttttatgaaaacaaatatttaattagaatataccaacatttatgagttttccttaaagataaattttggaggaaaaaaactccattagaccaatttaattccctgatgattatatatatattacctagtgaaatccttggcagtttttccattttaattttaattttactgaactaatgtttagcagcatcactttcatttaatttttacaataactattagattcatgaatccattttacccatgtcaagttctactgaatatagcttatgcttggaattttcctttgtgattattacttttctaaaggtaattcttcttttcaaacaatacagatctaaattttccaaaaccatttaaattcttctctttggccagaaacattttctgtgtgtagttttggctaccgctagtttagtttttttaattggttttgtgtctcaatgctacaaaaaatataatttatgtaatttttcatttttgtcaaacttaaatcgggcaatattaaccattctcaattttttgttgtgttgaaatttctatcagtgacattaatgtggagattgacagctctttgagctagattcattttgaaattttaagactttcgattatttcttatctagccaatagaaactttagaaacacttttaagactgcttgatagcctggaattattatgtttgaattctcattcatttgtatggtattcctcttattagctttcacacttagtaccaatttcttattcattattggagcaaaaagtaaagagaagaatcaaggtgataagtttaaaatcttctcaatgtaaaatagtgtgtggggaaagtgtcaaatcatcctactttggtctttgtgcatttaggaaaaataaaagcaattagcattgcacacacatatgtaattgaatctcttcagatttgtctggctttatctctaaccactttgtgactctttttgtaacttgcatttttctaaaaatgtgaccttgtttggtcttcctactgttggccatgctgtttttccttctctccacatctttttatcaatggtgcaaattataaattgtattcaaatttactgtaaagatcatgtcctctagacagcccctatcccacttgtataacccttgctcttcagcccctttcacacctgcataggtattcttctgctgtgatgatcctttgaataattctcttggagttctctttaccaggctctcttgcagcaactggtgagctcatgtaggctatcactgggtctctgcttatttgccagtgcctgcaggtcctcagtacctgtttgctgaacaaacgaatggtctgtcagcttaacccaactctgtatgtagaaggcacttaataattcttaaaaacaattttgattctgtccttttattgttatttatgggaattatttatggtaaaaatttctacataatagaaaatttggaaaatgtcaagaaatagaaggaaaaagaaattgcttagagcccatgctaacattttgtttttcttcctctatcttttgatcacatgctgtgtatgaaatttcatgttcaattttttcccaagtaaaccttgattattctagacaatttgaaaaatatagaaatgaatagaaaaataagaatttcaggtttccagttctcaggatctaaaaactttttgagtatttcatttgactaggacaactagatctattcagttatttattaacttattagttcatttgataaacaactattttgtgagtgttttccatgtaatttgggctgaggacacctatcccatgaagcccgtattttctatcagtggcttcttggagatggtgttttaaatcttccaaaatcttcatcagcaccccaaaacttcctcctcaaagtaacaacataccttgctacagataattattggtgttatcaatgttttataaattataaatttaaaaatcactatcttaagatctatatataacatattaagtaaaacttatattcttacaagacttcctccaggtccctgttacaaccagattttctttgcagacttttaaattatggaagttctggtgctgccactgagttgtgtagattattattagatattcaataaataaagttggtagatgtgaagaggtactagacaatagtcctattttgttttggtttgtttgttttgtaatttattctgaaaaaatgtttatgtggagagaaaagggaaaacatacagaaatacacagcacacaaacaaattcttacttttttttggtagtctttctaattttccaaggtcaccagctaatagcaaatgagagttgtagggggtggggtgaaggctggggtcttaatcggggtctatctgattctagatagaccagattctagattttccactcggttactcaatcttcttagtggtcagtttaataacctggaatttaagacatgactgtgtgatgatgggcaaatcacagcaggactgaatgggagctggtaatttctcagaggttgtttgtgtgacatatgcatgtaagttcattcacctgatttagctacttacatgaaccattgtgcactgagctgcttctatatctttagcatattctgtatctatgtaaaattcacataagattgtatgacttttataaaaaacaaaaagacatctttgattaatttgtcttcactatgaatactgatgtgatgtgttacaatcatcctgaaaaggaggctaacaaaggacaggactgagtctgtcttgaggtgagtgatatgatggaaagaatggattttcccccacccaactcatttttgatattacataaagtgaaaaacattaaataattcaccaaagtatctagatttttttttgtttttgaagtgcaagggaagtaacttgacctttgttaaacactttgatcatggaaaacacataaggttctcatcttattccaggaagtgtagacactagataatcttttcatagtcatccaaaaagcatattaagtgaaccaggtaaatccatcctacactttttattccagagacaagttggctaaactttgaggagactaaaacaaaacaaaaaaaaattattgtttggttcatttgataaatgtggattccaatcatataatttaggccaaatattatactttgacttcttagacttagatttccagatagtctggtttataaaataagattttaactatgcttactaaactctatgtatttctactttccaatgacccatgttcttattttctgaatttacttattgatgctttaggtatgataaaggtatgtaatggctaaggaaacataaatgaagcataagacatcagttgagagttttgacggaaaggaagtggtgatatgaaggaaacagataaaccaaagaaaaaggaaaaggtcagggagctgataaaagtaacttgaagaaactttagtgcaaatgttggattcagacaatcgctacttttaaagtacttaaagaagtcagtctttgaaatcttgcccggattccattccagtttcatcattggagacttccaatgatgaaaaattggggaagaattaccttccaaagcctcagtttcctcgtgtgtaaaatggaaataatagcaagagatattaaatgagatgattcactcatcgattcatcaattgtttatagagcccctgctaagctaaaaactgttttaagtgttgacacagtggtaaagaaagcagaaagtgtaactacttttatgaaactgacttcctagtggtgagagataacaagaaaacaaacaacaaattgagataacttcagttatagataaatgctgtgaagaaaattaagtagtgtaatatggtagagtttaatctggccagacccagatttaggggtgaatgcacttttagacagagtgatcggggaagatccttatgaagaagaatcattgagctacctgttggctgacaagaatatggggatccatgtgagggagactggcaagagtaaaggttatctggcaaaaccaaacaaattggtaggttcgaggcacagaaaggtcaggcatctgtagtatggtgagtaagaactgagcaggttgtggtgaggctagaaagataagcagaaggcaggtcccacagggccttgatggaaatggaaagagcttgaattttacctgaagtataaagggaaggaaccattttaagttcttaagtacagaataacctaatcttctttctgtgttgaagagatcactttgactgttatgaagagaatagattggaagtaaggcaaagcctggaagcagttatgaggagactgaatgggaggatggagaaaggggatggtgatctggaccaagtgttggcagtgcaggtggaaagaaaggaaagactgacatagaattaagagaagtggctgcatggaaaagacaaagacattttagagaatgactttttttccccatgagcactgggatgggaaagagccaaattagggggtcagaaatccagagttatgtttgggctgttattgatgtctgattttcattaggtggtagagaggtcaagaaatccgttggagataagaggctgaggcccattcagtaggtctcaactggagacataaacataggagtcattgcattcagatggagcttaaagctaagggactgcatgtgacagtgtaaataaacatgtagagagtagcagatgactggtttctgagccttgggaaacttcatatttggaagagacacaaggaggagctaggaaaagatagtgagaagaggtagccagtgaaaaaaagtagaactatactttgctttgaatgttgaaaagggttggcattatagtgagaattcagtaaattccacataaaaatctgaatttatgtctcccctagaaaggttggttgtgaacatgcaattggtaaatatctctattaactttaatattgttacaaaagtaatattaaggaatttataatatttggaagaattagatgtctttacctaatatatcccttgctagcttaacaattagaaaaagaaagaggtacatcttaacataatttgttttaataaaaactacagaatatattgagagactaaagaattagaaatttaactgaaaatttcatgcaaaggtaatgctctgttgaaccattttgtagcttatgttttgttttgatacatattttaaaatattgtttaagacaatacttgaacagattgggattgtgtgtgtgtgtgtgtgtgtgtgtgtgtgtattggttaaataactggtttatttttaaactgaaattaaaccttccatttctttgagaaatttaaaaagtagttgttatcaatgtggcagatattaggtagaatctaatatcgtgaaaattaaactgcacataaatagatataaatccttttgtcagtgtgtgtatatctctgtgtgtaattttgatctcaggcttggcaggtttccttaaaacttttttttagagctacttaattttgtacttactggtggttagctaataagaaaaagctaataaaaaatagtgcttactctgtgccaggcacttctgttaacattttataaatgttatctcatttaacaagctcatgtcattgtatagtctagcttatacttgtctttaacataagcaaatttgttaatttgtgtttcctgatattatcataaaatttactggttgtcatatcctaaaagggaatagttcaatttaattttccttgttctaattttaaatacagtactaaggttgagaaagaaggggtcaggaaagggaagtaacattgagtgtctcgtgtgcctggcactccatatgatgcttcaatgcacaccaggctattcagcctcagatttgtttctacattgcttctagttctacagattattcaacgaatgtacaatccttggtcactagtcttaatagggaaaacagaattatggttaaaacaaaagagtaagtaacttaaatatgatctatcggtatttattttgtattatgatattttgcttaagttgaaaaaagggcgcatcaggtgttttggcagtttactgtgatctcaatagtgagaatgtattgaaaaatctcagtacaggagaaagctgtgcagctttctcttcctgtcgctgcttaattttcatgtagatataaagccgcagtttaagcacatctgcttaatccttatttaaaagactaggagagaactagaaagggagggagggagaggaggggaagggggaagagattgagagaaatctctcccatataacacaaacactgtattagtgtgtgagaagcagataatcgtgcatgtaggcactatcatttgtgaaatcagaaagcataatttactcccaatgctgaataatctagttgtgtgtaagcaccagagagatatttaaatacctatccaataaaagataataaaagcctagcaaacctaagtaatccattttcagatgttaatccaattacgtaaacaaatattacccttttttttttttggtcattgtttcaaggataaagtgtaaatgaaagaaatagcattccatctaggtaaaagaggaatcagcatcattgaaatgtgaatagctgtgattcctccttgctgaatggtaactttagaagagagggaacccaggagtccatccagaggctcaaggaataagaggttctcacccataggaagatgaaaaatactttcagggtgacccatgagggaaaatcaccaaagcctttgaaataaaagattttcccttttctaagaataaaagatggtgttatgtcaagggcggctcgatggtgtggatgaaagaactattgggaatggctactgaaagatcaaaggcaagtggaacctcaaaattctggaagtagaacgagtcagatacaatataagaagtacttcaaaggcaagaaaataagaataataaaaatacctttagttgtcaaatgtaaaatttgtgccagttttgtcacattccatttttcaggaacactgtaaaggtattttctattaatatcaatttaactgtacatatcttcccatctatcttaattagtcacttttcaagaacaaatgtgttatgctcaaagcatccaaaggacttttttgttagccttaataaaatgctttctcttaaactaaattttaatttagtttacatgtctacgtataaggtggttatagaaaatgaatgtaaaatcacttcattaagtgtaacaaaacaaaataatatgaggaattgttatactgtttaagcatttgaaaaacgataaaggagtatagaaattttgttaccactactatgattagtttctcatttggtttttcactttaagaattggaataaaagttgaaatcttgattaaaaaaacaagaaatgattcacaaattattttacaaattgaaatactgaaatacagaatgttcaaccactgtcaacatgaactcctattctgtaattaatctattctataaacatctgtatttgctaaagagcaacagatcaaggaaaagaaaaaataatccttgccatccatagagccatgatttttgtggaatcttcgctccagtttaagttttgtcagtgtctggaagaaaatacttcccatggatcatctttttgctaaagagtattctttacattttaaaacatatgaatatttacataaaggtgtttgtggaaaaggaaattatgtgccttttattttaattcacccattattctattccacatgtaaagtagaaaatactactttaagacaaaagtaaagcattatttatttaaagatctattttgtccatgaattttatcagaggtaacgcttcttaatgttattcagtgccataacttgccttttttctaggcctccattttatgaactgaacatctggatttgatggcaagaaaacatttccttccgctggcttttctaataactccctcttacagatatgcatgcctcatgtttgttaataaaattgacgtgattttaatatctggtattttaacacactgtgaattatggaattttcagtggctttatttaattaaatgcattttaaaatccttacaaaaaaatattaagagtaactctaaaatgtattagagccacagatgttttcctttatagtgttaattgatttaaggtccatcaaaatgctgttaaaatgtctagaggttaacaataacagtggcacatgggtcagattaaaattctttttgagtaaaataaataaataaatgacagcttattttcttctgatttaaaaaaattagctagtggattgaaacaacaatgtgatagctaagatttcattctctcactttataatgaaaggagatttaaaattagggattatatggtacacgaaaaatttatatacacagattacaagtactagtttttttagtgaagaaaagacaactatatattttctctttttatctgttgtcctattttacaattgtagcaattaatctgccaaactctttaatcaataaaatatggtatttaacaaccaaatttggcccctccctccccttaaatatatttccaatgctccttgctccattttaaacctgctgtcctttataagagaataatatattttgtaatttgagaaaatcatgcaaaggaaagtttctcaaaattcacattaatatgtaataatagtaataaatatgtataaccataatatcttagaattttacaatattttatagaaaacatgaatattaaagtgaaaatttaaacacatcaatttttcatgttaaaattactaagaatgaactacagattcatgaatactaagggcaacttttatctcaggaaatatatcagtggactgaaaatgtcaaatcaattcaattaaatcagtaataacactttgctgtttatgtggctgttttttcttctatttttattgtcttagattgcatggatacaatcaaaataagttaatttgtatacaggatataaatggaccagagaatgtgtcttctattaaataataacaaataagaataccttttattttgtgatggtctttactatttactgagagacaagtattgttcaagttgccggttttttttaattagctgacatatttcctgcttttatttgagttagaattcctgtaccaaacattttaaaaagagaaaaaaaattaaagaaagagaaaaggaatttggaaactactataatgtaaagtagcattatttatacaacaattaattttagagaagcaagagaccttagaaataatctatttcaacgcatctattttacaaaaaagaaaattgaaactcatagatatttagtgacttgtcctttgttacaccaaaaatgagggaacttggtctagaattcctccagcatattatgaggtatttgttctgtggcctgatacaatgaaatgaatgttggattaggcattttgggacaagttttgaatcctaactctattactaattcctcttcactagactgagattctggtatgtggtattcaataagtgacttgacttctttaagcctggtttctttttcagtgagatttacagcttagactagtttctgaatcttgaccctgtggacaatctagttggagaactgagatgacctgggcattgtaggatgtttagcaacattcctgcctctgtaaactagacacagcagcacatttacccaacctgctctgactgtgacaaccagaaatgtctccaggcattgccaaatgtcaactgagggcaaaattgcctaccctagccaccttaactgaaaactacaaacttcattgaaataatttctttatggctcccagcagtaacactgtgctattctagaccagttggttaaactactggatgcttcatcagaaagcacccactaagcatcactcaccatgaagttcgttgggtactctatacaatgaacaaaggagatatcacataatttttaaaaaacttaaaagattcacaggtgagaattttgtagtaacaattaagtattaactattagaaaaatttaagaagttttaacaaaatgatataaaaatatattcactataagtaggatgtaatttttgtcctgtaagagttatccatgtatttacgaattgtacctaccagaggttacaaaaatttggtcattatttgaaagattaacagggacttatttccaatcatagatgttcactatactattctaagacatttgcaactgtgtaaggcagtcatttccagtaagaattgctagaacaaacattaagcatttcacagtgaaaagggtcataggtatattttcatcctttgcatatagaagaaatagcaatctattattctcagtttttgacttaaaaggtattgttgcttccctttctttccctcccctactcaagtttttgcccatggatccagatacctacaagggcctaatacagggaaagtgcactgtgtatgagctatgaaggcacaatggaagcttgcctggcaatcagtgccagaacagacagctagtctgatgaattctgctacacatcacagggctactagttttttgttttttgttttttttttttttgtcatacattactgcaagttccctgaggaagtttactgatctgtagttttacgagaaatgcacgtcatggaggtggcgtgggggagcgggtgaacaaggaaactttagttgctataaaacaggagctgagagctcaagcaggttggttatgttctgccagatggagataaaactgtggcagccacatcctgtgactagaaattgtttaagtaggcagacctgttggaggactaaagaacattaggcaaggagattaaattagtgtaggaaaaaaaatcagttttgtttaaaacgaaatatctacttgtgttaatagaacattctaactccaccataggatggaatcaagaggttttttttttaatacatatagtgtatatatataaatatatatatacacacacacacactgtatgtattcctatgtagattaaatattttgatttacctctttctagtaaagcaaagttcattctgaaatccaaaatattcacttactagagcagaaaaaaattagctgtgcatttatgctgatcacagtgtagataattaatctttaagaaagtaggtttttatgtttatagttgataaagtgttagtggcaagaactttttctgttattgaatattatcatcagattactcgtgctttccattttattcctttaaaaaaatccaacttttgtaagccaccactattttctgaagattttatttctctctaagctaagaaaggatgtcaagaataaaccattttctccttttaaataaaaatgcattcactatagatattcatttgaaatctcaaacatacctgaattaagtatactcagttttgtgagtgaaaattaattattatttaaaacaaaacaaaacaaaaaaaatgttcagtgttttcattttacttctcttgctgcttttgggctctgactgggcccggaagcagaagttgcaaaacattatgagaaaacttttgctcttttcttttttttcttcaatctccacccatatggaaataccagaaatctgaaaccccattcttgctaaatattcttctcaggattgtatctctactgcaggtcttctatgacgttttacagctggcctctttccattcagaattgctgttcatctttgaatgtctctgctttactcctgaatgaacacaaacacattttttttaggtttcttgttgacattggctttctttatagcccataaaaaatgcatttgtggcatctcttccacagacaaaaatagtataattatgattcaatactcgatgaatgtgtgttaaactaaactgtgcccaagctctgtgcaacagtacaggtttttcacctttccaggggagagatgtggagcacatatacatttcagccatcctacatgcccacagggacatctttctggtctgtctcattggaatacccttccttatttggtttttagtttctttctgctttaagcacctttcagagagagagagatgttttcctttgtctttgtataggcagtgcctatcgttacagagtagcctttaaatacatatttgttgaattaataatgatacacatgaactgatgaggctctataattctatgagataatctggtatcgtgggaatattttagcatgttttgtatagatagactgacactatgactggtaatctgatagtaaaaatggcaaaatattgagcctgagtattattttattatgttgctttcttatacaaggagggaataaaataaagtgatgtggactgtaattgtgctcatgaaagacacaatgtatacatacctccttgagacggaatgataaggataacgtagaatgtttaccatgatttatcagtctctcctatataagaaaaatatttcttgtcctgaagtggtaactttggtgaagtcttttgcttgctcttttacagactaattaacaagttttctatgccggctctgtcctttcctctcctctcacccctgaaaagtggttaaaagtttggcatttgttacccagaatactaaatgtaacacatatgtggcaagatttgatggaattgcacttctgttcttattatgttcctttctggaaaattatgacaatttgtgtccccttagagagtgtagcacagttttctggttgctcctcatgataatccaaaaaaaaaaatccagctaacccttaccttttagagtaagaatctttagaagaaagagtgctttcatcaaatcatttgagaacgttaagttgaataactgatacggtactaccctacagacatgcgcaggaagtatctgcatttctgtggcgttctgctaaggaaaagaattttctttccagacaagatttttcaaaatcatattttaaaaatatcttaatgatgaatttgaagttgagaaccaacttatttcaagtaaaattaaaattttgagagataagagaatatactttttttaaggttagaactcagaggccattatgacaattaatgggctagtggagacacctggtctctaagaaggagacaccagcttcttcatgttttgatttctgccttgttctcttgtctgtcaccactagacacatactattttatagtaattacttgcatattttgtagaaaaggcagctgtgttttctacaaatatttcacaaatgttagtattgctctatgccaaggaacagaagacaaatttgtggaaaagatacatgtggcccctccccaggtgggatttcttgtgtaggccccatgcagtggagggacagagggggccagtgctcattttgaggacacgatagttcggactgtctgaggaaatcgacagtgtgtgtttaatgaccaaaccaacatggctttgaagaatacatatatatttttttttttgctttttttttttcattgcccaggctggagttcaatggcatgatctcagctcactgcaacctacgcttcccaggttcaaagaattctcctgcctcggacttctgagtagctgggattacaggcatgcaccaccatgccttgctaattttgtatttttagtagagacagggattttctatgttgttcaggctggtctcgagctcccaacctcaggacctcaggtgatctgcccgccttggcctcccaaagtattgggattacaggcgtgagccactgtgcctgaccaagaatatttttcttaatttttctgtaaaactagttgttttagttttcaaagaaagatattttggtagtttttctttaaaatgcatatcatcatacagaaatcattgtccacgtatatggacatatatatctatataaatagattatatctatataaatatatagatatatttgtccatatatatgtccatatatatatatatatatatatatatatatatatatatgatcttttttttgatatagtgtcctagacctggaattcctgtgttaaaaaatgaaaacattttcagtctcttcatatatattgacaaatggctttcagaaaagttgtttcctctattctcttcctaacattgtatgagtttcctttcacatacttttgtcagagtttaattttatcattttcaaaagtgttacttttataaaaactggtatttcttcaatttaccattttgtgattaatttaatttttactgtgttcagggttttatcatatgcttattatttacatttcctttgtgaattgtgttcctatgatttgcacatttatcttttgtgcagctgtgtttaaattttgaatataaagttatatgaaagaggaaatatgtaatttacataaacacacccaaatatatgtgtgtgtgtgtgtgtgtgtgtggtgtgtgtgtgtattctgtgttgaaataaatggtagaaccaggacaacaggtagaggttatgaggttgtcatctgtgacacagtctagaggagaaactgtgtgggcatctatcaacttacctttttgaaagaatcttaactattagtttctggaatattcagagaagacttgtaaggccaacatggactctagtttccatcctcctgagaagacattccattatgaaatctaagtaactttgacagcaaacccttcagtcttatcattttcattagataatctaccaccaacacaatgatccaaaaatgcattatattcttgcactggagttcttcactttttgcttcaccccaaaactgccgctcctaaccacatgcttagctgctaactttcacaccaggcttatgagaacagtattttcagtaagctctcttttcaattcctttcacaatggagctgcagaatctttgagttgaaagaagccttagaggtgactaggatcaatgtatatatatccctcttaccacacacactcactgaatattttctaaaaactacattaagaaaaaaagaaaagcctaatttagtgctgaactgctgaaatattttgaaatttgtggtttcaaaatcttaacactgttaattgaaaccaatgtttctcatgccttttagtctctggactcctttttaaacattcttaaacataaacctaatttttagcataattgtggaatataaagaggttttgtctatgtgggttatatatatttattgtaaaataaactagatagaattttaaaatatttaattatttattaaataataataaatcaatatattaatataaatagcacatattgtatgaaaaacaaccagatattataaaacaaagatttaataggaatagtgtcacttttttgcatttttacaaatcttttaaatgtctgtctgaataatagatagctggattctcatatatgctttaatattctctatctgttgtaatattatataccatatagtttctggaaacattaattttctactaatgagagaatgagagagaagaagaaaaataacttcttagtactgttaggtaaataataatactcataacacttaattaatattattttgaccttgaagaatctttaaaaggttcttggggactatcttgagtctccagaaaacactgagaaccactgatacgccaacaagataaaattcttatccttaccgcagcatggaataggaccatactttcttccttataataatacttcaagtatttgaatgtatttattgtattttcatctatactattattttttaggacaaaatagacttctttaagttttccgtatttgacacattatcttgctcccttccccactacctacctccggttagcctcctctgaatactcttggatttcaatttcatttataatgtgtgatattctggactggacacagcacttcagggacctggtatcttgaatcaacaaagacttgtcttccaaacgatggtgattaagaagccaccatgtccaactggtcagccagtttttatattgtacaaatcagcaatctcagagtcaacctaaccagatttaggcaaggcacttccatgatgtattgatgtattggctattttattaatagtaatatcaataaaaataatcattaagataactgataatattcaggacttcatatgtgctagatgctatgtttaatgcatacatttattcactcttctaattcttaacaactttataatgtatatgtatttcttattcttattttatagataaagaatctgaggcatggaaaatgtaggcaatttatttgagattacagagctaataagaggcagagccaatgtttgatctgaacaacttgattctaggatcattttggctgggaattttctgagagctgtgtgtgtgtgtgtgtgtgtgtgtgtgtgtgtgagagtgtgtgtgtataaacatgagaccatattagtatatacacaaatgtcaatatatattttaaactggaatgttttaatagagtggcttatatgatagaaataagagaaatagaggaggatggaaagggacaaaaaaagggaaaagtaattaggaatattgaaaaacctaaaatgtagttctctccatattctggatactcctgcctttttcttccactttccacacattgaccagtattcctttctcctttcctaaaatagttttacagatactatagatacccttagctatttgacagttatgtttctgttcttttaacatgtctgcttctataactgtcacacttaaatgttttcataggaatcatgaaaactatagtttttcctccaacgtaaggatctcatatcacgctttcattctgaactaaccattccctctctgcagttgatgtaactgtgccatgtgaccattgtacacatgtgggagggaggagctgaattacgcctgacccctggccagagcaagagctactggccaaaggggagattgagcatctgtgttgtacttcccacgtctcttcacctaggaagtgcaatagatttctgacgagtctatgattacccactgatgaataaagacaatctccctgcacaattgcactgcaggcaagactgaacttatgaccaccacttctgtgtaattttgaatttcttagacctgaaccctgctgagtacacctgcttccctctattccttgctgaagttcattcttttcagtgcgttaatggagccaaaccaagctggtggtggtaacaatttgaataataatagtctttaactttttatcttttgaaaaatagaattctcaggagcacttttagctataagattccttcatccaattaaataagctttaagcttcatgaaaagtgtaaaagggcacaggtgcatttgtggaaatagaaggaagcaatcttgagcctgaatacattgaggtactggcaagcttctggaagtagttgaagaagacttcagttagaagcttggtcaaatggacaaagccctgacctggacattggagacctgtagccaccttctgaatccacagctgacctagtggccttgatatataatattgattgcaggatagttttgtgatggttaagattgcaggctttaataactagatttcttggatttaaatcccaactctgccacttactgcttttctctgggaagagtgattaaccgctttgtgcctcagtttccttatctttaaatgaaaataatttgagtgcatacctcacaggtactaaagaataaatgattggaaaataaacattattgaatatatgttagtaattattattttcattgttatgctattattatttttattattaatgtatgacatcatgttacctgcctaacaacagagtattgagacaaaagcaaaatattttttctatattaataatcataataaacaccactaatgtttccaaactatacttttttttaaccctacatgcctttagttcatggaaagaaaagtatgttaaagatgctatgggggtgaagagaatgataaatattattatttaagacaatgtttgctataatttttatatatcaaataagtttatatgttctcagaaaattggtctttgaataattgaggacagtgtgggtttttattctgtttctggaaggcggtgcctgtggctgtgagaaataaggaacagaccatcttcccacatttgagagggaactatacaaaaatgggaaaatatttgttttaaatatcttttggatgtgaattttgtcataattgcaaactgttttggcagcaaaacgaattatttcggtagcaagaagagacttaacgatgctatgtgggagaaaaactaagtccctactatctttctgagagcacgtctcagaggacatgatgtgatcctgtaagtttgtagcaatcttattgtgccccagtgcagacactccttcctacttccctgtagaaaacagaactgtttttttaaaattctttctcaactaccatttttaatagtcatgttacttgatgacaaaatctgatacagtggcctttaatactatatagtgaatgatttttgaaaatttggaaaactctaaccgaaatataccaggaactgctctcctcttcatctcagatgtctacttcctcttcagacctgtgtgtgaagctctagaataggctgtttgggaagactacaaaatctcctctccgaggtcccttataaccctgatagttgctagatttgaaatcaaggatttattctccccctgccctgagcctctcccttatgtccacataggctctagcattggaagaaatattttaagatctctttctttttgactttgtgatactcccatattaaaaatggcttatgacaggaaaaggacaaatatgctatattttttcccttaaggctaatgttctcgggactaccatgaaaaatccaggtatcctaatctggagggttaccctttggatctgaatgggattggagtcagtacaaggggtggggagtgtttttagaacatcccggcagcatttttttttttttttttttttttttttgagacggagtctcgctctgtcgcccaggctggagtgcagtggtgcaatcgcggctcactgcaagctccgcctcccgggttcacgccattctcctgcctcagcctcccgagtaggggggactacaggcgcccgccgccacgcctggctaatttttctttttttttttttgtattcttagtagagacggggtttcaccgccctgctgccttttaaagcaatttaatacatgagttaaatatcatattttaaaaatagattttattttttattataattttgatgaatgcatttttgtcaaagttgtcaaagtcaagaagtcattattgagaccctgagggtaaggcaggagccaagtgagaacaagcagatgtcaaagatggtgaaaaactagaacagccaggtcccccaggcatatacagagaagttttgcaatggcaggtccccgtggttgtctgacccagacttccaccttgaggtaactggggtaactataacgatattttcatcctgatctcttcatgcagttatatgtttccaagaacagataaactgtgaacttaatacaagtgtctcctttccttggattctcaccatctgggtggtaaacatgacagaaacattcaagtatgttcaatgtagtacatggtaacaaatgctttagcacagactagggagcatgtctggcaacatgttggcaaataattaaattggcacattcaggataaaatgagaacatggaaaaacagaatatgattctctttccagccctggaaagacatcccaagtgtacgtattgtttatattatgttattagtatatctttaccagcaaagggcaggtcatcatcattcaatatgctcaaatactcacatttaaagacataggcactttgagaggccaaggggggagaatcacttgagcctaagagttcaagaccggcctgggcaacatggcaaatcccatctctacaaaaaatacaaaaattagctgggtatagtgcctgtggtcccagctacttgagaggctgaggtgaaaagattgtttgagtcgaggaaatggatgctgcagtgagccatggtcacaccactgcactccagcattctagcctgggcaacagagcaagaccctgtctcaaaaaaaaaaaaaaaaaaaagagagatgtagggagcattgtggacatctattcatggagggttaaacaatagaattagacaaccatgtgtatgtgtggaatcatgtgttttttccacacatgtaggaaggagaaggtaggaacaatgaaaagattcttttagtgatcatagtggctccaaaacagatgctttggtatatgtaatacccatttatcttataaagaaaataaagaaataataaaagcatttgctaaccatgttagatgctatagtaaatgtaaaaataaagggtctgttaatctattaactgagcttaatatatgatgtgatataacagcagccttcaaatatgcggagggctataacagagatcatgatgaacagacttttattctggcttagaaagactagacacagaaattaaaggcataaattactctacaagcaaagcaatcttaacataacactcctttcaaggtagactatgaatatttccaccaataatatatttattaaaatagattccttttcatttgtctttttaagttaaacataatcttgcttgaatgaggatgagtataagatacctcagtcatgaccttgtagatcactgcatcagccagctttgtattcagctatcaaacaaaataaaatgtgatcactagtggttcaaatacattggagttctacaactaaagatctaaaggaatgaaatccatgactagtacaaagacataataatgccctaagcaacttacgatattttgatgtttcttttctgacaccccattcgataggcttttgtcttcatgctcagcatctcctatctcatttgggatgctatgcgtccacacctttcatcacattccagcaaaaagaaagggaaggcaaagtggtaatatatttttcctagtgaggttttgcctctttattcagggatggaaaccttccccagaagcttttgtctacacttattggccagaaatttaacatataaccattcattgctgtcagaggtgggaaggagtccctgagaaagaaattattcttgttttccagcctctattgtagcatttaacaaggaagaatgggattatgaatagctttggaatgtttatcatgtcttctagttgccatagctcatagtcattttatatgattgaatctatattaggccttttatctgacaagtttcccaatgtacaaagactgaaaaaaaataattttcctcagatgggaataaagaatgtcaactggtctggccaagtgagtttggaaagctaagatttagccttgggtgcattattgatggacaataaaggagtaggtggcactcatccattcattcagttattctagctgtgctattgaatacttgctaactgcaaagcacagagctagatcctagtaagaatatagaaaagaaagtcacagtctctgccttgaaaacatatttattttatttctaggacaagacatctacacatatacaaactgtcaattcataacatgtcatggaaacataaaagaaggtatcagtgaaagtggagtgtttaaggaaatttccatgcagttgatagaattttaatcctataatttcaataggtagtagctgtgtctcaggcattctaggcagtgcacagcaagagaaaagattgagataaagataaaaactggaaagaagtaggcaatcagtcatatttctgcaaagcaatgttagaaaattgcatgtgttagcttgtatacacaacttagcttacaatgttagcttgtagctaactgaatacagatgtgagagttaaaatatactctcctaacagtagaataatgattgttagagtggcagggatgatcttatagaaataaacattggacaaccagcaaaaacagtgaaagccagccatatggctatctggaggaagagcattccagctactcaaatccaaagtggtatcatggtgtgatgtctttttttttatttttgttttagagacagggtctcactatattccccaggctggtttcaaactcctgagctcctgtgattctcctgcctcagcctcctgagtatagtcacatgccaccatgcccagctaagttatatataaacataagcacagagtaacatggtagcaaaaaataatgtcacccaaattagggttttgaagacaatacaggagttagatagataaagaagagagggaagggcataacacaaaggaacaggaagtattaaaatgtgcgtgttatggacttgcatacaaattgagtgctttaattttgccaagcatctttcataacactataaggaattaacagtatgagatagcataagtaagggggcctgagaacttacataaacacccttggtacatggaaagtaaatataaaatggtgctgataattctaattacatagtttatagaaaagatacatgaccaagcttgaagcaagaatgattgataaggaattaggtaggttctgtataaggaaaggtgatttcagatcccaaaagggcatggctgaatgtttagcctttcagagttggggaatccatttcttcctgtggaaggattagtctttaggtgaatagatatgtatcgaagggaaattaagagagcataagaaaaccccactttacctgccatctatccatggaagcagcaataagaccacctgagagctatggtacaattaaattgaagatatttgaacacataaagtaggtgtaatgtaacatataggctcaaacatttgaaagtgatgatatttggtcattgctggcctacaaaagaaatgattttatgtgattcagtctaatggtaatagttacaaaggattgacttcttcgcaaataaaatggttgaaatagtacccaaaactagcagattgggcaaaaattacaaagaaatatctaagtggttgcatagtaaccacaaaaatgaacacacttattttcagagttcaaaccgtggtagatttgagagtatgtttggaaatgactaatgcttagtgttgtttaccctgtcaccacattcctgcataaggctctttatctctgactggtcatgctcacatctgttttctgccagccttttctggtgcccgcaggcacccacctgcacccaatgtcctccttttatgctttctggcctcctttcatgtactgtgtggtccaccatactacctaatctgctatatactcacaaaactatttacttcttttgaaaaaaatgtattattagatttaaatatatgtatttatatttcccttcactttttaaagttttcactttatttttatactatgttttaagcttccctaatatcccactgctgaatcccaccgacatggaatccacggcatggtgaatccctgacttacccattcctactagaagtagagccagaatctaatccagacctcctgccagccactcccagaccccttctttcccccaaagaaaatgaagaacatattttttgtgcaaagagatacaatcaggaaatttttttaaaatcagcttttattttaactgaatagcttacttagtcctggggctgtaaagtcaactgaatgatggagtcatttttttcaaaatgcgacatcttcttacccacttctcttattactctcatcattatgaaaatcacatttgtgaaaggaaatgaatttatatcaggttttctttggcatcacccaaaggaccttagtaaagaaaattaatactaattttattttctattgtgagcaccttaatacggaactgtaagaataattactatttttaatgccaaatgaagcatgtaagtattactagcttcttttttgtattaacttctatacttatctcaggagtttttatagtgatatagacattttgtgaaatagatcatgagtgaaacatagacctggtatagcttgactggggcctactttacagatttgtccttaagtactgaatataaatgtttctgcttcttattttccttagcatttttaaagaaagtcctggaagccaaaaatctccatgatgaaatatttataattattaatcactgttatatgaccttattatgtatgaaaactatattcaacatcctaaatatgaaatgtgattagttctgattttaaagatttgtgataaaacaagacaccattgatgaaatacatagaaaaaggaagacaaaatagcttgggacacattaataacttacacaaaaaattttaaaaattaaatcttctaatagatttgatatataatataccccagaaatatttacattatattttcaaagtctagagcatttcttccatagactccaaaactatttgtatatattatcatcgaaacacaattttgagagaagttggaatggcagtgcagttagcagataaaaaaaatacccacttttctttacaagtctctatctaattcatactccctattgctctttcctgcttcacaaacttcttaaaagattttttcatgtggtgtgaatatttaaaatctgtcttagcaattttcaaatatacaatatagctggccatctgtatttgtgggttttgcatcctctgattcagccaaccatggattgaaaatattaggaaaaaatgacgaaatacaacaatacatcataaaaataatacaacttaaaagacaatacagtataacaactatttacatagcatttattttgcattaagtattataagtaatctaaagatgatttaaggtatatgggaaaatatacttaggtgatgtacaaaaactttaatcatttcatagtgtatacatatatcaaaatgtcacattgtaccttataaatactcataatcatttgtcaattaaaaataatttaaattttttgaaatgtaaaaaaaaaaaatttttctagcctcccagtctacactctcacttttcactaacccatttactgctttcttgcttgttctcccagcacaccacaaaaacaacttccatgcatacaccagtatcacccccctcacccccctgtttccaataaattaaacccaatggaccaagctaaagcatttattatacttcacctctcagaggcatttaacgctattgacaacttccttcttttcaaaaccctgtcctcccctaattttcatgaaacatgaaactaccttctagttctcttatttatctcagccatctggctcctctttctctattcccttgttacctattggtgttggtatgtattccattctagaactttgtctcctctactgtgatgctatcatttagggtgaaatcaactactcccattgcttaatttgtcttttataaatttgtgacttctacatctatagctccagttctgctgtcttttttgtattaaagaccaatttctccaactatgcactagacacttccaactagtatcccactggtatctcaaattcaacattattgaactcaaaaacttcttttgttaacttgccttgctgtcatatttcctgtattggtgaattatatcagcttccatagacttgcctgagccaatataacctaggacatattctccttttcccttaactcagcattgactgacaaagaacatgctaggaagtctgtattcttcatgtcttaaaatattcacctctgcttccattgccacagctttgatttgggccactcacatttctgcagtagtctctgagattgttatcatccatatctctgcatttttcttgctaatgagaccttcattaaaattattttgtaagtatttaattatttagcagttcatgcctttccatatgacttaaaattccattgggttttgcttttttcctgtaacctaaagttacatctgggttggtcaaagtgaagcatagtaactacattccctttgatagtgctgcaattaagaccaatgaaatgtgaaggagttttagggaagctttttcctcagtcttaaaaagagacaaaaggaaacaatacccctctcctgtctctggttcatatttgatgagaatgtggcacctagtctttttgagaccagtggggtagttaggcccacaccctgtggatgtcagagcaaaaatatggaaggaatctgggtcctgataccatcatcaaaccattgagctaattccgttttgtaagataataaattccttactgtttactctgttcgagttccttttttttctgttagttgtagctgaaaccattttaactgttgttttttgtttggtttggttttgtttaatacggagtcttgctctgttgcccaggctggagtgcagaggcgccatctgggctccctgcaacctccacctccagggttcaagcgactctcctgtctcagtctcccaagtagctgggattacaggtgcacgccaccatgcccagctattttttttttttttgtatttttttgcatttttagtagagatggggtttcaccatgttggccaggctagtctagaattcctgatctctggtgatctaccaatcttggctacccaaagtgctgggattacaacccactgtgcccagcaccattttaactgtattctaaaagcattttacagcctgctaatacataacctcatctccaaccttgcttcctaagttccactctgtgttccacaaatgggattaatcacctactgaaagctctataataattcctgtcacctgaggatattgttaaaacttctcagtttgtagaagagggccttcattatcagcatcacatttattttccagaaagatatctagcacccctctaccttacatcttgcttttcagccaggaagaacaactttttctttctgaaatgtactagaatctcagtgttgggccacattgcttttttttttctaaaagactaatcgtcttcctttcccacctaactcaaacatatccctcttaacttagacattacttattttggggaagtcttccatgattaccctaagaatagggtaggcattctttctctctgcttccatagaaagtaggaaactattgcacttactcattgtaatgtggctatattttgatcaaaataattaaaaaatactgtgtggattcaaatttttctcagctactcacaagctgaatgatctcacacaagttatttattgcaccttattgtgctttctttttctctgaaatagaggtaataattatacatacttcatattattacaatgattcaggaagctaatgtatatggtatacttacatatatatatgacctagtataacgcatgatacataataagtgctgtgtacatgctcagtcaaataatggtcatttgaaaacatttattgagtaaatgaagaggaaagtgtttattttcaatacattcaaagatattgttttggttatttccattacagaggcataatcagtttactattcagaaaaatgcaagagtacatttttactgctcctccagtgatactatggaaaacaatgttttagaaaaataaagaaggtgtgaataatgattaaagaatcatacactctcaaagtgaaacaatttcccaagaaatgcggtagaataagccttttggtttctgattttttttcttaactttgcttgtatgttgtagaaagctaatctaaatttaagaaattgaaattttgaagtattaataatgtacttctctcccaaaattgttttaatgtaatgatttttgccatatggatgaattatatatgcatctagaggctaaaaaccataaaaacaagcttcttcttagtagacttttgttgtttattttgtacagcataaagcagcagtcaaaaagttttccaaacaaattatcttatgtattttgactaaacccagatttatcttcttaaaatgaagacctttgttgtagttgcatttgttcctcatatgcagtagaatgacccagcctctttggcttagaggtagtgcctcctttttacgacacttggagcggcatctgatgctcatcacttcagttggataaggaatgctgtccagtcacagagactcatgagatcatgtccaatgaaggcatttaacaataaattcacaactagtgagtgagaattttataaagcagtttcaagtattaagtagataggtaggtaagctttattatattttttaaatgtgaaattttacaattgtgaaaatttacaattttacaattttacaatgtcaggatggataacattgcctttttagtaatggtagccttcactatctgcattatgactgtacaataataacatataataatatatatagcatatatattttatatatataacataatatataacatatataataacatataattataacataataactggggctatgattgcaaacatttataagatgtggtatgaaaatgtcccaatcacaaaaacactcaatttaaaaatgaaagaaaatgaatctatgctatgctttgcttcatctttctctgaactagttacaaacaaaccttttaaaaataagctttcaatttgggaataattttagatttacagaaaagttgcaaagatagtaaggaaagtccccatttgctcttcatttggcttcctctaatattaacatttgccaaggttacatttgttaaaactaagaagtaaccatgggtacaatgctattaaccaaattacagctttcatttgaattttgcccatttttccaatattgttcttttcctgctacagcatccaatctaggacctcatgttgcatttatttcttatgcatctttagtcccctaggatttgtgacggttttctgtcttttttcttttgaagactgttcattgcctctgttagtttaatgatcctctgagatgttattcacagtaaaatagcatgtgaatttcacctaactaaaaagtttatttgatccaaagccctgattttaagaatttgaaagaaaaaaatgactctatttttcccagttctaaacattttactagaataataattgtattctttcaacatggaattaatgttgatgagaagcaaacatctaaatttaaaagaaaatatagtttgttgagggaggtaatagacaataaaatgtatttattatagaaaaaattcccaaaactttctcattaaatgtgctttatctttacttcattactaatatttagcttttattcttttaaaaagcatatgccaatgataatatctcattaataataagaatccatctaattttagcttgatcttccccctgactaggtttgattggattaaatcatcataaagagacaaaataatgcaaaaagtgataaatctataagcctcccctaaggtttcccatagaatgatcaacccaaatgtgctctttattttatgccatgaaatgacatactgtgtcaagaactgaatttcatcatacatgagacgtaagactatttttatatctctgtaaattgggtatgaattataaaagtatgctggtaaactgatcacttgagaacataaagtcaactttccctggaagagtttctcattataaaagaaaggcaagcatcttcttcctaatatctagctttatcaggtcaggggctatattctcggaagggataagtaatttctgttgtatctactaatttcatttaaaaagataactagagaatattggaagcattattgtagaactgtgtcaaagaccgaaatatcattcctaccttagactgtacctcaagatcgaagctctggatgctatctggaattaaaatgtttgcattaagtttaaaactcagtaaaataaatgtttgaaatgaaaaccagaccaataatgaataattttacttagacctactctccaaatgtgctaaaagacttgtaaaagttgttgttgttttaataactaagtcaagccagttttatttaattcaatacatggagtattaatgcgctgtatgaatgccgaaggtagtattggacgccacaatctttaggaaccatgcttctgagttttaaaatggtgactagtttagcatagattcaacataagcattaggtgttcttttgacatttgggaatcagccaatcaacaggaggaatagtaaattgaatacgaacttgaaagagaccatgtctttttttcatccaactgtgaaaaactttctttgtacaattgttaaacttaagaaacagatggtagatctgtatcagtcagtgaggggtttctgaagtacttttctggatgaatgccaagaaaatgggtttctgagacttgcatggctctggatttgttctgagctgtttagtgaagtgagggctggcattcagaacccaggggagggggagtagtcattcccattgccttgcatagagatagaatcacaggtgacaggtcattggaaaatcacttcttgagagtgggtatctttattttgagttggtatctttttgagagttggccactcataagccttgcttttgataacatttctttaaattcctccaaggaacaaggggaagtgcaaaaggaatacgataaagtgcagcattgaatgagataagcatattcaacttaaggggcacactaaatactgtaatctgggagcataactcagatttcttttcttctttgctcagtataagttgcatgatcatagaagatttatgtagaagtcagaaatcaaggtcaagagggtaggcatatttagattcttaccctattcataattaacaataaaataagattttgtgtcctgattcagagaatggatggctcagtccttataacctcttaaattagttttatctataactggatttctgaatctcttttgaaaattactaccattgatggtcactgagtgaaaaaagcagaaggatagactggtgttaactgtaatgaacatttatccaacattacccgtgggcctgctatccattttaaattctaaaagcactttacagcttgctaatacatagcctcatctccaaccttgcattcctaagttccactctgcattccacaaatgggattaatcacctactgaaagctctataataattcctgtcacctggggataatgttaaaacttctcagtttgtgagagagggccttcattatcagtgtcacatttattttccagaaagatttctagcacccctctaccttacatcttgcttttcagccaggaagaacaacttttactttctgaaatgtactagattctcaatgttgggccacattgctattttttttttttctaaaagactcatcatcttcctttcctacctaactcaaacatatccctcttaacttagacattacttattttgggggagtcttccatgattaccctaagaatagggtaagcattcttcctccctgcttccatagaaagtaggaaactattgcacttacacattgtaatgtggctatagtatgatcaaaataattaaatctaaacaatactgtgtggattcaaatttttctcagctactcacaagctgctatccattttaccaagcctcctgcatgtattactatgtctaatcctcatatcaactcatatataaactagattttatgattatggctctaaaaacaaggagactaaacctcggaaatatcatttaacctgtacaagaccttacttggctgagctaggattcaaaactaggtcattccgaggagaatataaagtccagcttttttttttccacacagggatgtatatttccaggtacagttttacattttgttctttattgtatgaacataaatatagatacatatgaaaattcgaaagcacatgaaagtgccaagaggaaatgcaataccatcttatgaaatgagaaattacacatatcttacagtgagtttcaaaattatattgctcaaagtatttttactgtggaaccataggcacaaactatagcaagagtaaatccaaaaatgtttattgttcttctataaactaactactgtgtaggatacaagggatgctgatttcaccagtgcctttaagaaggacaaatcaaattaaaaagtcaaaatgactgaaggtgataatccagatggtggtaacaataatgactaccatttatagaactttttgatgttgttcactcaacgtttctatttttattcaattataagcaaacagcagaattaacccaacattcagcaactccagatcagcttttcttacccccatgaagagctatcaatttaacaaccacagttgtaaggattcttaataagctgtcaatgagcactgctgccggtctagatggccatgccccaacaaaagcaaagccactctccctaatgctttttccaggattgctttttaaaggcaccagagcgagatactgacgcctattaaggcatctgagatgcaccgtgttggggtttagcctccatgccagccagcctctggttgtctaggtgagcgacagcaccataaaaacacgctgcgtacaattctggtattaggatcacaaaggcagagaggtgacaaatcctttttctttttctttttttttttgtaacctcccttaaagattctttgatgctttgctctattactgtgggcctggtctttttttcccccccagttttttcttctttaaactctggattgctattttcatattaatttgatgaccccatcacagtaccagaatattcctgaaaatagagttccaatttgatcaaaacataaaccagagtgagtgagtgagtgactagaattataaaggccaggcagcaggaaaagttaccctaaaccatctgactgctcaggtcttgcatgtgcaaaggggagccggaagaggagaaatctattatacatgcaacactgaactggagaacacggcttggggcctctgggacagttcaggtccctgagctgccccctacttcccagacagctgctcctgcagtttgggcacatagtcgtcccactcagcctggtaacgctttctggccactggggccacgagcacgagctcgtacttttttttttttttttttgagacggagtctcgccttgtcgccaggctggagtgcagtggcctgatctcgcctcactgcaacctctgcctcccgggttcaagcaattctcctgcttcagcctcccgagtagctgggactaaagccgtgccaccacgcccagctattttttttttttttttttttgtatttttgtatttttagtagagacggggttttaccatgttggccagcatggtcttgatttcctgacctcgtgatccacccgcccccgtgatccacccgccccagcctcccaaagtgctgggattacaggagtgagccaccttgcccggccaagctcgaacttttgacagaaggatgccattttgaatttgccactgtggcctccagatccattgctgaggatgggctcgtcacacttcagcagcctgtcctgtttgtaaaccagccagacatagcggtggagatctgtgccctccggaggcccgagcccacgtaatggagatgactgggccactgctaacgtcattacccttcatgttgaccaccaggaaatgacgccattcagtgtattggggcttcttcctgccgggagcgtccgggtctgttaggaccaaggtgtagagtttccttgactcaagatcatcccatgaaatgctggtgggtctgttaacctaggtgggcgtcagcactttgcccagctcgtccaccgtcgccctggcgtaggcgacatgcagcgagtgctgcggctgcccgtccacttcctgcaggctcaagggcctggaccgcttgctgaggtccctggcatggctgtgcaagaacgcagcgcgcagctgggagtgccactaggcaaggcgcaggcgcagcggcgactcggcagcctctgaaaactagccagggaagccggggctcatttataggattttaaaaatattattaaaggcttcacaaactgtcttgtttaatagccacaacattgggaggccgaggcaggcggattacctaaggacggagttcgagaccagcctggacaacatggtgaagccccgtctctactgaaaatacaaatattagccgggtgtagtggcgcatgtttgtaatcccatatactcaggaggctgaggcaggagaaccgcgtgaacccggcaggcggaggttgcagtgagctgagatagtgccacggcactccagcctgggccacagagcaaaactctctcagaaaaaaaaaaaaaaatagatacaacaatctccttttaactgaagaggaatgatgtaaagttatataaagttcagaggaattgatgtaaagtgaatcgtaaagactttggaatctcctactaaaatattttaacaggaaagagacacatcagtgcattttacaagcagatcaatgtggcggtatctagcatgcatggggaagggatggaggaagttgtcagtttagaaactgagtataaacattattgaaataggacatgataagtacctggaccagggtaaaggcaatggaaaggaaaaggaagccacagaccacagataggaggaattcaaggactgtgtaccgaaattcaggagaatgatgtgaaatagatgctctgaatcctctattcccaggaggcagcattatggagttaggagaaaatgcaggagctttggattctagtagacctgggattgagtttttacactgttactctatattcgaagcaatatatttaaaccagctgtgtcttccttttgtcctttataaaacaagaataataatgcttatcacatagagatattatgaggattgtataagacaatgtatcaaatagtaggtattcggtaaatgttccttctttactaaagatagagaaaccattttctgatgtacaaagggatgaagagctggcccaatatgaattttcccaaagaagttaaatgaaaaggatctcatgatccttttcaggatttattatttacgaatgttaatatattattttaatattttctatcttatgaaataattatttggtcaaaacataagacaattgataggaatatacagcatggaaaatggttaccaactagagctgcagggtatcagggaatgtgacaaggcagcaaaatgtttctacacatgtctgttttttcaggcattatctttcttgagactatcaagtgtgtatttaaggagccattcaacttacttcagtgcatttgcttgcaaagggtgcaatgtgatgtttcctactggtagggtcgtatttcatatgtggtgatagtgttgctgaacaaataggaaatatccttgcctagactatattttatcatttcattatctagtggtaaaggaatgtgagttctatttacaaataaacattttgtcttacttttttctttgtgatctattttctccaagttgcataatgtaatgaattaataaagcttagttgctggccaaatcaatggtgactttttatgtttttaaatataatattaggtttaacttatttttgtcattaaaatatcatttgtgagtgcttttcaaaatgaagtgcttctgaaataaatcacataataaaactaaccttacttttgaaatacatttttattgaagcaaacacaaatcaatctgaaattcagcattttgtagcagttaaatgtatagtcaggcagcttcaacgtcaactagagaagttgtggttttaaccccgagatagggctgattatgctggtgctatggcaacctattgcaccatttggtagcgcctgtgtgcttaaccgcatgagctgcgcctcttcctttcctataaagactcagaataagaaaaacagaagtacaccgaagagaagaaaccacaagagcagtaaagacactgctgttagcttttagctgtgcaaacagcagtcttatgagaacaacacattgaaaacctcttctatttgaaagtgtagcttttcccattatgcctgggttcctttaatgattttgaaagtaagccaagtgtttctgttcagagttttcattaaagggaaataagaagaaataagcagtgcatttatcagcctttgcttttattgtcctcagctttaggagtgggaggcttttgtgcagcctcagcagacattttattctgtttgtgagatgggagattagtttctattaggtggactccctataatctagcatttattttctgcttttttttattatattgtagttagttcacaaaaaaaagtacaattttaattcatctcctggctcatttagaaagggttgtggttggtgctgtaaacacgtttctacataactagattaaattcacagacactcactgtcctagcactgtttattttctatggggagcttcatttacctattctttccctcaccccacttcttttacaaggtataggttgatcagcaaaggcttttgtatgttttcctttgtttcaaagtacagacataatataatcataacttttttttgcatgttctactatttttccttccttaaagatttgggtaaaaatactgaaggacagacaagttcatgctaccatttttgttaggcataggcctgttcacttttcttcccatttttctgaaaaataagaatctaccccttttgtagtcattgtccagcaatttacactttttaacaataagttttaatgtgtggtactctgaatcccattttgatggttatacataatatttactcatttttgagtccctaatagctctttagcacaaatactggatttagcattaaatattttttccttacagtgcaatgcagttgaacaagcatgggggtttttacagtcagacagatctgcatttaaatctagactcattttgctacaagttctttatttagccttgcatacacgtttttatgattttgagctttcatctgtgaaaagaagagaataccatctactttgtaggatttctataatgattagataaaataatatgtaacagtatttaggacagtgccattcacatagtacccgcttattaaatagtaaacactgttgatagcaccaaatacactaataaaagatttcaccacttatgcaaacatcttttgatgattctttgttctttaatgatgatcgtaacctatcctagaggaagcaaagagctacaaaaacatacacttactaagggattaatataattaaatggtttttgctatctgaagtatattgcataaatcaggtatatatccctggatttaggtaaatgaaaacagacattttcataagaagcaaaaagataattaatatgggaacaaacctattctggaaaatgtttaaaaagagaatatgggtaaggaagcatctttctcagttgttcttaacccttgtttccatcataatcaccatcagagctttaagaaaataccagtgcacagatcacgttaccccacaaacctactaaatcagattttccagcgctggagcccagaaatagtcacctttaatctaattcccagtcaggattaatacaaataaaggattgatattttttcttcctcaggataataatactggttacacacacataaatatacataactgataacaagccagaattttgtaaactatgttctcagaaacattgcagttacattgtacaaatgtcctatagtatgtccatgggaaaaaaatgggtttgtggcaaatacttttaggagatcttgagctaaacgaagtgacataagtttctatgcttttaatatattaacacactttataaatatctcaaaagggcatgtagcatgaattacttctgaaacaaatttgactatgggacatttaaaggcacacaaatctaaatcaaagacttcaatttgaccatcattgcacaggaagcgataaaattttccccctgacttgtagataaatagtttaagacagaaaaaaagcagtgtaactgattgttcttaaatggttatctagtagcctttattaatttttttgtcattaattgtttcgttaatcaacatgcctgaaatatataacatgatgttttaaaccaaatataaaatacctacaaatgcattcctagttttgaggtgtgtgtttgcaaagtcatatgtattcacaagcaaaaaacattattgtaaatattggacaccataagtcattgggagacagctagatatggttgctatctttaaaattttttaattatttgattttattcctctcatggccacaaaaatttgccttctttatcctcaatactgctttacatactgatatttttctttattatttgcattattatttaaaagtgtgtatataatttgaaagtttaaatagtaccataaggcctagagtaagtaagaacagtcttttgctcccacgactctcccctcccttgatattttgtgatttttaaatgttatcttttattgtagtgctgtttctttaaaacaaaaaaaaagatttttgccagtatctattgacttcttctcttgatcttgagatgttgctttttataacctcttgctctttgttcatgggtgcaatgttttctcatttctgaaaatatgaattgtagttggttatcctctcttttgctccttgcattgcctcattctcccaagtgcctcttttgtttatttgagctctatctttctttcttattagaggctttgttctagtgtttcttggatgtccatttgtatttaataaaaggcctcaataaagggatgttgaaattctttggacattggtggagctcataaattcatgtgctttaactagattgaatgaaatcagaaaggcactacactcactgagtcttagtttccttatatatcaaatgaactgcatgtcaataatcactaaaatcctttgcttctgtctgagtagaaatctttggaattattttctgatgataagcagaaagtcctttactcatgagattccaaaaataatattaatatacccaatattttaacataacgtctacataaagaataagaaaattattaaatagacactatttcaaatctagcactttcctcgtgtgtgcctgtgagcaatttactaaactcttttaggtcccagtttcattccctataaaaaaggataaataatgctaactcattggcttactgggatgcttaaaagaaaaaaaatacatatatattatataaagaggtgtgcatagtgtctgctacataacatttcagtaaactgttgccatcattattatatttactgataagctaatggagggtagaaaagactgtttcctgtggttctctgaaatcataatacctggcttgtcgctgcccagagtgcttactccataaatacttaataatttaatatgatttgttagatttattgtctgtggaccatatagcagatttctagcataaaaaaagtgcaattctcttatttttattgtgcactttattattatcatgcattgctaagaaaggaaagccatacatatctgttttagctgacccttattttttgtcttgatttgcttttttccacttttgtacaggctttatgtttatggaggtcaagtatgcattctcaaccttcaaaacatgctatcattcattttagggcagatgctgagaataagtatttatttaatctattctattttacccttctgcccttgtacttttcccagatttgcagaactagacaggtttaaattccctaggaaatagcatcccatttttttttcttttttttttagcggggagggagaacgggtgatatttaaagcccaagtatgtcttttgaaatgccgttttcactcaaattgattcctagtttttgctgaaatctctgatcagggacttaggggtgtgacttcaaggtaactttgatttgtgatcatttaaacattttgagttgtaaaagaaacatattgggaaaggtaaattcagtaacaatacatgtgttagaataacacagctttgaagatcaagtgttctgttatctacattttcatctgtttaatgtatctagtcaattccattggtgattcacaacaggattataatgggaaaaagagctcttagataatttacagttttttagtgctatggtgccacctactgaaatattactaaatactcctttgactaaataatgaaaacacaagacatttaagttttaaaaaatgtagaaaatttcatccctagaagataaaagtcaaagtgtagaatgtagtaactgtaatatgtggaacactagatatattactgtgttttattttatatttatttgatgtgtttatagaatttgagagaaagctcaatgcagttcttactttgagaaatagtgatgccttctctttattgtcacacacctacacatgtgccctcttaatttccattgctatgtcacatattttgctttacctattttccacactttcccagtattgttcataaagaatgtttacatatattgtagtgtaatttgtattaaacaatctccaaatattaaatatttattgtgcactggttataaaatactttatgcaaaaattttgtttgcttttcccagatctatttgactccactaagaatatattgttgcttttaagtaatacaggaaatagggtagagtacaaggctgtctacatacataaaacaacttaggtaactacatcagttcatttgttttgcattggacaagcacagtaatatttaaccatatactccagtctaaatggataggtcatgaagtagttaaatatgttatacaaccaatcttttgttgttgttgttgttgttgttgtttttgagtcagggtctcaccctgtcacccaggctggagtacagtggcaccatcacatctcactacagcctcaacacacactcatgggcgtagcctcccaagtagctgggactataggtgtgcaccaccctacccggataatttttgtattttaagtagagacgaggttttgcatgtttcccagactggattgcttggttcaagcgatccagctgcctctccctcccaaagttctgggattacaggtgtgaaccattgcacctggccacaaccaatctcatcaggtcttttttttctatcagtgaagattcagcacagtggcttctatctatgattttggtaatgtttaataatgtttgcacatatgaagtgcaacagacaattgaagtcattgctcatgtaatttaggaagaattaaaatatgatagagaattaataaattattgcagatatttggttttatagttttctctaaatagttaagtaccttcacctactccctaccttgtttcatatataaaggcattctccaccaaagtatttgttagtgttctgctaacgttgatgtaaaaatcattagatgactgggggggcggggtgtggggaatgtcctttagatgttacgtaggtgttttaactaagctattttatataggtcacatttagcgtgttcctactttaagactggtaaaatgtttaacattaaaaagactgaaaaatagatttatgtaatctagtgcacatggcttattaaaattgatatgttgctttaagttgcatcactctagtgcataccttatttccttaggggcattggcttaaattttaaagtagtttttaatttaaaatttttattttaaatagattctatgtgtttttttcaggcacgaaaacatttttatgtcatttatcatgttgactaaaagtgttaccaaaactaaaaatctgtttatagggattttatgaccatgagaacaagcaagttgagtcttacactaagtctaaacagtgatgctgaagtcttggaattttcttttaaaaagataaaatggtgtgtggggtgtgtgtgtgtgtgtgtgtctgtgtgtgtgtgcacgcacatatttgaaatagtatataaaaatgaaataaaacatagattacaatgttttagtgtcacctaaaaatcactcagtggaggaatttagaatcatatccagtgataaatcagtgtacaagcaaacacatattcaattcaagaggcctttatgggaagtaagcatgaacatagaagaaaggaaaatgttggctctttagatattatactgttttccaggatattaaattttgctgcattaaagatgaaaagattcgaggaaattttgaatatggagcgatgatgagatcagaaaaaaatgtatatgtatgcccattattctgtcctctagctccagaaacctcttaacatctaaacaaaaggtctgtaaattttaataattgtgcttgatattagtgtagtttggttgactttcctgtcaaaatagtattctgtaataaattaacttgacacacctctaaattttctctaatatttgtttgtaccattatagagcattcactcagcacattgtgatttaatctgcatatctatttttagggtcaaggttattttagcatttgtagcactactagtaatttacttgcagccaaattatgattaagatgcatttttacttagctcatgagtttttaataaacaccttctgtaaaagaattctcatgcttaaaatttcatatgaagaggaaaggctgtaaggacaagttgatgggaaaaggggacgcctgatgaatgagagcatggcctgtaaagtcagacaggctcaggttcaagtctggctcacatatactagactggccttgtgaacttggccaagacacttgacttttctaagcttcttagggtttttgtggtgcttaagaaagaaaacataagcaaaagacttagtatagtgcctggcacccagtaaacactcaataaatattaacaattaataacaataaaatattatttctaaattattctttaaaaaagtaaatcattagaaacagtcttctccgttttggtaatttacctcttgtccttcttttcagaagttagattaaaataatatacatcatgtatttcttttaaaaaacgtattgcctttggaccacttggaagtttattaatctctctgagacatggaacatatacgtagtctgatgaatagtgtactggttggaaacagttctagtatatttactcaggcattcacagttcttttgttaaaaaacaaatagcttcacatagtgtcccagcatttttcttctcatttctgtggtaaacagatgatgaattataattttcttttatgaaactctatctatagttggtgctacacattttggtgacaacaaagtagtaaatcagaacaacagaatataggggtctgtggaattagtggtgcaggtaacattaagatttctcttttctctgtcatcaaatttgctttctgatttctcctctgtattaactgatccaatggcttccgtcattctgaggaaaaagttcaagctccttttcaaggcctacagtgcttgctccttggctcttctcctaaagctgttatcatcagatctgtttgatttctcctttgcacttactcatgcttaaaagaatccagcaattacttatcaatcacttcttatacacaagactctttgctacagctatttctctttcttctcctcctcttcctcatcttattatgtgattcatgctgatgttgatgcgagaaattttgattattagtcttaatcaggtgtatccatgactaaaatgtcattgcagatgactagatatatgtgttttatgggttataagcttatccagggcaagggtcatgcttttatcatgtttgaacctagtctccaacagcataccagcaaaacaatgtatgtttcttgaacctaagtgaactaaattaacttgtttcaagttccaaggaatgaggtgcttgcatgagaaggggcatatcaacctaattttagatatgtaagagctcatgtatttctcagataaagaagagatatgtgttgtataaagtatgttcacacactcaaaaacaatttgaatattttaaatttggtgatatgttttgttcttcacaaacaatgaaggacacttttcctttcacttcaaacatgagagctattagttattgctatactaatatttttttcttattacctcttttgcaaatcaacacaattctaagactgtaatttacaaggaaataagaacaaataaggagagcggaatgctgttaatgggaacataaacataacaatagtttacatgaaacagaaagataaaagctaactagataagaaaagggacaaaagtacaaacaatatcaattaaaaacaatatttaagtatgaattattaagaaaaagagaaatgtaatgagaaaacaagaaagtcattatgttaataattatgtatcacccatcaatgatataaaaatatatatatcaaaaatgcattttacttcaaggaataagccagggaatgtcattgaagaatacggggtgatgctccttggatggcaactctgaaggaagaaaatgttttcacatcagtttgttctcagaagataaaatataaaggcagaaagtcaccttaagtaccagctaattcactttcccatctgatctctgattctctttaacaacctgagtttacagtcatttggaaaagaactttacaatcttttaaataggcatttactaagatgagggatgaaaacattgcacttcactgtagactgaatctagttcccatcatgccaagaaagctgctcttttcaacatttccacaaacccagatgataaatccagttgacccatgttaatgcaccatgtttatcctgcatgtgaatccccatattatttgacttcaaccatttccttctcgaaacaccctctactctttattcttgtttgctacagttttcctcttacttggaaaatttgattacctatgctggctctctccttaatattcactgaacttcaggattctatcctggacacttctcttttatgtagttcggtgatctccttcacctctgtagctgcaaaatgtatctatatgctgatctatagcatcagcccagatgtatgtcatgagctacaaacctctatattcaaatgctattatacattttcacatgaaatctcaagcaaattctgattcacctctctactcactgtttattactctcaagttcagtgaaactataactcactagcatgttaaactatcaatctagatattttccttattactctttctcctttattctcacttgaaaggatttacaaagtcttggtgattcttgagtgtttcataggtccttttcccccaacctttcttttggggtatactcttcctacgtaggacatcatctctgtctgttttgctttggttttggtctcctgattttcctgcccccacctttgctctttaataatccattttccatttcctgaaaggttgatctaaaattcaaatgtttctcctttaggcctccctttaaagacatccctttaatggatatctaaagcctgtaagataaatcccagcttcttattcttctgggaccaagctagctatatgcaatcctttaggttgtagcttaaatacatccaagaaaccctctgtatcaactcctttaccagccaaccaccaactctggaaatataaataagatgatcctgttatgttctcctttagcacattctgtatcacctgtcatcacactgtattgattgattgtttttgtttatatctcacactaaattgagctcattgagggcagggaatttttatatgttggtcatattatatccctagcatgtggcataatgtctagcacaaaataggtgctcaattaatcatcattatctaaataaataatgcatttgggaaaaaaaagtttcaaaagtttttcaaaagtcttttgcaggcttgaaattaatcccaatagtgatcctttagtctgttatgtttctgatttagcctggggattcaaaaaataaataacataattttgatatatttgggctttgtaaacatggtactaagagaggaaatatagtttcattagggtaaaagctactgaaaattgccacttggtgaatgttctatcatagacttgaggtacatataaaaatctaatatatgtttacattaatatgaatgaaatttgaaattttctaagagatttttgtttcttctttgcagggcaaagcccaacaccttcccccactggtaagaattaatatttatatttttactaattttattttcttgttgcaaagtttatatatttaactacaattttctattattaacactgaaattatttttaaggataaattttataatcatgagtgattcttgacattcacttgttcttaaactttctgcttatacgttatagagtttaataactacctaaacatgttattaaatttgtatatatattttgtgtataaatagtaacttttcccaaacttgacagtaaatcacacaacaggtttctactctcttttaatattttaagactataaaaaaatgcatttaaattagataacaaaattttatagtctgaaagcaggttaacagctgtctatgtatgttatagatatgtagataacagatttgcatatgtctatatttctttaagagtatgttgcttttttcaatggtatgcaaaacctttgagactattgagatatttttaaataataattttcaaattctactgaacacttcaatagtccttataaatgtcttaatcatgagataaatttaaaacacagagatgctgcaaataaattcatacatagtacatacaaaataagagaaaaaattaaattgcagatggttaaatatcacatcacttaactgatgttactgaaaatgtattttcctgcataatcatatggttgacagtatgcattaagaaggtaagtaaaacaatgaagacaattttgatttaatatggtaatgcacaattccaactaacgtacattcaacagatcatgaaattgggttattaaaatgaatatttttgtcattaaataaaaattccgtccaaatgaagaaaacaaataaccatgaaaatagtaacaaaaacacttctgaatctgcataagaactatatttccttatttttaaagaaggtctaacacaattttacagcgtttagcatggcagtgatgttttataaataaataaaagtcattcttgcatagtagattgtgattggtttatgccagctactcaaatgcaacttagtatctccaacttttacagaagatagattcatctcaaccataccagatggttatttttgcaggaaagggataggtataaggtagaatggggagtgattctttaaaatgacacatgactcatcaccttattgagggagtttctgttatctctgaattgactctattatgacaagcctccaagtgatgaaaccaggtaagttaaaactgttaaccaaaatgcaaaggaaaatggtctctcccaaatattggccacaacaatgtcatcaatggaaaccaggagaatttgcaaagtggaggttcaagaacaatgtggaattggcaattgagtcaggttttctaattttaaattcttatttgtgaaagggaatgtgaactgaacttaagatgtgtgcaaagatatgaaggagagtagttctctgaaaacctttctccctacccctgggactgaatttgcttggctagaagtaatctttaggaatgctactcatcaaaatagcgtggtactatgtattagtctgggttctctagagggacagaactaataggttagatgtgtatatgaggggtagtttatgtgattgacacacaatcacgaggtgaattcccacaataggccatctgcaagctgaggagcaaggaagccaatccaagtcaccaaacctcaaaagtagggaagctgacagttcagccttcagttggtggccaaaggcccgagagcccctcacaaaccactggagtaagtccaagagtccaaaagctgaggaacttggagtctgatgttcaagagcaggaagcagccagcacgagagaaagatgaagaccagaagactcagcaagctcacttctcctaccttcttgtgcctgctttttctagccgtgctggcagttgcttggatgatgcccactcatattgggtgggggtgggggggttggggagggtctgcctcccccagtccactgactcaaatgttaatctcccttggcaatacgctcacaggcacacccaggaacaatactttgcatccttcaatccaatcaagttgacactcaatattaaccatcaaatactattataaggagaatgttgcatgattttccttctagtctgtttgtaattcacatctaatgaaagagtgagagtggacgataaagggaacttgttgaaacatttctctcaaagcaaaagggatcattggaagcaggcagacaccagaattggtttaacctaaaaataacaaattaataattatcaagtctataatgatgacagtgacttaatgtgaatagaaagaattctaaactctctccttccttcctccctcccttctttcctactttctttccactccctttctcccacccccttttcttttcctttcttttctcccaccctctctccctccctttcttttattcaatgcatagtagttgaaaaaatctaaagttagacctgattttacactgaagactagaggtagttactatcctattactgtacttagttggctatgctggcatgtcattatgggtaaaagtttgatggatttatttgtgagttatttggttatgaaaatctagagattgaagtttttcattagaaaataacacacataacaagtctatgatcattttgcatttctgtaatcacagaatagttctgcaatatttcatgtatattggaattgaagttcaattgaattttatctgtatttagtaaaaattaactttagctttgatactaatgaataaagctgggttttttatttatcatactatttccattttcttctctagtaatattgcaattttcattcttaactctttcctgtcctatcatttctactccttttctagtttctctcattctctccctttttccatatttgtgccattgtcttttgcccaatcttgttgaactgatttaattattttttgttgtgtgatatagttcagtttttacctaattaaatatttaaatttttttttttgcttttcaaaaagtaaatatatgttaagcaaaaaaaaaaaaaaaaattaaatacatctttataattccaacctccagagatcacatgagcttttttttttttaacacatttggtatatttttctattcttttattaagaaaatcacttttttcagtaaaagagcattaaaaaaactttaaaggactttaatcaacagtgctgatttgccctgcagaattttttttaccattgtacactcatgtcaactgtgcataaacttatttcactactactttgtcacatattttcctcttcttaaagtaaacttgagctgtggatattatttcagtattttaaattgtatctctttgttatcatgacgtcaaagacatttttgtagactttggttgtttgtaaacctagttgtgagttttgtttttcagtcctttacacacattttcattgctttgtttgcttttaatttattttttaaaaaatccatgaataggccaggcgtggtggctcacgcctgtaatcccagcactttgggaggccgaggcgggtggatcacgaggtcaggagatcgagaccatcctggccaacatggtgaaaccccatctctactaaaagtacaaaaattagctggatgtggtggtgtatgcctgtaatcccagctacttgggtggctgaggcaagagaatcgcttgaaccagggagtcggaggttgcagtgagccaagatcgtgccactgcactccagcctggtgacagagtgagactctgtctcaaaaagaaaatatatatatatatatatagatagatattttttcatggatatatatatatccatgagtaaatggaagttttgtcttttttttcccctggaaccctagccctgctaaaaaccttctaactttacctttctctatccttttctttatctacaactttttaatttttttaatcatctttaccattatgcttcatccttctgaactcaattgctttggataggcgagaagctgctttcaatttcatttccccatttttatctttagctaatgttctgtagcttgttttagatctgtgtctacatattatatgtatctctgtatgcatcaatatttgtatatatgcatgcatatatgtgtatgtatatttatgaatacatatacacaccatatacatacacttatgtatggtgtgtgcatatgtatgtgtagatatatgtacatacacactatagtggactggggagttagtatactgggaggagcatacatttagggtatgattcacatatttattttgtccttctcccattttccattaattaacaggattgactacagcaaagatgcccagtgttccactttcaagtgaccccttacctactcacaccactgcattctcacccgcaagcacctttgaaagagaaaatgacttctcagagaccacaacttctcttagtccagacaatacttccacccaagtatccccggactctttggataatgctagtgcttttaataccacaggttggcacacaaaagttgttaacttaaatatcagggaatgtcatttagaaaattctacagttatcagtacaacttgtctttaaattatttgcacagtttctaagtatgtgattttattcaagtgcagaaattgcaggaaattagtatctgtgaaatatagatcgactgaagtaattaatgcatgttgttagggagtggagagagaaaagaagggaagcaagatctccaaggacaatcaggaggggaaatttgttctagtatcctctgatctatacacactcgccatgattctcccgcttggcttcccgccacctggacagatgagaatttccctagttcagagattatcagttctactctccttggaaggtgtcttaaatgggagtcttcccatttctttgtttcactctagattctctttatccaaaaattgttgaagatagagaatgtattatttttaaatccactctgagaatcgacaacccaattttgttatttgagtttcttttaagagcatttgcatcattgaaaacatttttaattaaggttgtgagttctactggtaaattaaaggcaatgtagccatgttcccgggaaaaatcagattgatgcaagagatatttttgccaaggaggggcactatgctccttagaatactgatatatgtatatgctcatttaatgtttagcaataggtctgccagtgtattcagactcagatttaccatcagtagagtgttcatgcttttctgaaataatgtgttatgttgacttttttgtgggcaaacaggtttatagacatactctgataaaagatactaagctatttgaactgtttaacaatgccatttatcttcgtttgaaaaacaagcatatataataccatcacagaaattttgtttagggtacatcaaagtattttgagtaccttactgatgaagtttattggatatagtaagcagttaaataaatggtcagtgccttcctacagcaagtacaagactgtgtatttaatcttccatttgtttccctgtcaccatagcagagtagtaactaggacctgtctaaacactgtaaaaatttgaacacattgcccaaaatttttacaaaaggaatgcaaggatgaaggtgctgatgactaggtggaacatctcatgctattttattattttgtttattgcctgagtagtgtcacattgagttttccttttgaaggttctgtatttcacgtcacatgcacaaataaaaacatgcaacattcttttcattcccacatttttaaaacctaaaaccacttaagccataaatttacaggtagagcaaagtatgagaaaggtttaaagttgaatagattgaaaataaggatgaataattttaaaatactgatttgttctagcaaaataatactgatgttgaaattaccttgaaaagttcatgctttcaaataaaaacacactttcttttctagaaaataatcttttcatcaggtgatacttcaattatctattggaataaagtctatatgagttatttaatttatgattatgattgatttatactgctgaatgcagtcaatttttttcatttactgatataattgggggaaaatcctttaatctgcatttctaagaatattattacacactattcaaaattgttcatttttgaaaatggctacaatgaccatccatgtgcataacattaaatttaattatgtaattttattttataaagatagtttatgactatttcaaagcattttcaatatagatgggtatgtgtgtatatatatatttgtatatactgttaagtatatataaagtatatgtatgtgttgtgtgtatatattttaatcctatgtatacatacatatacatatatacatataggattaaagtatataaaatgtatactttatatgtacttaaaagacacacaatgaaaataccctttaaattctgttccttaaagatacctttttaaccattgttgtatatcctccaggctctcaacatatgattttgtgagtatgcaagagaccgtgtatgtaagcatggacatgtgagattgtttccacatgttttcaaacactagatattatcaaccttttaaaactctgccagtatgctagttagaaatatttcatgttgatttacatttaaaaaattgttcttaacactgaacactttttcatataccttttggcccttctgtatattaggtagatgtctgtcacatctcttgtccatttttaaatttcttcttttctttgtaatttgtaagagatactagtacattggaagattcctttcttattctccctacaaagaaatgtcccatctgtcagtttgtagagttgatggagaattcagaaagctcatagtgatgtgaaagtcaataaagccacctggaaacacgaattctctatggctgcatccagctcaggaaacctcccaaggctatgtaaatagaggactcaggtgcctgtcactttccagccaagcaaatttaaatactgacagacacattttaacagattcagttacttcacagtttggtaaactataatcgcaatttgctccttataacctcttagtaaattattcatctccagtgggggaagactgatgtaatgatctcactttcctaccttaggtgtttcatcagtacagacgcctcaccttcccacgcacgcagactcgcagacgccctctgctggaactgacacgcagacattcagcggctccgccgccaatgcaaaactcaaccctaccccaggcagcaatgctatctcaggtttgcgggtcctttagacttgtgcaaatatgaaaagtacatgacgactacctgtatttaagaatggtgtgaggaaatctaaccacttattcaatgtgcagctattgctagttgatgaatttggaatttcagtcactcttaggaatatgaaaccacagaacaaatgtccttttaacagagatgaaataatagtgagaattgtgagactacagcaaaaatctgctcaggaggaaagagttattcagaatagtctattttttatatatttcaggcaattaccattctacagggaaaactttttgttagaagtaagaaataatatgcataaatctttacttaaagactttgtaccaacaaacaaaagggtgaagagtgattcctattatcagtgaagggcagtgagaaattgtaaccacaatgaaactgttatttaaagaatgagaaaaaaagaaaggaatgggtttatttcccattcaaacattaagaatctttcaggatggcatctctgtgtttataacaacaatgcagaatatttcctcccttttcttttcaaaattagtgtccaaatcacttcttggtgtccttttatatgcaagaaaaacaagtatgtcttttgtcagatcacaaatccacacagtctcgtatataatttcagtgatctgagtgcttgaaagttaaagatataaatggtagacctatgtagctggtaggaacatggtcttgctttaggtaggaatcaaacacatcaaatagaataattattattttgcagtattaaaactgtgcccttggcataaaaatcattccaggcaatccacactctttaaacaagtgggagaagagccgccctcaccttcctcattccatctagtccagctgccatgggaaccacaataaaaatatttggagcttttagcaaacccacagatccagaaatagtggaggggcagaaactgtaaaacaacaaaaggggactgacccctggggctggttgtcacacagactagtctgctctgtcctgatcaaggaattcttcttctcaaagaagtggctaattccactgatgaaaaatctattaggattaatcaacctaattaaaattgtaaatgccgtccataaccaccactgagagtacctacataacaagggaaacgaagttttcaagtgaggaggagggaaggtaggaagtttcgggaggttgagagtggaagcctcaaaacagcttgggagcagggtctgctagagaggggagaacagatcaagtgagtgagaggagtgtggaaaagaaggtggaaaaaagctgatttcaaaactctgcagagggccagttctatgtctgaatgagttttttaaaggatgaataaatgagctttcctcactcttctacatattctgctggagccctcctctggggatccagagtggaaaacctcatgtttatgttgtttattctattctatggtttagttaaatttcgtggtttagtggcttttgaagactgagctgagaacccatgctcaattatttggaagatgcattttcaattctaatggaatgtatgtgtgaaattatagactgtactgcatttgtaattggtagacacctgcaagctcaaatcaaagccatgttcagaacgtgcatgcatgtatcactgcagaaatacagactctgcctgcaaatgtgagactaatctcacatcattgaactgatgaccccagggatcttgacagaaaataacccaacaagctcttgaatagagggcagctcatatttcttttgctttttccatggcaactagcatagtgctagtcatctagtaggaaccaaatgaatatacattgattgcctgtgctgtaattctggatgtgatgttgggcaaaggtgtaaaatacattaggtaatttgaagcctgaaaatggaaagttctaacctagtacaatgtgcagtttctttggctacaacactagattctataccaattagcaactatgtgattgaaaaataagagaatgatgccactgtaatgtggagtttgttggatttcaagccaatttgatttttcctggccagggaagcctgaattgtgaaagtagaattgtaaccttcagctggaaaggaagaaaaagaaaacctttgagctcatgctgtggcccaggcaggatcccattcagctctattttaagaaaattaaaactgagcacctgcacccagggatccctccccagagaggtgtgtgcctgcaaggctctcagcatgtatcaagttgcacttcctcctgtgccaaccttttacactcagagctctacctccatctacatggtctcagcaccactaagacagcaccagtctctactgctttgatgcattttttatattgcctaaggcagcctgcagcccagagtcttaggcttcttgggctgtccaaactatatatttttttaagttgtgctctgattatgaagctgcataggtttccagttgtctgcccctaaatgcatctttcccataagccctggtatttttggtacagttctgtagaatgcatgtgtcgtggtatagcagaagtgcttgaagatttgtttctctgccttatctttagtaattgtgtttatgttggctatctggctattgcccttgcgtgacagacacaagtgacagtgctgatggcccttctgattgcagatgtcccaggagagaggagtacagccagcacctttcctacagacccagtttccccattgacaaccaccctcagccttgcacaccacagctctgctgccttacctgcacgcacctccaacaccaccatcacagcgaacacctcaggtctgactatgctgctctagtagtgtcttcagttatagataatgaaatggaaactcaaaactttaatgtagctcttttattttgtgccagatattatttgtaggtttcccattttacaaatgttcacgtatcaacaccaaattatgcaaaagaaacttgccagtaagctttttctgggcatattttattttactattaatattataaaagtccatggcaaagaagaatcaataataggccttaatgtcatatagctctgggatcaaatccaatttcttcaacttcgtagctgattacagggcaaattactaatactttctgcatatcagatttgctttctgtaaaaatggacataataacactccttttttaattatgtcaaaataattaacgtgatgtctgaatatgtaaaaatctggtatgtaataaatattttaaaagagtaattgtgacgcttattagaatccaagtatggaaagccgtgaatgaaagggaaatgaatagtctgaggaagattgcatatcatcaactaagaattatatcaaggaatgaatagttttccctcaatttatacaatgtttagtttaaataacttgaaataaatctttgattcactttattattttaaaaacaagcgaatgtcaaatcaaacgaggactcctagagcaaagatgccaataggaaattatctttgctaaagagtttttctttcaccttttaatataacgaattaattagcttttattcttctattcattttcttgcagatgcctaccttaatgcctctgaaacaaccactctgagcccttctggaagcgctgtcatttcaaccacaacaataggtgatattaccctcagtcaggcagccacaccatccccatgtgcctggtgatgtgctctcacaagggccttccacccactctacctcgggctcctttctttaagttgcattaagtgtttgaatcctgagggtgatggaacagcaggaagatatttctctgcttagcagtgcaacagctgatgagatcaggatgtaattgttactgtcataattcatcagaaagcatgtgtgagaaacaaccacatctactagaactttttctcacaggggtttaggtcttagtaaggaaaagaacaagcccatcaaaggggctgtccattgcaagtggtgagcatcagacggctgatggcagagttcccgttaagcagtgagagggcgtggagataaaggaaagagaaactgaggaatggctgcagcaatggtggtatctgtgaatcagcaagtaagctgatcagagcttgcaagcccacaattctcctcaaattcttccaacccaaaatcaagatgagcagagatctcttagcttacacaaagcacatgttctcccaattattcaacttaaatgcctacactcacacaagatactgctaaatttgttgacagagcaatttgttaccctggatctagtagatgtgcaaagagcttacaaaagttaatctagagaatgaagcagtctttgcattttctctgacttttttttatgtaaatgaaaagtataaacttcgtactatgggggttataattatataaattaacattgagattaatcaaaatatgaagacctttaaaatatttttggctgtgtgaatcttcagccatgttgccataccgccaattagatgcgtacctaaaagtcttaatattgttaattgtatttattgggtatatttatgaaaaattttatagaattagctcattcctttataatgctttaagttttgaaatgaaaacctgtactaggcaaatccttcatattctgttaaatctaactagatagactttatgaagtagaagtattgtaaatcagctttcccaaaaatgacatggcagatattctaaagcaaaattttaataatttacattttttttctccattacagctactactccatctaagccaacatgtggtaagtttatttacttagaatcagcatacctcactttggaatagcactttaattacatctttctttattccaagctttcaggacccactagtaagctaaactcactggctctaatttctcaccgatgactagtctcaaattagtaaaaaattactagctacacatggacatagagttgggaatgatagacactgggaaatacaagagcgatgatggagggaggaagacaagggttgggaaactacctatattgggaactgtgcctacttgctgggcgtcgaattcaattttactgcaaacctcagcatcctgcaatatacctttgtaacaaacttgcacatataaccctggaatccaaaataaaagttgaaaactaagttttccagttagacaactttggtaaagccacttaatttaatttaggtatttgaaaaaaaaatggaataacagcaagtttgttggtgagggggagggggacaaggattcagtgtgatgataaatataaaatgtggataataccttcaaagcttatcaagaagaaaaatctctctttttctctctctttctgtcttgcttgttaggggctggctcaaagcagatacttgaaaacagtttgtctctctttttttttttctcattttcttccttgattctcagttgaagcaaagcggttcttcatggtcagggcttattcctccattcatttctaagtctaaccactggagtcactgccttcagtagctttccatacatttagtgtaaagagtggccttcatatgtctgtttaattaatatgatcttttgtaatccggttgtcattcatctctcctcccgcctcttgaatcattgcctccttatgttcttcacttaagtaatatggaaccactttcagttttcttttctttctttctttcattcgttagttctttctttcttttttttttttttttctcactctgttgcccgggctggagtgcagtggtacaatctcagcttactgcaacctctgcctcctgggttcaagtgattctcctgcctcagcctcccaagtagctgggactataggcacatgccaccgagcccagctgatttttgtatttttagtagagattgggattcaccatgttgcccacgctggtcttgaactcctgacctcaggtgatcaacctgactcggccttccaaaatgctaggattacaggcatgatccaccacgcctggcccacttacagatttgtaaacacatactgttccttcctgcctctgtggccactcctgctcttcctctacaattggaattctgctccaacctcatcccccaaaccccatgtctatttttctatttcctgctcatattttaaaacacaaactaagtcactttctctggaaatcctgtcctatacctccaaatggaacagatctctctctttctagtgccacattatttcctgcataatcttattttagaggtttgtatgtctcctgcaattcatgcttgtgtctgcctccacactggattatacatttctaaaagctgattatatctaacttgcctttgaattcctagtattggtgaccatgtcttacatatgacaagggcttaataatttttgttgaataaaaacaaatgaataaatttatatttgttgtaaagatatttttatcagtcagcagaaattgttgacactaaacaaaggtgctttggaggtatattatcaatcataattttacccaagttaaggaaagaatgagggcttctgatccctgagtaattaatgccccacatatatcaagaaacaggtggttaataactacgttttagaaaacaagaaaattataaagcaagaataaatttctcaaatgcatcatttatttgtgcatcaagtcaacaagtaactagtgagttcccattaatgatacatattatgcatactcctgaatttacagtgataataaaaatagcctagactttgctctcatggaagttccaagtccagctaggaagacagacacttatctggtaatcatccaaatataaatttacaagctgaggtccttgttagggcagtaaagcacagataattacgaaaaaaatgatatggaggcacctaatgtgttttttctttttcatgttttttggggatatttggttagttgatttgatattttggcatttgcattaatgtagttttatttattctggaaaaataacactcaatgttctattttcttttagatgaaaaatatgcaaacatcactgtggattacttatataacaaggaaactaaattatttacagcaaagctaaatgttaatgagaatgtggaatgtggaaacaatacttgcacaaacaatgaggtgcataaccttacagaatgtaaaaatgcgtctgtttccatatctcataattcatgtactgctcctgataagacattaatattagatgtgccaccaggtaaatatcaatttatttcttttaataaatttataaaaacagtacacttttgtgtgtggtgttctccagtggtcacaggagctagtctggtgagagaacagggctgagggaaaggaaattccttggaaacaagtgggtgaactttctgctgtcttaaccaagtaaaaatgatagagtcaaataagccttctgtttacatccattaatcaccacttctacttatttaacagggagatgtttatgtgcactaaatatagtttatcctgctaagtgattgtctgcaagctttctttattctcctctacttaaatgaagtattaattatatatgtacatatatttattcttttaagtacaaatttatctgaaatatattagggagaaacataaaggatttgatgtgtatgggaagaaccaaaatacattcataaaaaggaaggttatggtcatgttagtgagatcaagttggttttgtcagctaagctactgcttggaaagaggagggggtgacaggcgtcgggcagactctggggaagcatctcttagccaaatgcattctggaaaagggattccagagccgtgtaatttttttaaaaagtcatatcatttaataattcaagactattaataaatttgttaacatttaaatatgttaacatcaaatgtattttgaaaataaaatccatttaatttattcattttccctaaatattactgagataaattaccaattaaacacagaagatgacaatacttaaaaatgcatttcccaatagggaaactcccaatacactttataataatcattcaattaaaagtaagtaaagagtaaacaaaaaatttaagataaaaacaaaaatacaaaatggaatgagtgttttttaaaatgtgcgaaagctacaattttatcaatatgtttgcttgcatttcattttttaacgtggtataacttataaatgaaacactaccaaaatatatggtgctaaaaataataaagtaaataataaaagaaacaaatccctagagttattagacttttcccatagcaatctcaatccttgccaaattctatgtcattagcataatttcagtggctttaactgacatgttaggaatgaatgagggcttaggatacacattatgaaatactaatcaagtttatttctgtatcttcttgtcaggggttgaaaagtttcagttacatgattgtacacaagttgaaaaagcagatactactatttgtttaaaatggaaaaatattgaaacctttacttgtgatacacagaatattacctacagatttcagtgtggtaagaatataacattgaccagagaatttttttttgtggcacaatgttgttctagatattatttaatcttactctctgccctttctctcttcctccctgcctctcttgttctccctctgtttgtcttttttctttcttgtctttttcttggtctgtggtatatttagagtcaaataattaaattacctatacaattcaaacaaattcacaaaataaatgaatacttttcatgaaaaataaatatctaaaaattgaaagtcaattaatttacaataattttcttggcaattgttatacacaggcattgttgaagagatcatgaaagaagggtgttataaggaaatgataatacacaaactctgttatgaagtaaggaaaaaaaatacaggattgtatggttcaagagtttactttttccatcctgcatcaacaaaattcatacacaagttcaagaacacttaaataagaagaaagcagaaaaagaacagcaagtgcatctagggatatgtttggatttgaattgaggcaactaataattgagatagtatttttaaagtgtatttgaatttaatgaggtgaactctcccaccctttgacttaaagccatctgccaggccatagctggcatgacagacagatgtgctcaggtgtgcatgcgcatgcacgcatatccacagctacacacatagaggatggagcattgcgctgggtgtaatcatcacctaatcaccatagtatagattcatggccatcaggcaagcagacaaggaaaggaagagcaatcatgacagaccaatgataaaatgttctctctagacaatctattagatgaagactaggtgaggtgcaatttcaactttaagttgtatttgctatatacagattgggcatccctaatctgaaaatccagaatccaaaatgttctcagaatccagtactttttgagtgccaacatgatgcggctcaaacaagtgaaaaattttacacgtgacctaaagtgactggtcatagtcaaaatgcagaaacataacacagaatttagtcagcatccccagagaaaaataaatgacctcaagctatgtatatgaggtatatatgaaacataaatgaattttgcatttgaacttgtgtcctcttcccaatatattgtatcatctaaatgcaaatattccaaaatctgaaaaaaaaaactaaatccaaaacacttctggtgccaggaattttgaataagggaaactcagcctgtattttcataaaagttgaatgtaaaaattatttttagggttttttattattttggtaatttccacagatgtttcaatctgataaatattaaatagagaattataaatgtgaaattagaaaataaatgtgtgcgtgaaatattgcatcgatatattcattcgaaatatttctttatttcaggtaatatgatatttgataataaagaaattaaattagaaaaccttgaacccgaacatgagtataagtgtgactcagaaatactctataataaccacaagtttactaacgcaagtaaaattattaaaacagattttgggagtgagtatgttacttgcatttatatgtaaaattgcttctctcttcatgttcttataattatttgagaatcataggaaatgaattgtctttttgctgtttttgatactttttaagcatatgctttttatttcaatgaagcgcaatttatctatttttacttcttttgcttatgtttttggtgtcgtatatgaaagtccattgccaagtcatgcagatttatccatatgttttgttctaaaaattttatagcattggctcttaaatttagctctgttacccactttgagttaatatttgtatatggtgtgaggtaacagtctaatttcattttgttgcatatggccatctaatttttccagcgccatttgctgaaaatactatttattcccccactgaatagtcttgccattcttatcaaaaattagttgaccataatgatgggtttatttctgaactttcagttttattttattgatttatatgtcatacttacactgtcgattactgctgctttgtagtaaattttgaaactggaaactgtaagttcccccaaattgttacttttcctcaagattgtttagaatatctaagggaacttggaattctgtatgaattttaggatcaacttttcaatttttataaagaagccatctgggattctttcagggattgcattgaatctgtggataaatttgggaaatattgccatcttaaccatgttagtcttccagttcatgaacacaagatatctttccattaatttatgtcttctttaatttattttcaaaatgttttgtagttttcagtgcattagtgttataattcttctgttaaatttatttctagtttaagtttattcctggttataatgctgttgttttcttaatcacattttcaggtttgttactaatgtacaaaagtacaattgatttttctgtattgatcttgcagtctgtcacattactgaatttgtttattaatgataatattgagaaatttttgacaaaacttataaatgtaattctaaattttgttttgttttgattttgagacggagtctcgctctgttgcccaggctggagtgcagtggcgtgatctcggctcactgcaacctctgactcctgggttcaagcaattctcctgcctcggcctcccaagtagctgggactacaggtgcgtgccaccacgccctgctaattttctgtatttttagtagagatcaatctcctgacctcatgatccgcccaccttggcctcccaaagtgctggaattacaggcatgagccaccatgcccggcccgtgattctaagttttatgtaaaaaggatagttgaaggctaaagaggctgcctaaatccttgtctcctcatacttctccaaaataatatatagctacaagaacagcaaataaaactatgtaaaaactatatcctcagcataactagaaaattttaatgtatttttattagtaccacaattattacattctttataatcaatgcaacaaaatagaaatcccagaaaactatgttttatatttgaaaacagcacaaaatgttttcagtgggggaaaaatagtcttttcaactaatgatcctggtatctctgtagaaaaaaaatgaacatcagctctcacctctcaacaaacacaaaaattaattcaaaatggattccagacctaaatactaaagctataatttaaaaaattctaatcaaagacataggagaaaatgtgtagctttagcaaagatttcctagggcacaaaagcaagaaacataaaacttttttgatgaattggagtgcataaaaattgaatattcctgctctttggatgaggccactaaggaaataaaaaagcaataaatagtttgtaaaaaatcaaaattaattttttcaacaacagaagtttttccagaatatacagagagctctttcagctgcaaaataaggactaaaacagctcaattgaaaatggacaaacatttttaatatatacttcacaaaagaggatacacaggtggttaataagcacattaaatgatgctcagcatcattagttaactgagaaatacaaattaaaacaacactgagatgataatactatacatccattaaaatggctaaacttaagaatacggatactactaactattggtcaggatgtgcagccatgacccaggaatttcactccaggtatttaccaaagaggaaacatgacaaagcagatgcattcatagtagccaaaacctggaaacagcccaaatgtgtattcactgttgaatcctaggtaaaatgtggtgtatctttacaataactactgataattttttaaaattctaactatgacacatgcaactaagtgaatgaatcttcagaacattacattgagtgcaatatgttaggagtgaaaaagtacttactgtttgtttcattttatttacatgcaatgggtaaaaagacaaacttaatctgtagttaacagaaagttgatcagaaggtacgtgagtctggtcaaaggagctgagttgactgggaagtaccacagaaggacattttgggatcacagaaattttctttatcttgattgtggtgttggttatgtggatgtatacatttgttaaaaatgcattaaactgtatctcaaatgggtacattttaatgtaaattttacttcagacattttatttaaacatttatcagtttttctcagtttcaaatgactagttactggaagcaatgacaagtgctactcaatgactgctaaatttattggtgctatgaatgccagatttttagcacagcaaaatctacaaattccaggatttttaggtagtatctgggcaagaatatatatgaataatgtatatgaaaggaagagggggttcttagatatcttcaagtcagtggaatgcttaggtttcacagtgccaatctggtgtgacatttactttgttaaaggaatttactctaaaacaaattaaatgagcccagatgcatttctttaaattttattttgaattcatcatttgtcaaaatatggttatcaataatgcatgcttataatatgaagaatgctttatccatgtcttatttttcatattacataacattcttattcttttaacaggtccaggagagcctcagattattttttgtagaagtgaagctgcacatcaaggagtaattacctggaatccccctcaaagatcatttcataattttaccctctgttatataaaagagacaggtaatttgtgtagaatttaatttcatcagaaaagagaaatcaagaatttgaaagtactagaaatttttattgagccagtgagtcacaaagctctctgcttagagactgcataggcatagtatactccctgatcttagaattgcttccactcattcaaagctttccagccccagaaatgactaaaatccagaacattctaaatatttgcttgtccttcttggtcttagtttaaatctttgtgctccaaagcctagagacagaaaacctctggatgacaacactcatttctgtcttgcaagtattatgtaagtgatttgactcactttgaactcatcattcagcctcctaaacaaaccaacaaacaagcaaaccccttgtaaaacttgtttcagctaataatacagacaaaatgttgggtgaataaaaatgaacatgggcccatgtagccgctggggccagtttggtgtaatcttgggagcatagttctaagtttagaattagacttctgcagaagtaatgcaattaaaaaaaaaaagaagaagaaagaaatgtgctatgactagttcactcatgaaatgttcaaatgagatgctatttaagagaacaaatatcttctggacaatttaaagtatctaaattgtttgtagaaagtaacatcagtggagtatctcagagcagcctcaatgcctgggatagccctttctctattcttttatccataggttaaaataggaatgaagtgaacctcatagaattctgtcactctgtgctgtggggaaggaaccagacatacacttcaaaacttgaaaagtgaaaggctatttttcttcattatgttattttatattttaatggccttttcttgctagtgtctttaggtcttaataatcagactactaaagcaaagttaaatatgcatgtagttttcaaattaacattcaaaggccaaggaaaataaatatatactatatatttgaggttatgataaatttaaaagttaagtctatgtggaaggaaaaatggaaattccaggaagataaaacagcagaggtactgtctgcctcattggacacctcttttacaaacactttgtgtagcttctatgggaacacattgttcattttttttttctcttctctgaatcttctattcactatccctttctgcattcctcaatgtctacactctctctactagagagtattgtcgatgtcagagtatatggtagacattttatgcatttatggctcttttatatttttacagtttttttaaactgtatttccactgtatttgcataattagggtaaaaaggatgtaatgagttagtagcaactcattacagcaactagcatgggtccttcttattgggcaactaaatagtgttacccaaatttaacagctgtccacatagaacacttaaacgggattgaatggctgagaaggggaggctagctatcaggctgtgtgttttcttttctccaaagctgccgattggtgactgaatgcagctttggaccatgccctgacactgcataaagggctctttggagccagctctactctaaacagcgtgctccgcttttgttttctccttcatctcaaacatatacctgtctcctctcccatgttacctaaggcaaagagagttgataggattatagtatcgttaaggcaacttaacttttctcaccattttaaataaaattactattaaaaatccacaggaagaaagtctatgaaatttgcagtttactttttaatcagatattaaatttcacttcattacttcacaatttaattttttcagtgtctctaaaagagagggattaaaagaggagaaaaaatgcaattgacattaatttagttttattggtttagcaggtttttttaattatgtattatttaaagattttatcaactattttaataactcagtggagatgtgcatacatatcttcatagttcatatgatgaaactgaggttaacagaaaatgtgatagatgttcaagttcagtagcttgatctgtttcctttctgctcttggttttgtttgtttgtttgtttgagagggagtctccctctgtcgcccaggctggagtgcagtcatgcgatctcggctcactgcaagctccgcctcccaggttcacgccattctcccgcctcagcctccctagtagctgggactacaggcgcccgccaccacgcccggctaatttttttgtatttttagtagagacggggtttcactgtgttagccaggatagtctggatctcctgatctcgtgtgatccgatccgcccgcctcggcctcccaaagtgtgtttgtttatttttcctcacatttttagcttaagatattttggagaactgcagttttatctcgttaacttaatgatggcaagtgacagtgaagcttcttggtaattggggaattggggaagagatcttttgtgctttattggatttaaaggattatttttcaaaagttactgaaagcaataggcacctttcaagaccaccatgatgttgctggaaattattttgtgtaatgccttttatttttttaagaaaaaaaaaacagaacaaattgcttaatctctctgtggctcagttttgtcatctgtaaaatcagatgatagtgagtaccaactaatagttgcagtgatggttaaattaattatttcatgtataccccttgaaacagtgcttggcacatacagtgagttattatttttaaaaatcgttattgatattattattactgttgctgctatccagaaacatgttgccactctaatcatcctctttcctgatgtcacttggctactcaaaaatagcagcagctggtgatttttttacttaacaagtgctaagtcttctgcctgagtgtgaaaacacacttagacactgtcctacctctcatatgcctccccagccagagctgttgtcctgatcaggtttgtcactaaactcaaaaacattccttcttccgtttgtaatattttcttttctcccttacatgtattcagttccacttacctttcaatgaacagctgaattccacttccggcatgaaactccctcattctcacagctcccgttaattactgtagtgtccaaattactatgatagaatcaacccaatgactgatgatcaaatggattctgcatctaacattcaaaacagtagctaataccgatgttcaaagtttggaggttacatatcagaaaaggttttctaaaaaagaatcattctgaaacatgcaactcaagacttacagtatacactgggggctgtgttttctcagaaacaaaagagatcgtcttcacaaatgaatctgaacttattaaatattttatgtaccaaattaatgatataaaaccataatttttcaatatttaattttaccaatgataattgagtttgttcaatacactggctgataattgtaggtacttttgagtatcaaggatgtacttatttttcaatcactcaatagtttggagttcacttggaacaatgtgatgtagagaccaaattaattaggtacgtggtagtactgacttttaacgacttactaattttttttcacatttttcctcagaaaaagattgcctcaatctggataaaaacctgatcaaatatgatttgcaaaatttaaaaccttatacgaaatatgttttatcattacatgcctacatcattgcaaaagtgcaacgtaatggaagtgctgcaatgtgtcatttcacaactaaaagtgctcgtaagttatatgttttaatgcttctttccataaatggtaaaaagcaaggtatgaactttttagcctacaatatttctatctttattctagcaagcacatttacctggcacatttgttaacatctagggcttataaacacgtaaaatctaaaagtttaaaaaccgttatcctggattctctctcttcttcagatatagtcatagaattttaaggacaaagcataaaagcatcttaattggcatcagtttgtgcaatttcatgcagttaagtacttaaccaacttagattaaaacattcactgtttgctgttgtctttactatctggaaatattaattgtaatcagaaacctaacaatgtctcataaagcattagcctactaacctctgttcatctgataaaacatttcataaaatgtaatattttattagcattttcttctcttcgttaccctcaactacttactattctattttatgtcacattatccatttaaggtttcctttcaatggcatttggctcttgccactagtataatctctccatagtttccaggcccaaagttagatctgcttctggggcacatgttaacctccatcgaggacagggaagaagaaatgccgtgttttaaggcagcatctatagctccagagaccctaacgggcactagacttgtgaagaaatattgtgctatttggggctgaatataagacacttttaaggtcatttaggttttggtttgaaaagttctggtcctggagctctatgcttttgttgttttcctgagtttctgtatcacagaaaaagaagacaatttgtttctgttcctgaagaacccatctaggtgtttaccaggataacattagcactccgggaaagaagggtctagattgtgtaataggacttggaggtttcccaatcaacaacatttttcctctcctctccccaaacttccccctcttccccactcccttccctttttctctattctctaattctacacagtctccttcagggattgcaataactctcatggcttcatgtacaacctatatgctaatacttactgaataaatgagtgatttattcttcagggttttgatattgttttttaatttatgtactatcataacttccttatttataacccccaagctaacacttaaaatactttatactatatccaagtattgtcaagtaatttacatatgcatctattaaattattaataacaaatctttcttcattttgatagctccaagccaggtctggaacatgactgtctccatgacatcagataatagtatgcatgtcaagtgtaggcctcccagggaccgtaatggcccccatgaacgttaccatttggaagttgaagctggaaatactctggttagaaatgagtcgcataagaattgcgatttccgtgtaaaagatcttcaatattcaacagactacacttttaaggtaaaagtatgctctctacattactatagtaccaactacattataatgattgattcatagtacttaaataactttaagaccactgctcacatgagattgagaagctctgatgtgtaatggaatcacacttaaagagtctcaaatatttgactctaaaatttttattcctatagctcaagtcagtggtttaaagcaaatgtttcattggaatattttagaacttcaatatgacttaattatagctaaattattgcttctgtgttaagaagcacaacactttatgcacaacagattattactttaccaaatctaccttttctttactttggctttttatctttattaatgtggaatttttcaattgcaaaatttcacaggtaccttgaggttaggaaatatttgaaataaacactagacaatactagtgagcatacagaatttaaaacactcattatctcactgtctactgatcgtattttgtacatgtaacttcataatatacacatttatatgcacttaacacgtattatcaacattctgagtacacagttttcaaaatacagttttaaaactgtatttttaatatatcactatatcacacacacctttctatgttaaatatttaactactatgtagtttttaatgcctgtataatattctatgtatggctttatcacattctattaactataactatgttggtctctaatataaacaacattccgataacacacttattggtaaagcaaaatttttgaatgtctttaataatttatgtttcataaattcctaaaaatgcatttattgggtcaaaatgtattttgaggctttttggatatgtaactttttttttctataaaatttaccaaattgccctggtgtatcagtgtatgaaatgactgcttcttgagaggctcaccaacactgaatacgcctttctttttctttatttggtggttgaaatatggtattgatatctttcttttaatgaagtttctttacttattgttctttgtgttattctttgcctcttttatccagttttctccggagaaatgccttgaatattaatgatattaaactctttgtcacatgcgtaaaaatgttatcagtttataatttgccttttagttttcttcacagcactttgtcttacataattcccctttttatttttaaacaaatgtatctgtcacttttattcctgttaaatagaaatttccatagttaattttttaatatgatgttgacaaacggcctcatattctttttttgttttgttttgttttgttttgtttgtttgttttgttgttgttttttgttttgagagggagtcctgctctgtcacccaggctggagtgtggtggcgtgatctcggctcactgcaacctccgcctcccgggttcaaatgattctcctgcctcagcctcctgagtagctgggattacaggcacctgccaccacacctggcaaatttttgtattttcagtagagataggttttcaccatgttggccaggctggtctggaactcctgacctcaagtaatccgcctgcctcagcctcccaaattgttgggattacaggtgtgagccaccgtgcccggcccatattctttatcacttaaagaagtgttttcatatttataaactttttgattttgtttttgaactggaaatgtcggttggattttatcgatttttagggcattatgatagatgatgccatagttgtgatgccctggtgtgattagtttaaatgatgcaaaaccattgtcacattctaagagaaaaacccctgctctgtcattgtgtgttattctctcagagtattattgaaatcaacagcctattattgtctttattagtagatattcaaaaaggagatcattcagtgagtagagacggtgttggcataggcgttggatgacatcattcttattaaatttggtataaaggttacactgatctgataaaacacattgcttatatgttcctgtttttctgtatcatataactttttaaaaaaattttattattattttttgagaaagagtctcgctttgtcacccaggctggagtgaagtggcgtgatctcggctcctgcaacctccgcctcccaggttcaagcgattctcctgcctcagcctcccaagaagctgggattacaggcatgcaccaccatgcctggctaatttttgtatttttagtagagacgggggttcaccatgttggccaggctggcctagaactcctgatctcaagtgatctgcccaccttacctcccaaagtgctgggattacaggcgtgagctactgtgccaggcctatattatataactttaaatagtataggagtgatttgttcctgaaaaatttgtcttcattcctttcatgcagagaaattctttaagactcatttatatcttctttcaataggattagtcttttcagatattttactctttttgagtgagtgtgctatatatattttttcaaagaatagtcaacctaaaagaaatattttcttattgtcacatcattgtgtattatacttcattccccactgcttctccagtgcccattaagctccaggtgcactggtttctctataatttctcagaggcacctaggtgttactctttttagccacctccctccacgctcttcccacttcctagaatatgcctctcccactcttcaaatcgtataagttactatggaaaaatataggtgtacatcatattaaaatacaaccttaacgttcaaagtaggagataattattcagtttcgaattctcttcccccaatcttcaaaagatggtttttgttttctttattatacttgccataccttcttattatgcttatttctgtctccactatcatgttttgtgttcactccttcatgagagagcagtcatttcagctttttcaccattgtgatctctggttaataaattaatgaagttgatttattagtattacttttccatagatttattttgatgctcttcaggtggctttcggattaaaagtgttttcttccttgtaattttttttcatttttataaactaaagggaaaaaaaaggctatggattgtactttggtaaaattttgactgtaacccatgtctatatcgtttgtcactaatttctgaaggccttcacatgaaatgtaatcaatgattcttaaagtaaaacattttgattattgatgatttctaatgagtctgtagttataatttggaagagtttttaatatatccattatttaagagagtttttctacatttctggtgctttaatttcttattgctactaattattagctgataaaagttaattggcttttacaatttctgccttttaggatttgtagaataatttttacagctctatgtgtgatatttatgaatattctgtgaatattgggtaaattatatattctccataggataaaagcttagatatatatttgtcagatttattatatttattattattctcttttaatgatattattcaaatatattttacttaaatttttttggtcaaggattcttactgctcttttgctcttttcattttccctgtatatgtaaattgttttcacttcatttgtattacattttatgagacacaggtgtttatgcattatgcctatatagtaaattttactatatatccatttgcccttaaaaaaatgtatgtgcattttatgcataattctagtaaacagcttatggttgaatttccttttttaattaaatattagcctattaatagggaattttaactttatgaatattttgatgtattggattttatttcttcatccagtttcattattttaaataattatttaataattgtttaataactataaatatttttattgctaagtgagataagatatctttttgattgtcttttcaaatatatttgacaacatactgacataaccttgaagtttaaagcaaatcagcatacttttattgtatgcatggtatgaaagataatataaatgttttacattgtgatatataatatatatatatatataaattcacattagcaaactaattattttattttttgttactgaaattcaggcctattttcacaatggagactatcctggagaaccctttattttacatcattcaacatcttgtaagttatcactgggctatttattatatatattaagatatatattaatgcttataaagctatattattttacacttataatcacatttgattgttaaatgcttaaataatatctcttccgtaaatgtaatatttttaattgtcagtaaaaccatacatatatatgtaaatatatttaaatacaatatcttaaattcaagttaggagattcaattattaaaggtttgttgaattcataagaggatttatatacccaaactattaaattatgtttatgtttatgaaatatcgtcatgttagtaacatttttcgtgtactattttagattatctattttattctgtctcttcagcatatgtttagcagaagtgggccttagatacaagtctgtcttgatttacttaatggaagctaatataagcactccctaataacaatatacttatgtaaatatttatcactgatatttaaaatattttcatcaaagtaaaggtgtacatgaaaaattacttagaattaaatttcattataataatgaaaataacagctgcatgttacattccccacccacaattctgtttgccaggcaaccacttttaaccatttctatttttgggtctccttatagtttccttcatatatatatatatatatataaacaatattgtatactgctctttctagagttactaacattaccaattgatctgagcctatggaggaaggagacctagtactctactttgggctttctctactggttaacattgtaaatagaattatttaagcctgtatgtactttgttgtcagcaacttctaggtctttctatctttgccacttctagttcttcctctcttacatatgttacatatgcacatatgcatgtgcacaatcactggtatgaatgcaaagtcaaaagagaaaatataaaaacagcttattttccaaactgctttactaagccctctgcaaagttttagttctttctgctcagatttatgaaataaaaactccctgtgttaaatgtcaaaaaagtccagcaagatagctttgattttatttccacattacctttttcttttataatatctttataataaaaatgacttcattgactctttcctattaaattgtaaataatttatagcagtcatagactcagctgaacattcacactcacatcttaataggccagatctgaaacatttcacctggaaagacacagaacaaaaagcacagcatgctagcaagggagcctggcagtgggaatccttgcagcgggaatccttgcagcagtgcacacagcaatccagctacttttcttatgacactctcaaagacaactgagatatgagagaatgagaccacatgtgtaggtgtaggagctgcattccaaaaggaatcagtatctcttatactatttccatgggcatagcttccagacatgccaacaggggtgtgctcagttatgagcgggcactgcactcagggaaacccaaagctggtacttcccatgaggacaatagagttcacatatagcactccctgttcaggtgtagtttagcaatcaagggtcattttgccattagcaatgttgtctggtaaccagctaatattccacttttatcaggtttccaggtcaacggagccaaaaaattagccctcatctttttccacaaaggagacaacattgtattcactctctgctcacaatatcattatcctaagagataaataatatagtttcttttaaaatagtgatatctgttccaggaaaggacttgggctgtgaattgctagggtacagctactagggatgtgttgttgggtttccccggcataatattccaccacctgtactttgacatcattgtcaattgaactcctggggaccctttcttcttgctctgatctggactctcacatgccatcttgaaatattcccccatcagttttctggtttagatttgctgtatcacacatagttatttttttttctgtctgagttcactgatatatgttctctagtgtaagaaaaataattctaattctcccatacaaaaaaaatttttattctgctctggcacttgttcagtgtatcgacttggtataaaattctaagttaaaaattttagaatttaaaaattatttctgtcttattttcctgaatccaattttactttctaattccatcctgattctctctctctctctctctctctctctttttttggtctgttcccaagttttcctcccctggaaatgctaggtttctgtctttattcttggtcttacctgaattttttgtttgttttgttttgtttgtttttgtttttgtttttagagggagtttcgctcttgttgcccaggctggagtgcagtggcataatctcggctcactgcaacttctgcctcctgggttcaagtgattctcctgcttcagcttcctgagtagctgggattacaggcaggcaccaccacacctggctaatttttgtatttttagtagagaagggatttcaccatgttggttaggctagtcttgaactcttgatctcaaatgatccacctgccttggcctcccaaagtgctgggattacaggtgtgatccactgtgcctggccctgaatctttttcattcattttttctggatgctattgacctttgtaacctgaagatttatatatctgagaattctttgctccattttcttcccatagtctttggttgagtctattagtcataaaactcataagttgacttattattttggcattcccctttggtgttgatgttttccttaaaagcttggttcttattggtagtctagtcatagtcacagtgagacaacaggaaaggttgattagatgttctgtggtccttagaagatcttggtgactgaggagatttcctatgatattgctgatttatttttttctgatatcattcattatcaccaaaaactaattaatccccagaaattaatctccagaattaccctactccttgttgtgtggtaaagtgtgaaaaagtggttcttctcacagtaggacaggaagataggtgtccaactattgcatatgtggacaattacattgtcctcctaattttagtcctgtgcctcatcccttccctgtactgagcctgactttattctcagtctctcactgctttcatttaattttccttttgtcttctcctccctggtagtattttttcaagaagatattttttgttattgttgttgttgttgttattgtttttgtaaatagacatttgacttccatgttctgacccatgattcacatttactgcatatgtcactttcaaacctgagactcaggcattctgagtaaatggaatctattcctttgatttaggctgtggcctcctttcttttgttttctaccttctacaacttgttgaaattgctctacttctaatttcccttctctcattttcactgtcattataaatctatggcattttcagttttttaatattagcagggttcctggaaagaagggggaaacacatgtgtgcttagaatgcaagctttatctgaagacttggctattttattaagtttgttgagaaaagtctgatgctgcttaatatttttgtagaacttaatctaattattatggattggaatgctaacttacagtcatttgcagtttcttgcaaaatcttacttcagagtattctagaagttagatgttgcctctgatgaggtttttattcacaaaatctggaaacaatcatgctgattgatatatgtatactagtaatcactggtatggattgacaatttcagtgaaaggaatttcagatagagataagacaaggaacactttgggtcattttaggagcctattgcaataagaacttcttccctaaaaatgttcactgcaatccacctatatattcacattcatgtatcccatccatttttatatatgccggcagtataaatacccctttaaaggagataaaattatttctattttatatatgaggaaactcaagtttggataatttaatctatttgccctatgagtcaaagaaatgacagagcctgaattcaagctcaggtcttacagtctgtatctgaaattactttcaatattcctgtttgtatgagtttccagttacagaaattttgatcatgagatgaactgtttctggcagctgtttgcttgatagagtcatttccttctttccagttgtagaaaaactgtctcatgctcaaggcctccacttgccatacagaaaatacatcccctctacttccttatcaccctacttatttttttcagagtatatgaaaaaatgcataattatttcatttgttcacttacctttcttttttcttttcttttctttcctttttttttttttcttgacagagtcttgctctgtcgtccaggttggagtacagtggtgcaatcttggctcactgcaacctctgcctcctcggttcaagtgattctcatcccttagcctcccaagtagttggcattacagacacacaccatgcctggctaattttttgtatatttagtagagatgaggtttcaccatgttggccaggctgctctcaaactcctggcctcaagtgatccacacgcctcggcctcccaaagtgctggggttacaggggtaagccactgcgcctgtctgttcagttacctttctagtgtctgtttcccccaaagagaatgcaaatttcctgaaaactaatattatctctgccttatattctatagcatttccacggactgtcttcctttttatcttcacagcccttatatcttctcacctacatgaccatttacttatttcttctgttcattattaattatctatttttcttcactagagagtaagttccatgaggacaggacccttgtttttctttatgtagatatcctaagtacctagagctgagtttggcagatgaccaaaagccaaaaatattttttttgtgaatagtgaataattagtacttactacttcccagccaccgtgctacgtgtttactgtgaatcaacacctttagccacattttaggattttgggaaaggagggacaaagataataaggaatctggccaagttcccaactaagaagtggtagagctaggattggaagctaagcagtcgggctctggagctgaggctcttaagtcaccgcattattttgctgcattttcactacataagaaaaggtgaatatactggagatatttccaacacaccctctcttctatgccctttccctaggaaagggcaggatttcacattaaacttagtgaatatttaagtcagggtaagtcttatcctaactatagaatgaaaccatttttgtctcttagtgaatggattttacacctcagtgaacaggtaagagggtttatctttgtgaagtagaagtctttctcatccccttaagaggctacccacttctgcatataaagttaaactatatgagtttgtctccaaaatttataataactggattacctccttgatcccttcaaaatgaagtgtctgataaaaaaagagaattaaatttaaatgtgtcttatgaaagaacattatttaatcaaaagaaagataattattcttctattcttactctccttaaatataaaatgttttcattggttcagaacaatatagccaaaatcacagaattagaaatttattgtatttgaccttattctaaaatgtttattttttaaaacctcacaataaatttaaaaatattaaaatataaatactttggaggtgattattcaaccagtctagcaagttatttgacaatcgttctctgaatgtattatttttcatttctagataattctaaggcactgatagcatttctggcatttctgattattgtgacatcaatagccctgcttgttgttctctacaaaatctatgatctacataagaaaagatcctggtaagagttgattttaaatttttaaataataatggtattagtaatggtgcaaacgcatatccatatggcagtgatggaaccagttaaatgaaatatgtgaactagagagaagacagcatacagcccacttcatgacacaacttttaatcaaaaacttttagtatggttttattggtttgaattaaacattaatattattttctaaatttactaataatgttgtggacttgtttaataataaccagtgaaaagaatgtgtgtggtttttagtacaaagtgggtcagagggatctaggagtgtcaaaagaaaaagaaaggagggagatgtctggggaagttaatgtgtttctttggtcagaaacaaccacatcttatgaaaaacagaagatttaaaataaaatcatttagctacttatgtgagtttagcagacaattcttggttgttttctttcctccctcaccctcctctctcctctctgactctgctttctcccatccttctgtcctccctctgctcaaggctcttcctcccttccctcctttcctcttctcctctcctctcttccccttttcttatccctgacttccttcctttgttccttcaatatattcattaaatataagtaaaataccaattgaattttgtgcttcttgagaatatagaaacttatttttcctattttcacagcaatttagatgaacagcaggagcttgttgaaaggggtaagtatgtatatttttgctgatgactattccttcccctgcatttgaatccattcattttatttatttatttatttatatttattttaagacagagtctcattctgtctcccaggctgaagtgtggtggtgcaatctctgcttattgcagcctccgcctccctgttgaagcaattctcatgtgcctcagcttcccaagtatctgggattacagacacacatcaccaggcccagctaatttttgtatttttagtagagatgggatatcaccatgctgcccaagctggtcttgaactgctggtctcaagtaatccacccaccttggcctcccaaagtgctgggattataggcatgaaccattgcgcccgtccccattcattttaaataagaattgggcatttttagtttaacttggacttttgttgatacagtgataaaacttaaattcctttactcactcagcacctgtgaagttcccagtgtacgccaagcattgtgccaggtactgagagtactacagtgacaggcacagactctgcccttaaagggtttagaatctaatagaggaaagcagatatctcaacaaatatgacggtaatttgatacatgccctagtagttgaatgtgtatagttctatagatatatggaagatagaaaactgtgtgcaagggcagaaatctggtctgttaagattgtggggaaccaatggacaaatgagggagtggtggagggacgagtggatggaagtcacagagatggggagatgggatgtctcctcaagtccctgccagggtggaatggtggctgctcccactaaagacacatttatggattggacaaagaacagcaatttgacttgggagaagaaaacacatttgtttatcttttttttcaacatttatattctttaattttttaaaaatgtgatttctgatccagtaaaaggggacaaagtttcagaaattgaacctttgtttacaataaagaaatgtacttgctttctcatgcttaagacaggaataatttcagaactcctttgtctgtgttaatctgtgttggaagtgtttccctctggtaatagcaggtaccaggtctctatgcagaaactttagggctgaatctttggagctccttaaaaggctttatttttctttgcagaatgtaacactatctgatcccttattacatatttattcatttggtcattgactatcctctcctaactagaatgtaagctttgtgaaagcgtggaggcttttttcttattcactgctttatgcccagtaccaaagtgagtacctaggatttgataaatattagtgaataaataacactgacatagggtatcgtgaggattcattttgataggctgagggaggaatgaagagtacaatcagtaataaacacctgagcagaacaggaaaatccatctcaaggagttaaggtggacttggaaagtgtcaatgaaatattttatctcaaaattggtaccgattgcaccttggaacgcagtagaatttactcactcagaccccatgaaaccctgaatgtggccctcagttcagaatgaatgaataccaggcattcccaacaacctaaagaaacaattgcacatagccagtttgagagctgtgattgtatagaaagtttccatgggcaataagataaatgggtcaccctcatggataacttctttctttatctgataaactggtaaaattaatatgattactgaaagaaacactatcagtagtacatggaagagtaggagaaacataattttacatatgcgacagcttaaattctcttacctttctaaagctgttggttttcaagttccatatgcaattgtagctttttatggttagtatactttttaatcttcagtaagttatttcacaaacatggtatataatgtgtttcatatacttgaagcataacaaattaatacaacttgtttcaccatttagtgtaaacagatgatcaaattaagctgagtcatgggtataagggtattaatcatattgtcttatttcatttgcatgtttacagtatttcacaagttgaaaatgaaaatacaaagaaaaataatattgtattataaataaataattatagtaattgctataaaatgcatatagtcaaacgtgaatgtccttataatggtgatgtttggtctgggatcccttctcttaagcatagaaaatggggaagaacattctagtagagagaacaatataaagcccagaagagatctgaagtacaagattgaaaagtcattgatttataggtaaatgtttgtatgtgagtgagatttctcagatgaaatgtgtacgaggaggaaagaagctaaaggattgagtacacggtgtaaatttaatgaaatgtgtatgcccacctgaaagacacatgtaactagtattgaatctttaatatgtttccagatgatgaaaaacaactgatgaatgtggagccaatccatgcagatattttgttggaaacttataagaggaagattgctgatgaaggaagactttttctggctgaatttcaggtgtgtgttgcttttgttatatgatgataaattcgacatcaagacagttccactttaagtgtatttatattgccatttgcctttataatttatcccacttgatattgcaacataagcaaagtagatattattagcagatctctatgaaccagaagagagactcatagaggttgacgggattatagtgtagagctagtaaatattttaatgtagtgctttattgtattatgaagttgtgtcacaaaatgtatttggctgattttgtagttgtactctagatactcatccaagtatctgtttttaaatgaatttgatagtgacacaacaactaatcctaaatttgtccccactcaagagatttgttctgaaagttgtcaatcattaatttgtaagaaaaaagttttttttttaacataattcctgatcttaattttgattactctaagcaaatttttttatcaatatgaagaaaatattttacaggatatctcatttactcaaaacggtcattggtaagggggaaattatttttcctgaatctgctgtgatccaagaaatcgttgtttctttcagagcatcccgcgggtgttcagcaagtttcctataaaggaagctcgaaagccctttaaccagaataaaaaccgttatgttgacattcttccttgtgagtatttattgagtgctgaattcccatatattaggctacttgattattcactatttcacttgtttatttttcttttccttaaacagatgattataaccgtgttgaactctctgagataaacggagatgcagggtcaaactacataaatgccagctatattgatgtgagtaaaaatttgcatttttcttatacctacatatttcattcagctccttgtttgtcttggtaaaattttagaaatattattaaaaatattttgaagtgagcccatatgtcactgatataaacaaaaaattatcaatattagcaaggatagttatttattatgtgactattggtattaggtataacatagaattttcctctacaaacaaaattatattaagaattaatttaatatactctggtgtctattatgtgctagatattagactaaatattctatgcatatatttctcacaagaagtccacatttgcctcagccatgtgccgtataggtgaggactgggaggctcagtttagttaattaccttgttgttgttcacacaattggtaaatatttgagttgaaattcaaccagagtctgactgactccaaaatgttatgctttaatttcatcacactaaatttcagcagacattcctcatcaacatgatcatctatccattggatttatgcagaaatgtaaatgtccgtacgtggttaatttatttaaaatattttaaaatttaatttattatacaaatgttaattaatgtattacataggttaaataattttaaacagtataaaaatatatacagactgaaaaaattctttttgtctccccaaatctgccattttcccagtgtcctcacctaccagaaataactatattttctattcaaatatatatggtaattatggtatcaggttacttatgtttccccaatggaacttagagctccctgaaagcatgtgtcttctgcttttagataggtgattgacatattgtagctattcaataaatacttattaaataaatgaatgtatgcgcaataatgtgtcatgagatagaagtttcaggaagttacttaaattaatgttgaattcttgtgacccatgtttcaaatttaatccaatggcaaaggtcatccctctctgaagagctcctttagttactgaggtgaatttaggagtctgagataattctggaagaagccagtataatattttatctgcctctgtactcctttatcttggtaacaggagcagagaaagcagacatagtaggtaatgaaatgaaagttattatatctcttatctgaaatggcaaagaagtctagggaatcatattccagcagaagttaagaggtgaaaatgcgggtaaaatctaagaatgatttgtttaaagaaattgagtaaaaatcccaaaagtaactacatggctggtgagcttgtttaaatagtggtagatgatcctataagagttggcaggatataaaatgttgaaatgtctagagcactcttgtaaattaccacagcatcgcagatgaagatgaaacctagtattaaaattgtttgaagtttacagcaaagatacatgaaagtcatgaatattctttgcaaatgctaacatgtttagcacaattaaatgcctgaccaccaattaataagattcccttaatactttgaaactgcccagagaaattcacaatcacaaaatgatggatctgaagcaattcctctaactcacaatttttcctgttaatgagtaattgaatgttcagcaaatgacatatctctgcatgtgttttcaatagggtttcaaagaacccaggaaatacattgctgcacaaggtaatttctttgataatccaatattctttttgaaaaatttttatagcacttttaagaaaatttttcttatcagcttttatttgtttacctcctaggtcccagggatgaaactgttgatgatttctggaggatgatttgggaacagaaagccacagttattgtcatggtcactcgatgtgaagaaggaaacagggtaagaaccaagaagattcatagtgtgggtcttggggttaggaaaacaaggtgttgaatggcattttgaaaagccacatgtatctgcctgatgactaaaacagagagttctctattttaatcagtgttaacatttaatttaaaattttcatacatgtagaaaactaaaacttttaacatacaaatatatgtctatatgcataaaatttcaatgcttctgattaattgctagactcttaacttgattcctgtttctttgcagtattgttataagttcagtatatttcactgttttaacttcacaagaccttaatactcgaaacaaaactgaccttgggcagataggtggtgagtcatgtaatgtgactttaggaataaaagcctctctgtccccctacctaaaattaaccacaagcaatcatatcctttttgctgacaactgattatgtcctctcttaacatgcatctaagcctggaaagatcatcctgctaaaaagtatgaaggaaattcttcaggacacattagtgggaaatagaatatatttcaagcatcacagcttaaggtttatatgtgcttaaactatacaactgttttgagaatttcaaatgagtataggttttgttttcactgtttaaagaaagtttgataaaaaattggcttaaattaaaaattaaaatacttaataattttttaaaatgtagaacaagtgtgcagaatactggccgtcaatggaagagggcactcgggcttttggagatgttgttgtaaagatcaaccagcacaaaagatgtccagattacatcattcagaaattgaacattgtaaatgtgagtttgctttttacataatttttgttttgatacttttttataaaaatataattatggaatattaaaagtgagaaaataaaatatatcaggaaaaattatttttgataacctttaggatgaaagctgtggttagaacaatgacaaaaatcaatagggtcaaatttaagtcactggtcaagacgtttttgtccaactcaaatcgaaagaattatactgtattaattaattatctgttttaattattaaaaaaagagggaaggtccattaaatgtgttgaaaatataatcaaattattaaaagaataagcaatttgtcttcattgtcagtgagttcctacttttatgaaaaaaaattatattatttccataagagaaatgacagcattagagaacactgtaagaagtataaagttctaactatgcagcagagatagaatgtttagttcagaaaataaggaggtcattgtggccttagataatagttaaaatagagatcgtcatgcatgttatataattccattatatgaaaaatccacaataggcaagtcaataaagacagaaagtagatcagtggttgcctggagctgaggaggtcaaacagaaatggggagtggctgcaaataagaacaggctttcattttgtgatggtgaaaatgttctataattagatattggtgatggttgtactatttagtgaatgtaatatgaataccaaattgtacattttaaactggtgaactttatggtatgtaaaatgtgtatctcttatttccaacaaatgaattttatttttaattttttggggtacatggtaggtgtgtatattcatggggtaaatgagatgttttgattgaggcatacaatgcataacaatcacatcagggtaaatggggcatccatcatcccaagcatttatcttttctttgtgttacaaacaacccagttatactcttttggttattttgaaatgtataataaattattgttgaatagtcaccctgttgtgctatcaaatacaaggtcttattcattttatctaattatatttttgtacacattaaccatcaccatttccacccctgccatacccttccaatcctttggtaaccatcattctactctgtatatccaagagttcagttattttaaattttggctcccacaaataagtaacaacatatgaagtttgtatttctgtgtctggcttatttcacttaacgtaagtcctccaggtccatccatgttgttgcaaatgactagatcttacccctttttatggctgaataatacttcattgtatatatgtactacattttgtttatccattcatcagtcaactgatgcttaggttgtttccaaaagttgactactatgaatagtgctccaataaacgtgggagtgcagattatctcttcaatctactgtttcctttctttgcggtatatacctagcagtgggattgctggatcatatggtagtgctatttttagtttttttgagaaacctccaaacagttctacatagttgttgtactaatttactttctcaccaacattgtctgagggttttctttccttcacatccttgcaagcattcattcttggctatcttttatatataagttgttataactggagcatagtgataacttaatgtagttttgatttgcatttctctgatagtaaataatgttgaccacctttttatttatctgtttaccatttgtatgtcttcttttgagaaatgtctattcagatcttttgcctatttaaaaatcagattattagatttttcattataaagttctgtaagcttcttatgtattctggatattaatgctttgtcagatggatagttggcaaatattttccctcattctgtggcttgtctcttcactttgttgattgttttctttgctatacagaagctttctaacttgatgtaattctacttgttcatttttgctatggttgcctgtgcttgtggggtattgttgaataaaactttgcacaaaccaatgccctggagagtttccccaacattttcttttagtagtttcatagattaaggtcttagatctaagtctaatccattttttttatttaatgtttgtatacagcaagagatagggctttagtttcattcttccacatatgaatatccagttttcacagtacaatctattgtggagactgtcctttccccaatgcatattctgggtacctgtatcaaaaatgagtccactgtagagttgtttcattgctctatgtatgtttttatgccagtaccatgctgttctggttactatagctctgaagtataatttcaaattaggtattgtgattcctctagttttgttcttttcactcaggatggctttggctattctgggtcttttgtggtttcatataaatattaggattattttttctatttgtaaagaacattattggtattttgatagatattgcattgaatctgtagatagttttgagtagtatggacattttaataatactgagtctttcaattcatgaacatggaatagctttccattttttatgtcctcttcaatttcttgcatcaatgtttcatagttttcattgtagagatctttcacttctttggttaagtttattcctaggtatttatgttgtttttatctattgcaaacgagattactttcttgatttctttttcagattgttcaatgttagcatataaaaacactgcttgttttaatgttgattttatatctcatgaccttactgaatttgttaatcagttctaatagttttttggtggagtatttaggtttttccaaatataagataatggaatgtgcaaacaagtataattggacttcttcctttccaatttggatgccttgtgtttctttctcttgtctgatggctctagctgggacttccagttgaacaacagtggtgaaagtgggcatccttgtctttatccagatcttagaagaaaggctttcagttttttctcatttaatatgatgctagctgtgggtgtgtcatatatgactttcattctgttgaggtatattccttcgttaccctgttttttgaggtttcttattatgaagagatgttgaattttatggcataatttttcagcatcaattgaaatgatcatgtcttttgtccttcattctgttgatataatgtatcacaataattgatttgtgtatgttgaaccatccttgcatcccttggataaatgccacttgatcaggatgaatgatctttttaaagtgttgttgaattcagtttgctagtattttgttgaggatttttgcatcagtattcatcagggatattgaccggtagttttcttttttttgatgtgtctttgtctggttttggtatcagagtaatactggccttgcagaatgagtttggaagaattcctttctcttccattttttggaatagttagagtagaattggtactagttcttctttaaatgtttggtaaaatgtggtagtgaagccattaggtcccgggcttttctttgctgggaaacttttcatgacaacctccgtttcattacttgttgtctgttcaggttttgggtaccaaaaataatggcaacaacaacttttcaagacatggagagcaaaataacacatgaattgaaacaagaaaatggcaaaatgtggaggaatgaagttaaaatatagcattttcattatattacactttgcttgttagtttgtttacacaatgtctgttgtcttcagtgtaaaataatgcattataagatatgataaccccaaatccaaaagcattcaacagatacataaaaataaaaagcaagaaattaaaacagaccaccagagaaaatcaccttcacttaaaggaagacaggaagaaaagaaagaaggaagaggaggccacaaaacaaccataaaagacataacaaaatggcaggagtaagtctttatttatcagtaataacattgaatatcagtagactaaactctctaaacaaaatacatagagtggctgaatagatattaataaaacaagacccaacaatctgttgcttacaagaaacattcttcacctgtaaagacacaaatagacttaaaataagagatggaaaattatattctttgtaaatggaaacctaaaaagagaaggagtacctatacttatataacacaggtatatttcaacacaaaaactaataaaagagacaccgattgtctctacataatgataaaggagtcaattcagcaagaggatataacaattgtaaatatatatgcaactaatactggagcacacagatatataaagcaaatattgttagagctaaagagagagatagactccaatacaataatagttggagacttcaacactctactttcagcattaggcagatcacccaggaagaaaatcaacaaagaaacattggtcttaatgtgcattgtagaccaaatgaacctaatagacatttatagaacacttcaaccaatggctgaagaatacacattcttctcctcagcccatggatcattctcagggacataccttatgttatgctacaaaacaagtcttacaaaattaaaaaaaaattatataaacttttctttgactacagtagaactagaaatcaataacaagaataagtttggaaactatacaaactcatggagagtgaacaatatattcctcaatgaccactgattcaatgaggaaatcactaaggaaattttaaaatttttcaaaacaaatgaaaatggaaacacaacaaaccaaatcctgtgtgatacagtgaaagcagtactaagagaaaagtttgtaagagtaagcacctacattaaaaaagaaaaatttcaaataaacaacataatgatacatttcaaagaactagaaaagcaagagcaaactgaactgtaaattagaagaaaaaataataaagatcaaagtagaaataaatgaaactgaaataaaaaaatacaaagcatcaatgaaataaaatgttgtttttaaaaagagaaaattgacaggccaggtgcagtggctcatgcctgtaatcccagtactttaagaggacaagtcgggtgtatcatttgaggtcaggagtttgagaccagcctggccaatatggtgaaaccccgtctctactaaaaatacaaaaaaatattagccaggtgtggtggcatgcacctgtaatcccagttacttgggagactgaggcagtagaatcacttgaacctgggaagccgaggttgcagtgagccaagattgcatcattacactcaagcctgggctttgcagtgagactttatctcaaaaaaaaagataaaattgacaaacctttagtcagactaaggaaaaaagagtggagactcaaatgcgtacagtcagagatgaaaaaagagacattgccactgatacttcagaaatttaaaagattatgagatgctactatgagcagttatatgctaatgaattggaaaacttagaagaaatggataaattcctagatacatgcaacctatcaagattgtaaaatgtctcttgatagagctgtttaaaaaactacaagtctttacatgggggttaagattttctcttaatttcatttattgtagggcttttagtaatctaaattttatttttgtatagtctagctatattttctacaggagaaacagacttagtctatatatctccgtaggtcttcttaggtttccatggtattactaattgttatgtctatagagtgctgtgaaacaatcctatcaatagtttctggccaaacacttgtttgactaagccacaaaggcacctgctccatagatatgaggatatatttctagattgatgcctatctggctacattctgtagtctgggtttactggtgttaattaactcagtttgtgtgtttcttttgttatctaaatgtagatggttctttatacctggccatagaattatgacttatgcatcttatggtggttaccttgaaattagaacaaacctgagctctaatctggggctgactttcctcagtcgtctctctacattctgtgttgacaatgctaccatgtgaaggcctaaggaatacaatgttcatcaaataattaatcagactttgctcacatatgaattagttctgtttgctggcctatcaagcagaagtattttaaacagttgtgagaatgacctttaccaaatcattttaaacacaaatccaaaaagcttccacccatgcaccccacttttatggtgtatgtttattttgggttttttttgcttgacagcatgcaagttcctagaaattttggttatacttttaaagaaagtattaccttacttaccttactgttaagttattgcttacagggtagtacatgcaagtcctgcacaatatcttaactactagttattgattagaaaggaaaacacaaccatggttgagaaaatatataagacacctgaggaaactatgaactcttttgagtagtttatgtttacacgaggagactttgtactggtactcccttccacttatttatgtttcatagtttgctttaaaaaaatcatctcaaagaaaatattatctcttgactagaaaaaagaaaaagcaactggaagagaggtgactcacattcagttcaccagctggccagaccacggggtgcctgaggatcctcacttgctcctcaaactgagaaggagagtgaatgccttcagcaatttcttcagtggtcccattgtggtgcactgcaggtaggaaaaacgaacaaaaaaaaaaaacaacaacaaaaaaactccaacagaatccacctgcctagggctgttagagacatctttccctttggcaattgctattttgggaaacaacctatgggagaagcttagattcttatattggcttcacacctgacagcttttccatgatcatgcctctgcttttttttgcttggtttgccagtgctggtgttgggcgcacaggaacctatatcggaattgatgccatgctagaaggcctggaagccgagaacaaagtggatgtttatggttatgttgtcaagctaaggcgacagagatgcctgatggttcaagtagaggtatgttctaacctttagtgattattctcactttggttttttggacttaaatcttttccaagtgataataatgatattttttaaaaatccaaattcttcacaacctcaaacagtagatgatttcctgaaaactaaaacgtggtaatcaccagaaatacttagaagcatttttcattagtgcctaaaagtactgtggaagaaagatgaccacaaaatatataatttttaaaataatgaactactgttaacatatatcagattggcaaaaaaagtaaaaatgctgaaaatagatttggcatcatctcataaaattaaactgaagagacagaatagtatagtaatcaacagctggttttagaaactacacttacaggtttcaaatcttgcttttaattattaatacgagggtgagtggtattgtttattaagtaattttagtctgactgcacctcagttaagtcatctgtaaaatggagacaatgataatacctcacagacttataaccacaaaagtaatacaaataaagcacttaaacaagtccctggcccatgctatgcatttggtgattgtaagtgatggtaattactgaaaatgtctgtatttgacccagcaaaatcacatatatgcatatacccaagagaagcatcaactagaaacatttgcaagaatgtgcattgcattcagcattgtcaaaatagcaaaaaaaaaaaaaaaaaaaaagtgaaatacatatcaatgaaagaatggaaacaccgtaaatatgtatcaataggggaataggaagacaaaatgtggacatgtgaactctctgtacaacaaatgctatgttgtggtagaaagcaatgatctaggtttgtgtctgtctgtttggagagatgctcagatgaaaacaatgagtgagtaaagctgccatacgaaacattcaagatataatttatgtgatttaaaaaaaacatgaaaatgtacaatgcttgtgattacagatacatagatagcagtgtagaaacataaaaacaaattgttaaccaggtaaaaagaaattatttacagtggaaaataaagtacagtggaaagacagtgccaaactcagggaactaaaggtggcggttaaagaggattatcagaagtataccatttccttgaaaatactggattcaaacaaaataagcagtaaagagtagttaaatctgggtttggcccattggattacaaaaaaataattttcttattaaaagaatacttttcttattttaagttctaaaaactataaaaaaaggttttctaaggaataacaacttgcttttttatctcttgaatatactgtgaaatttattatagttttacattcagtaatttggcttactgacccaataatcactaaaggaagtaacatacaatgttctttagtttttaggaataaaagttgtgcaatacagagtacatggataatctatttgcaaagtaattcttttctgaaaaaataatctgaaaatagaatttgctcatattccagaaaactctgagagtgaacttccagaatatttaaatattatagatatcaatttactttgccatgaattgttccaatatgagcaaatttatggggaatgtatattttatttaaatatgacttggaggactctagattatcagttaactatctgtatttgttcttgaaattgtaggcccagtacatcttgatccatcaggctttggtggaatacaatcagtttggagaaacagaagtgaatttgtctgaattacatccatatctacataacatgaagaaaagggatccacccagtgagccgtctccactagaggctgaattccaggtaatgatagtgacaacaataataataattacagataacttttattcagtgtcatctactttctaggtgtttgctatgcacttgacatagtgcttgcatttagtcttcaccagaaccaaaggagcacagatgagaaaactaggacacagtgagttaagagaaatgcctgaatctacacaactattacataggagatttctttagacccagaaatctgattctattgctaatacttttagccattcctcattaagctggtataaaatgaagtgtcaaaataatagtatatagccacaaaactggtctgccaaaggcaatacagcatatcacctttaaaaatcgtatctggttttggtttgtaaaggaaatcattagaagagtttatgactgcttaggaagttgaactggctggagctggtagacacacagtaaaggataagtacatgtgtcttaacctatttattaggcaattattctcacagctaacctagcatgtagttcactataatttcagagagtttgcatagctgtcctcaaattgctcagttgtcaaaaaaatgttttgtgttttttttgttccacctatgatttccaggttactgagtcattccataatctaccaaactggtaaattcagagtttctaaagaccaggagtgtgcttttaatcacatgcagaaccatttaatgtttaggatcaaagtggggttaaggtgggggtggaggtggagcatgcaataatgaccaagtgactcaatcccccagaagacctgtacttataatggaagaactagcagacacagggtagtctcaaacagagtagtgttttattgttgttttcttgcttttctagctgataaattaaccttattcaatatacctgccctactaatccacataaacacataagctgttagagacagttatacatttaagttaaacattcttatgaatgtttatttactatagaaaagacagacaatttttttcactaaataaatgtgcttgagtttctgctatgtgccaagtacaattctaggcacaagagtcaaaatgatctgcaagtggacatgggaagaaggatgagaggatgtgatccagatcacagatggaagctgtgaaattattccatttaagcagacagtaagacagaagatgagagtagaaatgcaagtcggttggtaaatttggtattgggaagttgaggcagctcttgcctgatgatctttcatttttcaagaaaatgtgaggctaggtcatcagttgagagttgagagatacaagggcgagtagggcaaagaagagctcaatgcttgaagggtataaactagttacctcaaagtataaaaacaatctccctaggcagaggcagtaagattgccagaagttatcatttgatcacctgaaatttatgattataagtttaaagaggaattagtcagttggttgtattgttttctatggcagcattgagctctttgggggtagaggctgtgtatgcagatagttgagttaaacctatctaggttttgaaaagtgactatttgaaaatagtgaggcaaacgagttgagggtgtttacaaatgaatgatgactgaggtggaaaataaaaagcaaattggccacatgagggaggtgagagaaagtagtaaggataataagttggagactttgatagaattacagattgctaggttgaacatatcagaataaatgactaggaataataggggtaattttcaatagcacagatagttgaacttatgattttagaggtgatgtaatatttggaatgaaacctacaaaggtggaatgatgaaagtggatgactgggaagtggagggaaagtcatgggaggtgaagaagctaagaaatgaagagactagagtcttggatagattattcttgtcaatgttgaattaaccaaaaatgatgacagaccttggaaagaagagaatatacttagccaagcctaaaactaaatgaggtggagtgattcagaaatcaatacctgacacttcccagtgaagccggtggatagaagctagtatagtatgatggcaggaatatcaaagtgcttggttgatttgaaagcaaatgagtagaaatggtttgcaagtagaatcagggatcaaggagaacacgtatcttttcttgaagctgtgaggtaaatggggtgtgaggaggaaagtcaactttttcttaaaagggctgctgagttattggtggtgtccttagctgacatccaggttttaattggtggaaagaaaaaaaaaagggtgaagtgactgttgggagaagatgattaagataaatgggagttcacagatgacagacgatgggcatcagagggcagggaggaaggcactgatgggttagatgtaagagactgggttgtatctgaggatacaaataaccattcaggaataaaaatctggggaatgtggatgcactgggaagcttagacttgtgatggcaagtgaaacaggtagagatttaagagtgacagatcctttgtgtcttagatgaaggtgagccattaattccacctataatcctgagtattgctacagggcataggctgcctcggtgactacactcacaagagcacaaggtgttgtaacagtttccaaaacatctggtccttcatgcagctcatggtggtgttcaagtggcctaaaattcagtgatgatattttctttcactcaattacgtagcaaagaatgaggtttgaaacagggtgccataattagtttgaatgagggtactatgctgaaaaaatatatgtctatatacacacacgtatctacatgcgtgtgtgtgtatataaaatcttaccgaattgtacatgaggagccttctcagtttcagttatttgtaacattatctattatcattaaatattattcacttgacaaatacttatttaaggactagtggaaagactgtaggcaggggtgtcttccagaagaaattggtatttaaactgatacctagagggtaagaaaagttattagagcaaccaaaaggggaaagggtagttcaagcaagaaaaaaaaaaaaaagtgtttatgtgccaagagttgaagaacagcttggcccttccaagaattgaggaagctggtttggtagaagtattgagggacccagtaaggtgtaaggctggagaaacagtcaggggcgtatcaataaagactttttatgctattttgaggaggtttgttgtcctcttatagtgatggaaagctgttcatcttcagaagagcatcttctgttttgtgttttagaaggattagagcaggcgagattgaagacaaagaggccagttaggaaattgttgatgttttacaagcgagaaatgaaggcagactggattaagtaggaagaaagaaaactaaaaggatttgtgtatagaaatgatggatcttttctgactaattaggaactgtgggtgagaggaaagcaatctggaaggtgtaaacaaattaagaatgaactttcaaaacatgtgccaagtctcctaagaatgtgttgtctccaaagtttatttctgatcatttaaaataacttaccattgcttttgcaatatagatcaacatcggtctagtggtttcaatttatataagaacaaactatattatttttctatcaagcagctctgaagaaggagacatagtctgttacatatatatctttagtgcatactagccctgtcaaaaggactaaatgcctgagcaatttaaagaaaaaaaatcagaggcaaaccgaaaaattatggcctatagggagcatatgcaaatttcacaaaaattaatgaaatgcttttccttagggagcatcttatgatgcaataagccaatatttacattttaaaggagtttttctgttttttttttttttttcagagacttccttcatataggagctggaggacacagcacattggaaatcaagaagaaaataaaagtaaaaacaggaattctaatgtcatcccatgtatgtagtttatttttttattttttgtatcagataaagttaagctcttttggatttgtttaatgtgggacacacagtcatataaattatcttgaagcaagttttcaacatttggttgttaatagggaagaagttactaggtattaaaatactagttattgcaagaacttataatcctgaacatttacaatgggctttggagggtagactgtattcagtgttttctttttaccaattatttcagaaatgggttgtcataaaagagaaatatataaagctgggagaaaaaagagcaagtctcttttacccattttctttcatttttagtttatttcagttatttactccagggtaattgacaaatagtaaaaattacatccatttgttctctatatgtttcctttttatcccttataactgggaggttgaaagtaaggggaaaatactctataaattctaaatcttcaaatttaacagatcaaaatatgcacagtttcaatacttgaattctactatttaagcatattaaaatgatcacatatggtaattttattcagctgcataaactaaaattagcatggataaaatataacacaagttgataaattagatgaccaaataaatcagatcagtgcatggttgacctagttaattttcataggagtccttatgaatgtagtttaaaatatggaattgatggtgatatggttaatcaaatcatttgaccaagttattataaattatagaaattaagaaacagtgagaaattataggtcaaataattttctgggctaaataattaatcaaagctacccatataagattgttaatttaatattactggagtataattgagggaaaaaatctacgctatgtattttgtaaacttatatcaagcagaattataatagtccatgggaaattaaagtatatgtatcaaagattaaataatcatatataatgatatgatatctctttgttgtttgacatggaattatgttccatgttttttcctggaatcctttttcttagacttttgttgtataatttgtttatcgacaagtactgaattttatataggatcttatttcatgtagatcagtaagttttcataatacaatctgtccctttttaaatactttcaaatttccacatgacaatgaagaagaaatttaattttttcaaggaagacttactactgatttatttcacatagatgactataacagagtgccacttaaacatgagctggaaatgagtaaagagagtgagcatgattcagatgaatcctctgatgatgacagtgattcagaggaaccaagcaaatacatcaatgcatcttttataatggtaggtacttaaattgccaaaacccaagatccaaacattttaaaataatatctatgttattagggccattcattaagcgattttataaaagaataatgagcttggtcataactacatatagattgacatgagagtttcaatttcaatgctacaatttaacttaatgaaagatttaaaaatactataacctaataacctgagacaaaataagataatgctattggttatattttatgacaaatatagctataatcacatcaattttaaaaatagtaaaatttgagcaaatacaagtatttgaaaatgtttatacatactcagatacccaaattgtaggcaatgacaaatttgtatatttgtatggttagaaacttttcattcagataaactgaattattaggtgagtctgtgtcatatccccccacttttttaattaactgagaattcaaacaatgaaactttagtcatttattaaatatttattatttatacactgttggatttacttattttccaaagtttcctaaagcacacattcatagaatattagtttaattaggaaatataataagaatgtaaagacactaattaaaattagtatagacacgatgaaggtaatttgaaatgcttaagtaattcctttttacaatcacattaacctttatagagaaacaaaaatgtgtgtcttttgtggaaaggaaaatttgtttcgcaagatatgttgtaatcttgatttcacattattagctaagaattactattatctgtataattattttacatatagctattacattgtttcttgtaagaaacataagaatattactatttgtatgtaacagcattgatatcaaactgactatatttccaaatggttactttaagaatctactgagctctcttctgtagtaacgaagtcccaccctttttttgtctaaaaagagctactggaaacctgaagtgatgattgctgctcagggaccactgaaggagaccattggtgacttttggcagatgatcttccaaagaaaagtcaaagttattgttatgctgacagaactgaaacatggagaccaggtttgtacttttgaggattttcttttaagcctttctgtcataaaacgtcattctctagtcttggattgcttgcttcatcgccatacccacgtctttttttatccctccatcacataattctgtctgctcagtcttacccctttcaccctggtgttggcctccatcagctgtgtctggattctgacagtctctcctgtttgtcccctccagtcttgcatgctgctcacagattagccaggatgcagcaatgtcagcgtcacagcaaataacagctacattttcacgctgttttcctcattttctcaagataaaagccaagatctttttgtgatatccagcaccctggacaatcaccccctcatgtgtctttcatcttcctcccatttttatgttttccatcctctccactctggacaagcaggtttcatgcccaagcctaaacacgccatttgcattgtcatcactgagtctaaacttattgatattccatgtaactaaatgtgtgctgtcttccagttttgaccctattcttttaacaagaccaaactcctgaaaaatgtatctatatcatcctttctttattcccatataatatttattgccataaaagtctatagttgaaggtgaatctaagctataatttgatttttttacttaatgcttgtgacagatattttatccttttcttaatgtcttcagttattattaaaatttccctggtggtagatctcactcagctttagcaccaaccacattatctgacatatgttcaagcctattcagtgaataaccttataagtatgcaaaagatttatgcttttttatgcccctctctctcccctaaatctcactctttctcaccctcacctggtccccttcccctgtacatggaaagttgctttttatgttttttgttttaaaggaatataagtccagatttctagcatggaattcccacaatcctttccttcatataaattgtgaaagctgggaaacaggatggaagtaccggcaggactccctgtctttgtcagaaattgtggggttgtagttggtagacaacagtttgtagtaagaagaaacacttttgtggttcatctactcttcaatctggccctttccttagctatgtagacaaaatatataaagctgcttatggtgttggtcaacaagatgacagagacaaagctccaaaagatgcagcctccttcctcaagaaccactgaagggacagtgggacctgagttattgaaagggtcatgaataacattgactcatgccagccataaatattgaagaggtcatgataagcatgtggaaaagaggagcaaacctcaaagacctacactaaggaaaacagctgttccgggggtgtcccagtcacctcgattgtgctcagcttcccttttcttacacaaggaaacaccacatatttattaaatgggtcgccagcacttaaatagattctggatttttataagtaggtttcaattttagaacacaataattttcatttaatagaaaagaggcacagacagagaaagaaagggagaaagagggagactgatcctttgcatatttcaaataggaaacaaattgttgaattgtcttcttttatctaggaaatctgtgctcagtactggggagaaggaaagcaaacatatggagatattgaagttgacctgaaagacacagacaaatcttcaacttatacccttcgtgtctttgaactgagacattccaaggtatggaaacaatttggggagtatatttctttgatataatggatctggtagcaaaatgaatataaattactctatgcaggcaaggccatcatataaataatgtttcagaataacattttaaaattatttaaatagaagtaactgtgaagaaaatatgactatcaaattagaaaataagctgaacttcactccagttaatgctctcttcaattctgattttagaggaaagactctcgaactgtgtaccagtaccaatatacaaactggagtgtggagcagcttcctgcagaacccaaggaattaatctctatgattcaggtcgtcaaacaaaaacttccccagaagaattcctctgaagggaacaagcatcacaagagtacacctctactcattcactgcaggtgcgtgggatttggtagaatgtgctctcaaaatcataatgcttgacttctcggttcacatgttgtcttatctagttatcctcatatatgaaacacataaccacagtaaaaacttcttatggagtcggtcactctcttggttgtttccacaacacaactattgtagaaatataatagaagtgattatattatagtgcaataattttaagttgtgttttttaatacttggtgtcatgtcatctttgattccttggtagctaacattgagccaggaatgtcatttgtgtgaatgaattaatgaatggaagggtgtgtgaacagataggtagatgggtatcaccttacacatatacccatatacattgatctactctattaggtgtcacaaagacacctaatatgtttaatgaacacaaagtttattaaacatattttaagttaaatattaactgaaatcacaaagcttagcaattttgatttgaaactcattatttaattttctaaactgaaccaaaggcaaagattgtggtaatatcaataatactactagattttattagtttcttcatctgtgataggtgcttacatattcaccttaaataagcaatataattgaaagaaagatatataatataaaagtttacatgaaaaagaatattgaagtaaatgagaaacgaaaaatagtaaagtaaaatgagaaatgtttatctagtgaaaaacttttggaatttttgaaaaagtctaattgttattattggaattgcatatactagaatcaagccttaagaaatatatgaattttcagcatttatgtggaaagaaagctgaggaagggaagtttacactgtaaaactatatatgtttcttagaatatgatttatgtacaataactaaagtgtcctgctgataacatattgtttaaattgaatctttatgataatgctttatacttctcattgtttggtaaactatttgattgccctctttttagtgaataattctactaggtattacttttctactgatgcagaagtgaaaacatttgtgaaacgtggtagagaggcagaagagtgaagaagagcatgtgttctagtaatttacaaaatattaggtctaatatttctgattacatcagctttctcttctccaaatcttggtttccttatctatcatactggcattctgatattggtttcaacaacttcagatgtaaataaaaatgcattaaaatccataaaatactaaataaaagaaaatatatttgtaaagtcgaagacaaataagttttcaattccaggattatcacactcttaaattgaaaaatttgcctaaaaatgcatttagcgtaaataatttggttcttgaaagaggttggaataagataattatgataaacatgaagcaaaaaatatattctctctcttcctgtttttattctaatatcaccctttttggtgagaagtaggattattttctatcttttctttcttttatagggatggatctcagcaaacgggaatattttgtgctttgttaaatctcttagaaagtgcggaaacagaagaggtagtggatatttttcaagtggtaaaagctctacgcaaagctaggccaggcatggtttccacattcgtaagtatccttcaccattgcttttaacatgctcggaattttttttttctttttgacggtttccttttttcttttctcctctcctttcctctcgtttgttcttttttcccctttccttttctcttctctattttctttcctattcttttagcttttctacttttacatgataattcacattaaattattataagtctaaataagagcctaaagtttactagcactttgttgtgacagttcatgaagagcctttccctaaatgctcatgaatttcttaattttctttccttcactcctgtatcgatttgtgttgtgtaacaaaccacccccaaatttgggagcctaaacaaataacatttattatggttcagtagtctaatgatatgctggaatgttctgctggtgccctcaggctcaggcaatagagaccaggctgactcatgtgtctgccttcagctgatgtgtgccctacagtttggctggtctaaagtgacctacactgccagtaggctggcatgtggctgccatttagctatggcaacaacagtgagtgggccacatgtccctcctcatccagaagactagcccaggcctattcacattaaagcagcaagttccacaagggaaagaagacttgtgtgagaccacttgaggcccaggcttaaaagtgacacacatgtcttcttctgtatgttattagccaaataaataagtcataaagcctgcccagattcaaggggtagggaaatagactccacttcttgagagggcctgcaaattcacattgcaaagaaatgtggatacaggaaggaaaataagttttatattcttgtaatcgatctatcgtgtataccctctatgtggtagtaactgtagatggtcatctgggaattaatccttattcacagtgtaaacttaattactcactaaaatatataaagcttttaatcatgtatgatattgagatttcatatcttggtacttaaaaatgtatcaaatgcttgctatgtgctcttgctataaagagctaattggtatgagggaaagccaggtatttactaatcaatgtagtgagtaaaatgacagaaaaattataagaagaacatgaatgagggcatttaatttaaactttaggaatcaagaaacgcttctcgaagcagtgattcctgccctgattcttaaataatgtgtaggcattagacaggaggataagtacaaaacgtggcatcatgagcaaaggcatggaaatggcccatgagcggagtgaacactggtttggggttgctccaaggtaaagttcaaaaagtatcctgcagtcaaccctttagcaccataaagaaactaaattatttagatgtttttatgagaacatatcaaaaagtacttttctgtcatccaatacttccacaaataaatcattagttcttgctaatcttcatctggcataaaaataatgacatcaactttcttcatgtaatttcccacttaattcctttactaggagcaatatcaattcctatatgacgtcattgccagcacctaccctgctcagaatggacaagtaaagaaaaacaaccatcaagaagataaaattgaatttgataatgaagtggacaaagtaaagcaggatgctaattgtgttaatccacttggtgccccagaaaagctccctgaagcaaaggaacaggctgaaggttctgaacccacgagtggcactgaggggccagaacattctgtcaatggtcctgcaagtccagctttaaatcaaggttcataggaaaagacataaatgaggaaactccaaacctcctgttagctgttatttctatttttgtagaagtaggaagtgaaaataggtatacagtggattaattaaatgcagcgaaccaatatttgtagaagggttatattttactactgtggaaaaatatttaagatagttttgccagaacagtttgtacagacgtatgcttattttaaaattttatctcttattcagtaaaaaacaacttctttgtaatcgttatgtgtgtatatgtatgtgtgtatgggtgtgtgtttgtgtgagagacagagaaagagagagaattctttcaagtgaatctaaaagcttttgcttttcctttgtttttatgaagaaaaaatacattttatattagaagtgttaacttagcttgaaggatctgtttttaaaaatcataaactgtgtgcagactcaataaaatcatgtacatttctgaaatgacctcaagatgtcctccttgttctactcatatatatctatcttatatagtttactattttacttctagagatagtacataaaggtggtatgtgtgtgtatgctactacaaaaaagttgttaactaaattaacattgggaaatcttatattccatatattagcatttagtccaatgtctttttaagcttatttaattaaaaaatttccagtgagcttatcatgctgtctttacatggggttttcaattttgcatgctcgattattccctgtacaatatttaaaatttattgcttgatacttttgacaacaaattaggttttgtacaattgaacttaaataaatgtcattaaaataaataaatgcaatatgtattaatattcattgtataaaaatagaagaatacaaacatatttgttaaatatttacatatgaaatttaatatagctatttttatggaatttttcattgatatgaaaaatatgatattgcatatgcatagttcccatgttaaatcccattcataactttcattaaagcatttactttgaatttctccaatgcttagaatgtttttaccaggaatggatgtcgctaatcataataaaattcaaccattatttttttcttgtttataatacattgtgttatatgttcaaatatgaaatgtgtatgcacctattgaaatatgtttaatgcatttattaacatttgcaggacacttttacaggccccaattatccaatagtctaataattgtttaagatctagaaaaaaaaaatcaagaatagtggtatttttcatgaagtaataaaaactcgttttggtgaa

SEQ ID NO: 33 - DNA, 63468 bp, Homo sapiens
acgcacagcccccctgggggccgggggcggggccaggctataaaccgccggttaggggccgccatcccctcagagcgtcgggatatcgggtggcggctcgggacggaggacgcgctagtgtgagtgcgggcttctagaactacaccgaccctcgtgtcctcccttcatcctgcggggctggctggagcggccgctccggtgctgtccagcagccatagggagccgcacggggagcgggaaagcggtcgcggccccaggcggggcggccgggatggagcggggccgcgagcctgtggggaaggggctgtggcggcgcctcgagcggctgcaggtacacggggtcggcggctgtgcgcagaggcgtccctgcgcctctcgtcccttcgcctctcgtcccttcccttctctctgccttcttgcccgcctcctcggtcacagagcgacgaatgacgagaccaggtgtacccccactgtcgctctcagccccggggacttcgggtcctcgcccttgaaggccgcaggccctagtgcgccggctccgggctgcgggtccgggagcgcgggcgcagccaaggtgcagctgcgcggcgtgcggcgccgggggaacacgtggctgctccaggaagtcgccccagggaacggctgggattcgtgggtgaccttgggctcctaaaccttcggttccccgggctccgggcgggccccgttctcactgcggaaagggacaaagctgtccccgattcggttactagcgtgttacaggcattaattagatacgggtttctgtaaacttacccttcggctctggtacaacctgatcttgccatgctctgcctgttcgccttgtgtgtggattctgttttctcaaggcagaatccgactgaacgccgcaggtgttcacattaagaatattgctagcagttctcactacaagacgggagccataggagtgacttatttgtgaaagatacttggagattagcggtgtggtcagagggctgtgctggattgatgggcgccggagaggccgattgtgtcacattctgctggacagttcttttaaggttgggagggtgggtaagaaaatacattctgattcggctcttttcggataacgctttccctctgcttactgcttgtagagacctcacttacccgggggactggattctgcagctttttccattttcttccccgttgataagaggattaaagtaggaaattgtatttggctaccccatgcttatatgctaagcttactgtgaaaattaaggttaggctgtctagagtacttgtggaccctgctggttccccccgccccccggccctgaattttgggttacaatatgcttctcaagaaaactcagagttaagataatttttgtcatcgattttgcaaggttatatatagcatagcatccttcaatttcctttggatgttcttatcaagtaatggtggctgtaaacctagcctgtgttgaagattgttagatagacagcagtttggctaactccgccctaaggcgaggcagttacttgcctctgataatgtatttaaatgtcatggagcaagattcccagctaaacctgaatcgatcacaatgctagttaaaaatgaccctcggctgggcgcattggctcccgcctgtaatcccagcactttgggaggccaaggcaggcggatcacctaaggtcaggagttcgagtccagtctgactaacatggtgaaatcctgtctctactaaaaacacaaaaattagccgggcatggtggctcacgtctgtaattccagcactttgggaggccgaggcaggtggatcacttgtggtgaggagttcgagactagcctggccaacatggtgaaaccccgtctctacgaaaaatacaaaaattagctgggcatggtggtgcacacctgtaatcccagccactcaggaggctgaggctcgagagtcgctttaacctgggaggcagaggttgtagtgagctgagatcgtgctactgcactccagcctgcgcgacagcgagatgccatctcaaaaacaacaacaaaaaaactccctactaaaccagaagagtgatggggacgggaaaagattcctggtccaatgttttcattatatttttcatatcatttggaatctcatgcatcaggcatgccccagtactgttaaagacaatatttttactcattatcaggtagttcaataccagttattacaggatagggaagtcagtcagagaaggcttcatagagatgaagccttgagctgagcctggaagaaatgaggaggacctcaaggaacagagaagaatgttggtgggtaaaaacaggggctggattctgtctgattttggagaaaatagagggtagtgaagttgttaggcagtgaatgtgttccatttcatggttcaaaacgtggggctacgttttgcctacctgagcttcattattaatgtgagaaattgaattgttgttttcagtcaccattgagaacaccaaagataacacaagtagcttagattattatttatttatttatttttgacagagtttcacgcttgttgcccaggctgtagtgcaatggtgtgatctcggctccctgcaacctccacctcccccaggttcaagtgattctcctgcctcagcctccccagtagctgggattacaggcatgcgccaccatgcccggctaattttgtatttttttggtagagatgggatttctccatgtttggtcaggctagtctcaaactctcaacctcaggtgatctgctcgcctcggcctcccaaagtgttgctgggattacaggcgtgagccaccatgcccggccatcgctttgtgttcttaaaattaatttaaaacaagaaaacttgaggaatgatggttcagatgagtgttaaaacttgcaagatgttttttcctagaaaaggatgattaaaattggttcagggtggggccttccagttctggctctaatgattgggtccttactgttctggtggagtggtagtgataagctttttgtaacagaaggggcaaaagattgtgcttctggctgggcgcagtggctcacgccttcgatttccttgggatgttcttatcaagtaactaatcttagcactttgggaggccaggtgggtggatcaccctaggtcagaagttccagaccagcctggccaacgtggtaaaatcccgtctctactaaaaatacaaaaattagctgggcatggtggtgggcacctgtaatcccagctactcggagtctgaggtgggaaaatggcttgaacccgggagggggaggttgcagtgagccgagatcctgccattgcactccagcctaggcaacaagaccgaaactctgtctcaagaaaaaaaaaaagattatgcttctaagaatatggtctattgcatatggacactggtttttaaagcttgaatttaaaaagaattttttgtaataggttttagagctttttctttttcttttttattatttttttgagatggagtttcactccgtcacccaggctggagtgcagtggtgccatctcggctcactgcaacctccacctcccgggttcaagcgattctcctgcctcagcctccccagtagctgggattacaggtgcccaccaccacgcccatctaatttttgtatttttagtagagatggggtttcaccaccttggccaggctggtctcaaactcctgacctcgtgatccacctgcctcggcctcccaaagtgttgggattacaggcatgagccaccgtgcctggccagaaagctttttcttaatgccagttataataccctttgctttacaatttgcgtatacctcacagcttgctttgtgccgtgtgtgtttaatatgccctaagtgtactcgtatataggaaaagctttaaaatggtatccaataaatgtccattttgcaaatctcaggataatgtcattttcaagtatctagatgccctcaaaccaaattaactggaaaattcagatttcagttaaggcctttaacttaacttaggactttgattacagagatgtattttgctttgacaaaagttaaggttaatgtcttaaatttccagagatgataacacaatttctataacccagtaacccatttaacttcgcttagattatcaattttcagccttgaacaggccacttagtttctctaataactggcctcttcatctgtaaaacagcgtaatctgtgtttcatgtttcttcttgtgtcaaagatcgaatcacttgtaggaactattcattcagtcaggatcagtatttcttccccttcccattggagatggtttgtggtatttgtagcataactggtcttgtctgccttagtcttaattttgtctttttgtatgtgtcactttcttttttttttgagacagagttttgctcttgttttccaggctggagtgcagtggcgcgatcttggctcactgcaagctccacctcctgggttcacgccattctcctgcctcaggctcccgagtggctgggattacaggcgcccaccaccacgtccggctaatttttgtatttttagtagagacagggtttctccatgttggccaggctggtcttgaactcctgacctcaggtgatccacccatctcagcctcccaaagtgctaggattacaggtgtgagccaccccgcccagcagtatgtgtcacttttgtctactcagaacatagtggttcgtacttataattgcagcactttgggaggccaaggtgggaggattgtttgaggccaggagttcaagaccagcctgggcaacatagggtgaccttgtctctacaaaaagaaaaaaaaagaattatgtatataacaaactttaaaaaggatcccacttaatttagttgtcatgtaaactatggttaaataccttttctagaaaagtgataatgtattttaaaaatttaatgtatcatttagcctggtaatagaaagctcactaatctgatacagtagtatctttctcaataattctctattctgatacctaggttcttctgtgtggcagttcagaatgatggatcaagctagatcagcattctctaacttggtaagatattttcagttgtatttctgtgtctgcaagaatgtgaaatatacaagcatgactttaactgagtaagcatgaaataataaccccaatctattatcaggtattcatttacatttgaattggtagtcttgaggcataactgatctcacaaagagttcagccttcagtagggttaattatggaaagtcttggaagaattctcagagtggttctgggtgtggtagacggggacagcttagtagataagacgaattaaagccctgatcaaaatgttttagtaggagaagtaaaaagcaaaggcttgcggggcgctgtggctcacgcctgtaatcccagcactttgggaggctgaggtgggtggatcacctgtggtcaggagttcaagaccagcctgaccaacatggtgaaactcggtctctactaaaaatacaaaaaaaaaaaaaattagctgagtgtcatggcgcatgcctgtagtcccagctacttgggaggctgaggcaggagaattgcttgaacccgggaggcggaggttgcaatgagctgagatcacgccattgcactccagcctgggcaacagagtgagactccgtctcaaaaaaaaaaaaaaaagcaaaggctgaatgaggccaagtgtggtggctcactcccgcaatcccagcagtttgggaggtgaggcaggaggatcacttgaggagtttgagacttgcctgggcaacatagcaagcccatctctattaaaaaaaaaatgaaattttaagaaacattgagtagacagtatgagtgaaagctgaaagaacatacaaaaaaaacagccatccaggccatgacgagaaggagcctaactcttaacactctgtctagacctcaattctctcttatttgtatttatttatttatttatttttattttattttttgagatggagtctcagcctgggctctgttgcccaggttggaatgcagtgtgcaatcttagctcactgtaacctccgcctcctgagttcaagcgattctcctgcctcagcctcctgggtggctgagattacaggcgtgcgacaccatgcccagctagtggtttttttttttttgaatttttagtgagaggggatttcaccatgttggtcaggcttgtctcaaacttctgaccataaatgatctgtgtgcctcggccccccccagagtgctgggattacaggcatgagccactgtgtctggtctattctctcttttctgtcttctatcttatgcttagtcagaatttctgcttatttataactttgttttattcttgctcccttgctcccaccaacatcatggtctgggttactgcatagtatcctgaactgatttgtgcccctagtcccagctactcaggaggctgaggtgggggaatcagtagagcccaggattttgaggctgcagtgagctgtgatcacaccactgtactccatcctgggagagagagggagaccttgtctcaaaaaaaaaaaaaaatttacaaaaagggagagactgactgagaagaccagtgtgaactagcccttgactgggcccagggaagaatgttggtttgaaaggagaacaccctaaggaatatatagcaagttatagtaatggcccaataacaagcatatacctaaacgagcttttcctaaacattcccgtgcctgttcttcatcatgcctttttccgcaacacagtttggtggagaaccattgtcatatacccggttcagcctggctcggcaagtagatggcgataacagtcatgtggagatgaaacttgctgtagatgaagaagaaaatgctgacaataacacaaaggccaatgtcacaaaaccaaaaaggtgtagtggaagtatctgctatgggactattgctgtgatcgtctttttcttgattggtgagaatgaccattccaaacttcaatgttttctataaccaactctgggaagtctgttatgtcagctcagcatatagttattttgtaccttattttttttttttttttttttggagacagaggcttactctcttgcctaggctagagtgcagtggcaccatgttggctcactgcaacctcagcctcccaggtttaagcgattctctgccttagcctcctgagtagctgggactataggcgcccacgaccacacctggctaatttttttttttttttttttgagttggagtctcactctgtggctcaggctggagtgcagtggcgtgatttcggctcactgcaatctccgcctcccaggttcaagcgattcttctgcctcagcctcctgaggagctgggactacaggcgtgcaccaccacacctggctaatttttgtatttttagtagagacggggtttcaccatgttggtcaggctggtctctaactcctgacctcgtgatctgcccgcctcagcctcccagagtgctgggattacaggcatgagccactttcccgtccactttatgcctttttaagtgccactaggaagacaatcatgagtagattctatacctgtcattgaatttaatctggttggaaagagagacccatgaattatttcaatacgacgtgcaagtgttttctttttatttatgtatttttttgtttgctcccactccaccaggaagcaaatgctacgctagaaaatatccgcaggacactggcggtgcagcagctcagtctcatgtttcaagggggtcttttggaaaaaactacctatgttttgaataggtagctatttgaaataaagctagtatataatttattaagtggtttaaagtatacaaaactgagatgcattatatactttaaaactacttagaatttgatgaaaaccagtattttcaaggcttacctgaaaatattaacagattaacagggatagattacaaatgaaattctgagttcagctctggaactttgtctctttaggatttatgattggctacttgggctattgtaaaggggtagaaccaaaaactgagtgtgagagactggcaggaaccgagtctccagtgagggaggagccaggagaggacttccctgcagcacgtcgcttatattgggatgacctgaagagaaagttgtcggagaaactggacagcacagacttcaccggcaccatcaagtgagtgccagctgctgtgcaagtatctagacaagtaattcaagaattatgataggccacggggaaacaataatggtgacactgtggggaatggcttgttagagaagacaagacttgtcatgtttagctaaagaggggaaggggcctgtaaaaaactgaaactatactggtaggggaaaaggtagaacttctctggggagtctcctttttcttaaaaaattaataggcccttgatgttttccccatctttgtagcttattgcttgctgtcattctctggctctgatttttcttcttaacctcttgtaacgttgtactaagctctgctttgctgacaaggacatcagtagcttttctctgttttaggaagcaacacatgccagaagtagcctttttcatctccttgatcatgggtaactgcctgccttaagtctctagtgcttcttaatttctgtgatactcacccattaacccctaggccagtcagtatccagagacaatgtctccctctggtggaggctggaatacggtggcgtgctctcatctcaccgcagcttcatccccctaccatagcctcctgagtagctgggactataagcacgcagcaccacacccagctaatttttttttttttttttttaagagatggagtctcaccatgtctcccaggccggtctgttcttagatttttatttatttacttatttattttgagatggagtcttacgtgttgcccaggctggagtgcagtggcacgatttcagctcagtgcaacctctgtctcccaggtttaagcaattctcctacctcagtctcctgagtagctgagatcacaggcttgtaccaccatgctctgctaatttttgtgggttttttttttttttttttttttttgcagaaacgggatttcaccatgttggccaggctggtgtctaactcctgacctcagatgatcctcctgtcttggctcccaaagtgctggaattacaggatgaggcactgcacctggccaaatttctattttatatttatttatttattttatttgtaatgggctttctggcaaaaactagaaagcatgctagacaaattctaaaagagctgtaacacttgtccatagagttttactatctttgcacatacatgcctctgtgcaaagaataaatttatcttttcctttttgcaagcttcctacacttacagtggtactataattctttagtcttaagttatggcattttctacttcatctagttgatgcttttgtgtttatttactgtacaccagaccttatggttaaagtgagagtatagtccaccccacaaaaatgtaagaactaatatgctgagtaaatagaaagaagtatgggagatcggaccaaggagcagttctgcttcagggtattcagatgcttcacaagtaggtgagaattgaaactatgcactctgttcagcacagtattactatcttagattttatagtagatctggaagctactcatttcccctaaaactatcctaagcagatacattgtgttatgatgaggctcttgaaggagtgctttgtagtgggtaaagaagctttgaagttacaagatttggggcaaaattttttttcttttgtgatattctggtcagtctagaagttttgggtcacagttcatttatctgaactatgagggataatattttgctttcaaaacaatttgtttaatccttgacttaaatgtttattttaaagtaaacttaagttcatttaaaaggcattttctcctccaggctgctgaatgaaaattcatatgtccctcgtgaggctggatctcaaaaagatgaaaatcttgcgttgtatgttgaaaatcaatttcgtgaatttaaactcagcaaagtctggcgtgatcaacattttgttaagattcaggtcaaagacaggtatgttgaaagatggtaaacttatttttatacaagtagctattttcaggtgtgctaaatatagcaaagactttttgttagtgttgttggcttttttttgaaatggagtctcgctctgttgcccaggctggagtgcagtggcacaatctctgctcactgcagcctttgccttctgggttcaagtgattctcctgccttagcctccagagcagctgggattacaggcgcacgccaccacgcccagctaatttttgtatttttagtagaggtgggatggtctcgaacttttgacctcaggtgatcagcccgcctgggcctcccaaagtgctgggattacaggcgtgagccaccgcatgcggcccaaaggcttttaaaataaaaatcaagcttaagatttagaggtaaatttcctcaagccaaataatgcaagacatactaaatgtaagctattgtgttttttggaaggatgaccttaggcttattttaacttaatctttttaacagcgctcaaaactcggtgatcatagttgataagaacggtagacttgtttacctggtggagaatcctgggggttatgtggcgtatagtaaggctgcaacagttactgtaagtaaagcaaaacagtgcatgagactcttccctattgaatcattcaaaactcatcttttctgttcttaggagttataaatttacctgtaaaatgtaaatgatcatgagatattttggttttcaaccctctaatgacacagtcaacatgcattgtcttctctctctaatcactttccccatgtcctgttttattttttctttatagtactgctagcagctgacattatctatgcctttgtttccattagaatgtgagccagatgaagaatcatgggttagttctatttactgccatgttgcagagctttggagaatgcctgacatacatagtagtatttgctaaacaaatgcatatcctccctgtggggacagatgtaaatatccatcttggctggggcctagtcttagcttgattcgttaatgcttgatctttttctatttttgttttgagacagggtgtcactctgttgccctagctggagtgcagtggcgtgagcttggctcactgcattctccaccaccacccaggctcaagtgagcctcttgagtagctgagatgtccagttaatttttattttttattttattattattattattattattattattattatttggtagagacagggttttgccatgttggccaggctggtcttcaattgaaactcctgggctcaggtgattcaccaccctcagcctcccaaagtgctgggattacaggaggaagctgcttcgcccagcccttgatctttttaaatttaggcaaatatagtcaaattaacacagaaatagagaacagatagatagaataattttcagcttaaaaatcacatttgtggctgggcgtggtggctcacgcctgtaatcccagcactttgggagtccaaggtgggtggatcacctaaggtcagagctaccagcctggccaacatggtgaactctattaaaaatacaaaaattagccaggcgtggtggtgggtgcctgtaatcccagctacttgggaggctggggcaggagaatcgcttgaagccaggaggtggaggttgcagtgagcggatattgcgccattgcactccagcctgagcaacaaaagcgaaattccatctcaaaaaaaaaaaaaaaatcacatttgtaagtcaggcgtatctctagtggatacctttcggggctggtgcagttctgtgttgattccttgcctttctggatacttgtgctttatccctttgcctggctgcctataagccaggagtttagagatgggtaggttgttctgttaaagaacattgaagatttttgttcaacttcaagctttctgtattgagggcttggttgttagtgtcagtttatggctgttcatctggactcttatgagcttaggaacatcatgacacatctaaagttggtgtatgcaagtcactttgttgtaatagatggtgttttaattttgggacagatttattatcagacctttcagttaaaacctatttctatgatgtcctcaaggctaagattgttccaggcctccagtcccatgaccagcctacataggcctctttaatctaaatgcccttcagatgaaaggcagcatgggataaaagcatgaaagacataggaggccaaaaatcttgattttattccaatagctctgacctaaaagttgtaaagttttttagaactcatgtcttttttaggccttggcctccttttatctcttacttgggttgcctgtcttaggtttgatctataacactcttctgtctcaagattttagagctgttccgataccataatgctcattaaatctaatgtctttgttctagggtaaactggtccatgctaattttggtactaaaaaagattttgaggatttatacactcctgtgaatggatctatagtgattgtcagagcagggaaaatcacctttgcagaaaaggtgagtatgagttattataatattaaatacagtacttttggtatcttactcttcaggtaagtgatatttcttgttaatattcttacattctgaaaatcagcaatcttaaactctcataccagataatataatttattaaaatgctcaacaaatgaagtaagttccacttacctaatcagaagtgcttaagtgaaagctatttctctgtataactcagttttacgcatatacagaattcagctaaaagcatgttttataaaaaggaaaattaatagccaaacatacacaaggaactagagtggaacatatcaaaagacagtggtgatttctgcatttttaaaaaaagtggcagggctcacacctgtaatcccaacactttaggaggctgaggtgggaggactgcttgagccctggaggttgtgagatgtgactcgtgccactccagcctgagtgacagtgagactcaaaaaagtggttgtcttagatgggtttttgttatttttcttttcttttttttttttttttttgagacggagtctcttgtcaccctggctggagtgcagtggcgtgatctcagctcactgcaacctccgcctcccaggttcaagtgatgctcctgcctcagccttctgagtagctgggattacaggtgcccaccaccaccatgcctggctaatttttgcatttttagtagagacagggtttcacgacgttggcctggctggtcttgaactcctgacgtcaggtgatccacctgccttggcctcccagattgctgggattacaggtgtgagccaccactcctggcctttgttattctttttttttttttttttttttttttgagagggagttttgctcttttgtccaggctggagtgcagtggcgcaattttggctcactgcaacctctgccttatggtttcaagcgattctcctgcctcagcttcccaaatagctgggaatacaggcgccagccactgcgcccagttaatttttgtatttttagtagagacagggtttcaccatgttggccaggctggtctcgaactcctgagcttgtgatccccctgcctcagccttgcaaggtgttgggattacaggcgtgagccaccactcctggcccgttactcttattttgcaaacaagtgagttaatttttcaggaagcaattaataaattaccagataaacaatttgaaatatttggaagtattataagtttagtcctctgtaaccatttggcctttagcataatgtccaggatgtattctcatttcgtatgatcagatcttcattttctgagctttatatgttttcttttaggttgcaaatgctgaaagcttaaatgcaattggtgtgttgatatacatggaccagactaaatttcccattgttaacgcagaactttcattctttggacatgtgagttatttcttgagtaaatcaccgttttgagttccttgagttgttcttggattcctgtattagcagaaatagcactgtgtcttccttaactgctcttttttctgggagggcgttagcagtaagcaagaagatagattacattgactttgaggctttattatttgttgctaaaagtactttgtcaatagtgccttgaatttgagaatttccatatgccatgaaaacaggagtcacattgtagagccactcagatttttgaggcttcaagttggtaaactaaggttgggctgcagccttataccaaacctgaatcttacagagaagttttgaggaagtatgtgatggagtgaattgctcttttgttttcctaggctcatctggggacaggtgacccttacacacctggattcccttccttcaatcacactcagtttccaccatctcggtcatcaggattgcctaatatacctgtccagacaatctccagagctgctgcagaaaagctgtttgggtaagtttttatttgaaagcggtcttgcatagtgaggttttatgattagggaagaacggtaatatgttgattaaaatgttaaacatgatgataattttccacatttgggaatttggaggatggttagctgttaccttggtacagatataaatgaatttttctctataaagagatcttaataatggactttggacttataaacacaggagaataaggagacttataaacccagtgaattccttgtgcaagattcctggcatagcttctgctcaagtacttctgtgctgaagcacgatgcctatagcagcccattcagttagtagagagaatctgttagaattcatattgggataaaatcctattccccgaaacatccatttgtctggatttttcttctaagcaatacggtatgattccagttaccttgtctatagattgagaagccttgcttcttatgatggtttccagagaaaccatttatggttgtggctcgctcctctggatatcctccctgtaacgttagtgtctctctttaaaaacagagcccagttccattagagtacgtagcattaattttgatttggatgtggacatatttatcatttcctgttattacaggatggagatctagtttcaggcctttatgaaagcatttatctcctgtatgacataggttctctgatcctgtttctttaacataattggatagtgaaaatatattctacttgatagtctcaaatgaagaacatctgtatataaggagtatatgaaataccatgactgttgatcatgctgagaggcctttagcataggggagtgtgtaacataccatgactattgataacgctaagaggcatttagcataggtgatttttttgactcattctacctaccacctacaaatcgtaaccaacctgtgaagccagcgtcccatcttatccttatgtagtaggggagtaataatgtttcaacctatatttatgtaagtaagcccccttaggagcagctattatttgggtaacacagaggaattagataggggaagcacaagattttttttttattttgacagtctcactctgttgcccaggcaggagtgcagtggcatgatcctggctcactgcaacctccacctcctgggttcaaggaattctgcctcggccttccaaagtgctgggattacaggcgtgagccaccgcacccagctgaggaatattttttataactgagctaagaatgtgtactatccttgttagtggtgacagttgggaaacataaaagtgtattaatattcttttatatattagaagaacttcattttgagtccatcttggtatgtattccaaatataaactacgtaagtatgtctggcagaaaggcgcatagttagagaagtgttttaaaatattgcttaattaatggtttccaattggctgcctgcagatcaaagtaagacgcaaatggttcaccactagagagtaagtttttttttgtttttattttgttttgttttgttttgtttttttttgagacaggacttgtgctctgttgcccaggctggagtgcagtggcgtgatctcggctcactgcagcctccgcctcccaggttcaagcgattctcctcctcatcctccttagtagctgggattacaggcgcatgccaccatgcccagttaatttttgtatttttagtagagtcggggtttcaccatgtcggtcaggctggtcttgaactcctgaccttgtgatccacctgcctcagcctcccaaagtgctgggattacaggggtgagccacttcgccgggctgagagtaagttttgtttatatgtcctcttaatctgtaacttcactggacaggagtaaaccctgggcaaggaacaataactcagaacttacgcctgctttctgattctaggaatatggaaggagactgtccctctgactggaaaacagactctacatgtaggatggtaacctcagaaagcaagaatgtgaagctcactgtgagcaatgtgctgaaagagataaaaattcttaacatctttggagttattaaaggctttgtagaaccaggtaaagaccgcccccccccccccccgccccgctttttttttgttttcttttctgttcctaaggatgtggctagagaaggagcgagtgtaggaatgctggcttggcttggttttatgaagtgctcaatcttgtctgtcctaaagttaattgtttatgtgttagtttcttttttttttttttgagaaagagtttcactcttgttgcccaggctggagtgcagtggtgtgatctcggctcactgcaatttccgcctcccaggttcaagccattctcctgcctcagcctccccagtagctgggattacaggcatgcgccaccacgcctggctaattttgtatttttagtagagacagggtttctccatgttggtcaggctccatgaggtcagagctcctgacctcaggtgatctgcctccctcagcctcccaaagtgctgggattacaggcatgagccaccgcgcccagcctatgtgtcagttttattgggaggtaataaggccctaggaaattcttgttaaaaattgaccattatgactagaaaatctattctaagttattgactagaccagtgataagcaaatttcttaagggggcagataataaaccttttgccaggctatacagtctctcttttagctgttcaactctgtgggagcaagaaaacaggcacagactgtgcgtagtgaatgggcatgcgggctgtagtttgccagtccctggagttaactttaaatgcaatcaaacagccaacacttactaagaaataagtccttggacttaagtagtcagtaaatttaattagtagtgtaggaaaaaagtagctctactagtaaggtaaaattaatattctcatgtgaatttttaattcccagagtttttagtcagatttgaagtaaggctcttttatccttaatacatatactgtgcttttacctttctactgatgtgctaattctagaaaagtttagaagctgattatataagttctttcttcctcttttttcttttttaaagatcactatgttgtagttggggcccagagagatgcatggggccctggagctgcaaaatccggtgtaggcacagctctcctattgaaacttgcccagatgttctcagatatggtcttaaaaggtagagtacaaattttgattcttttgaatattggtgcactgcatacagttctagatgttatactgtgctttgctcactttgcctgcattcctgtggttctcatgctagactctagttcttaaatacaaggcagattgtcttttgttgtagctgccttttcctttgaaacagctttccataaagtgtcttaactgtgctagaaatcaccagtttctttgagacagtggagttactgagccctagtgcttagtgtggtggatccagagtgataaggtggatcatagtccctaagcaatctatttgaaagcagtagcatacctctctactcatgtactgaggcctaacagctattgaaattttgttctgtttattcatttattcattttttgagacagagtttcactctgttgcccaggctggagtgcagtggtgtgatctcacttagctcactgcaacctctgcctcccgacttcaagcaattctcctgcctcagcctcctgagtagctgggattacaggcacccacaaccacacccggccaatttttgtatttttactagagacagggtttcgccatgttggccaggctagtctcctgacctcaagtgattcacccgcctcagcctcccaaaatgctgctagtgagccaccgtgccctgcctcttttgtttatttttgagcctttctgtcctactttccactctttcacactcctacccacccacacattcaaaatcacgtcacattcttgaatctttgggtcttagggcaaactgcaatgcttaactttaatacagagtacattaatggagaaaaagatacagtgagggaagtgggagggatggagggcagtgtgatacatgtaacctcaaaaggtgctgtcacaaatatagtttctctgcaaactcttcttgtaacttaaatttgtgaatttttattttattttagaattatttttttaaaaatccaatgtttggatttacctctgaagatttttctcaagatgtgcatcatcatgcttacactgttttcaatgatctctgggtccagaagttaaggaactccaagaatgaaattgtgaaagggtgactactggcccctgctatgtactcaaaatcttatttgcagatctcctatcttgctctttgtaggttactttaaaaaaaattattcctattcttttattcttttacctggggtctcaaaaaaagattttgttagttttttttttcttttttggctcagaaaaaaaagattttggaatctgctatcttggaattagaccttctgattcatcttaagtgggataccttccatccttgtctgtgtataacctttcctcaggtaaagctaacttttttctctttcagatgggtttcagcccagcagaagcattatctttgccagttggagtgctggagactttggatcggttggtgccactgaatggctagaggtattctttatcatcccttcccatattggacacgagcttgtgggcttaggctgttgtccagaagtgatgtttttataggtttgattttaccacttttgcctttgcgtttagtctcagtagagtccagaattgaaaatgaatccctaatgctactgtatgtgataaataaacagatttatacttattagtgttttcccttctcttctagggatacctttcgtccctgcatttaaaggctttcacttatattaatctggataaagcggttcttggtaagtatccctttcattagctgtgtatgaattcaggtaaacttttttgagatggagttttgctcttgtcgcccaggctggagtgcaatggcacgatctcggctcactgcaacctctgtctcccagattcaagcgattctcctgccttagcctcctgagtagctgggattacaggtgctcactaccacacccagctaattttttgtatttttagtagagacagggcttcactatgttggccaggatggtctcgaactcctgacctcaggcgatctgcctgcctcggcctgggattacagatgtgggccactgtgcctggccagataaactactttgaagtggaagaaagcttttttttttttttgagacagggtctcactgtattgcccaggctagagtgcagtggcacaatcttggctcactgcagccttgacctcctgggctcaggtgatcctcccacttcagccacctggctaattttttttgtagagatggggttttgccatgttgcccaggctggtgtcaaactcctgagttcaagcattctatgtcagctgcccaaaatgctgcggttacaggcatgagccattgccctcagcctgtatcttaaccttcctttaaatagtctgtcaagttacacagtgagcacaattgcttgtctagaacagtgggtagttctcagtgtggcccccagatgagtagcattaggaactgttacgaatgcaaactgtcatgtctaccccagacctttgagtcagaaatgggagtgttggtctaaaaactgggctttttgggctgggcgcagtggtgcacgcctgtaatcccagcacttgggaggccaaggcaggcggatcacctgaggtcaggagttcgagaccagcctggccaacatggtgaaaccccgtctctactaaaaataccaaaattagccgggtgtggtggcgagtacctgtaatcccagctactcaggaggctgaggtaggagaatcacttgaacccgggaggcagaggttgcagtgagccaagatggcgccattgccctccagcctgggcgacagagcgagactccatctcaaaaaaacaaacaaaaaaactgggctttttttttggcaacccttggggaataaaaacctattattttcttaaggacaaagtatcctgaagcaaaaaaacccaaacaaagaaacaaaaaactttaacaagcactacaggtaattctgatggactaaagttttaggaccataagtctggactatattgaggtgagaagaaactaaactatgccatatagaatggtacttagagagtaattcacatcctgttacgttgtggcatcactgatagaaatattggataatgaaacttctagaagagtttgaatgttcactggcagcagaaaattgacaaaagggtttgaatgttatttaaagtgcagctgtacattcaacaggaatggggtaaaaaagaaagtgcagatgtagctgatgagctgagaatagtgaaatgtctacatgggggaaaaaaggaaagagttacaattaaacctctctaggttagttatttccctgttgtatgtttgccgcagaatgtgctgagtatagcaagcatactatgtatagctctaacctgggtgaaccagaaagttaaacatgaaattgctaatgggggaggctgcacatgtgtgggggcagtggatttatgggacctctaggtacctttctcttaattttgctgctgaacctaaaactggtctgatttttttttttttttttttttttttttttgagatggagtctcgctttgtcacccaggctggagtgcagtggcgccatcccagctcactgcaagctccgcctcccgggttcatgccattctcctgcctcagcctcccgagtagctgggactacaggtgcccgccaccacacccggctaattttttgtatttttagtagagacggggtttcactgtgccagccaagatggtctcgatctcctgaccttgtgatccacccgtctgggcctcccaaagtcctgggattacaggcgtgagccaccgtgcccggcctaactgctctgatatttttaaaaaaggtgacttggattaaagtatgcaaactcaaggagtagtacgagcccacttgagtgaagttagcttagttgctaaagagcttgataccaaaattacttttgtttacttgatgaatgggatagttgttgcacagggccactgatctagattactgtcttatttgtcaagtacttatagttgtagaagtagcagtgtgaaaattatcggaatggagaaggggcaatgataaaacaatttattttcaggtaccagcaacttcaaggtttctgccagcccactgttgtatacgcttattgagaaaacaatgcaaaatgtgagtatatacctcattacaaaaatgtatgacttaatttttgttgaatcaacctgagataaaaaacactgatatgtaaaccgtagtcagtaacaaaaaataggaattgagaataaattttatagcagcgttatttaagggatacttgcctattgaaccatatgagatgagggctccaatcttaaagaatatgttgtttatttaggaatatataacaaaatgccatgaggcctaagctgtagtgcaggggcccacaggggattgtctatagagtcacaatgctaaggaaggcttaaatcaacttgaactatactttgagaaggccggaggaaatattcattgaataaacaattaccatagttttgaatgagggagagcatgtgaaagaaaatatttgcctatgtggggtggggggaggggagagggatagcattgggagatatacctaacgctagatgacgagttagtgggtgcagtgcaccagcatggcacatgtatacatatgtaactaacctgcacaatgtgcacatgtaccctaaaatttaaagtataattaaaaaaaaaataaataaataaataaaaaagaaaatatttgcctaatgggattagaggctgtatattggagtgagtaaagttagaaacaggtcagatagcagacattggccttgatccaagagatactagggattataggatctcaagcaaggtgatcatgaatttgccagttaggttggtggcataagatgcactagaaggaagaaaccagaaacaagataggcatagtgtgaagcccagagagggcttttacaattgtgggtaagccaccatggttttgtttgtttgtttgtttgtttttgagatggagtcttcctctgtcttcctccagcactcaggctggagtgcaatggtgcgatcttggctcactgcagcctccacctcctgggttcaagcgattctcctgcctcagcctcctgaggagctgggactacaggtgcacaccaccacacctggctaatttttgtatttttagtagagacggggtttcaccatgttggccaggatggtctcaatcccttgacctcatgatctcttgaccttggcctcccaaaatgctgggattacaggtgtgagccaccgcgcccagcttttattcatttttttttccttttttttttttaagagataaagtcttgctgtgttgcccaggctagtctcaaacttctgggctcaagtgatcctcccagctcggcctcccaaagtgttgggattgcagttgtgaactaccccacccggcctaggcccacttttaaaatgttaattaagaagaaaacattttttcctcaccataactaaaggaactgacaacatgagcctagttagtaataacttaaagttgagattgttttaactatcataaataatttcttttcaagaagatataatacaagttttttatttaaaaattgttatagagtaacatgttagtgactagcctgaataaataagttccaaaaggttagttttaatgataatttcttatcttacaggtgaagcatccggttactgggcaatttctatatcaggacagcaactgggccagcaaagtgtaagttgagaaaagtgaatgaacaaactaatagaaaagcagagattctacctactacattaggtagaatctaaatctgtccttgcattgaacttacttacacctaaagatattcagctaaagaatttattttggatggggggactagcacgatagaacagtctattctttaaaacactttctaaagacacattctttgtctttgcagtgagaaactcactttagacaatgctgctttccctttccttgcatattctggaatcccagcagtttctttctgtttttgcgaggtaagtctgttcatttaaatgacaaatggagagaggctctctaaaaggaagtgatctgtatttgggaatagggcattgcaatgggaatgcctgtgctatagtcaactatgtacatattcagaggagtaaaggaaaacaagtttttaaggacaaatgacgaggattacaaaattactttgaggtaattattcttggctaccaagatcaataacaaggatgacaccagtccaaggttgacaggcagttgctaggcagattttctcacgagagaagttttttggtgcaaggttgcagtggcctttgtgtaaggttgtagtttttgtaaaaaggaaaaaaaaaaacccttaatccttgttatcagacatacaagggtgagacccttctcttcagggttgcatttttgttaacactagtgactccattttgattttgacaacttgcacatatcttagttgttgggttttttttgtttgttttttgttttgtttttttttttttttttgacaatggtgacttgctctgtcacccaggctggggtgcagtggcccgatcatggctcactgcagcctcaagcagtcctcccccttcagcctccaaactgtttggattataggcaagagctacttactacacctggccatggatcttcttgtgtcaactttgagaccaaatttactgcagtgcttaaaatgttttaagaagttatacacatgtgctggatgtggtagctcacgcctgtaatcctgtagcaggacaagccgcagacaaatcccctcagacaccgagttaaagaaggaagggctttatttggctgggagctttggcaagactcacgtctccaaaaactgagctccccgagtgagcaattcctgacctttttaagggcttacaactaagggagtctgcgtgagagggtcgtgatcaattgggcaagcagggggtacgtgactgggggttgcatgcaccggtaattagaacagaacagaacaggacgggattttcacagtgcttttctatacaatgtctggaatctatagataacataactggttaggtcagggctcgatctttaaccaggaccagggtgcggcagcgctgggctgtccacctctgccttttagtttttacttcttctttctttggaggcagaaattgggcataagacaatatgaggggtggtctcctcccttaatcccagcactttgggaggccaaggaaggcggattacgaagtcaggagtttgagactagcctgaccaaaatggtgaaaccccgtctctgctaaaaatacaaaaattagtcggacatagtggcgtgtgcctgtaaccccagctactcaggaggctgaggcaggagaatcgcttgaacctgggaggcagaggttgcagtgagctgagatggagccactgcactgcagcttgggtgacagagcaagaccctgtctcaaaaaaaaaagttatacacatgtaattattgcatgttccttcattattagttttaacatagacttgttaatctcaattagcttaattagcatttgagtttattgctaaaacttctttatgagttttaataatgaggcttggccgagtgtggtgggtcatacctgtaatcccagcatttgggaggccaaggcgggtagatcacttgaggtcaggagttcaagaccagcctggccaacatggttaaaccccatctctactaaaaatacaaaaaaattagctgggcatggtggcacatgcctataatcccagctgctcaggaggctgaggtggaagaatcgcttgaacccagggggcagaggttgcagtgagccgagatcgtgccattgcactctagcctgggcaacagagcaagatcgtctaacaacaacaaaaaaaaaaccaaggctgaatttcttgagtgattgagcagtggctatctattggacagtccagctgaacagtattttcctcaggctgggtgcagtaactcacacctataattccggcacattgggtggctgaggtgggcagatcacttgaggccaggagtgagaccagcctgggtaacgtgcctagactatatctctacaaaaaattttttaaattaagtggcccagtggccagctgtagtcccaactccttgggaggctgaggcaggggggtcacttgagctaggagcttaaggctgtggggagccatgattgcatcaccacgctccagcctgggtgacagagtgacctcgtctcaaggctgcagggagccatgattgcatcactgcactccagcctgggtgacagagagaggcctcgtctcaaggctgcggggagctgtgattgcatcactgcactctagcctgggtgacagagtgacctcgtctcaaggctagagggagccatgattgcatcactgcactccagcctgggtgacagagagagacctcgtctcaaggctgcagggagtcatgattgcatcgctgcactctagcctgggtgacagagaccttgtctcaaggctgcggggagtcatgattgcattgctgcactctagcctgggtgacagagagaccttgtctcaaggctgtggggagtcgtgattgcatcactgcactctagcctgggtgacagagagacctcgtctcaaggtatgtttcatgtatcttctcttttttcattgataaaggcccaaacttcccagagagaaaaacatacagccttaaggaatttggctagaagtctattcagggcatatgatacgatagaacagggattctgtagaacctggaagaaagtagtcactctaggagtaggttagcttgagagaagtagcaagaatgtacttaaagcagcagataatgagatagaattggggtaaattgcggtaggaatatgttagaagcaagggtggaactgtcgtcactgttacctcgatggcgaagccagaatgtgaggctcttgctcttagaactcacgtgagtaccatagcctcgcgttgtcttgcaggacacagattatccttatttgggtaccaccatggacacctataaggaactgattgagaggattcctgagttgaacaaagtggcacgagcagctgcagaggtcgctggtcagttcgtgattaaactaacccatgatgttgaattgaacctggactatgagaggtacaacagccaactgctttcatttgtgagggatctgaaccaatacagagcagacataaaggtgagcactgattccaattacgtttttattttgctgaatgtcaagtattttgaaatgtgatgtgttcctgtgtgttcctgttggaagggtgattgtagccatagtacattttaaagtgaactgaggtataattgtatgtagaattggtaacttgtttgagagaagtcgggaggctgtggattagagacctaggacagagctcagcaggtgtttcagaatccagagcagtgtcaggttttctgtcactcatgtctcccaggcagcccgtcagtaggacacggaatatgaagatctcagcaaggagttgggctgtgtgcctctcgggcgtgacccggatggaaagacagcacagctagcaggattccatctcgtagtgatctgcgcatctaaaagtcaaatattctattaaacgaaactgataagcagggtgaggtggtgcatacccgtagccccagctacttctgctgaggcaggaggattgctggagtccagcccaggcaacatagcaaaatcccatctctaaataaattaataaaactaatattaaagtagcttccagattgttttatggtactaggagttgatttttaacagatctcttaattgaagtaaatcactgacaaccgaatctttttatatcttttttatttttatttttattttattttttttgagagatgaagtctcgctcttgtcccccaggctggaatgcaatgacatgatctcggctcactgcaacctccacctcccggctttaagcgattctcctgcctcggctccccaggtagctgggattacaggcgtgtgccaccatgcccagatagtttttgtgtttttagtagaagccggggttttaccatgttggccaggctgaagtgcagtggcgagatctcggctcactgtaagatgcgcctcccgggttcacgccattctcctgcctaagcctcccgagtagctgggactacaggtgccggccaccacgcccggctaattttttgtatttttagtagagccggggttttaccatgttggccaggctggtcttgaactcctgacctcaggtgatccacccacctcggcctcccaaagtgctgggatcacaggcatgagccaccacgcccggcatcttatgtctttcttgaaactaattgtaactgttgaaaatggaacttaccaggtggaaataactaaatcctgaagtaccttgaaccaaaatgttttcccctatagggacattttcccccaaaaggagaattgaactggaaacaatatagtacataggattatataattatgttcaatttcttaatgagaatggttttcttacatgctgggctcaaatatgagtgtatatcacagtccatagagcttggaacccctgtgcaaggtgctttcggagtcttgagcttatctgcgagttccttttatcagaatcttacttaacgcacgttaaattagaaaggcatacaaaagaatgtccttagaaataaaacttctcatagcgaataatgtctgtttcaggaaatgggcctgagtttacagtggctgtattctgctcgtggagacttcttccgtgctacttccagactaacaacagatttcgggaatgctgagaaaacagacagatttgtcatgaagaaactcaatgatcgtgtcatgagagtaagtgaacttttgggaaaggaggaactaaagtatgtgtaaaataaccgataaatcttacacttctgcaaagtggacaaactctaggagtctagaattcctttaagaagggagcattaatggtttagctgtcattttctgtttctgctgtctaattcagaacttagtcaaacctagtctttttggaagagacttgctgtaaaacttccatgtatgctccaatggggaaaagaatctgaacacatttaaagttttcctttgtaaaatgaatcagtttcctttaaaaaaattttttttttttttgagacagagtttcactgttgttgcccaagctggagtgcaatggcacggtctcggctcactgcaccctccacctcccaggttcaagtgattctcctgccttagcctcccgagttgctgtgattacaggtgcccaacaccacgcccggctcattttttgtatttttagtagaaacggagtttcaccatgttagccaggccggtctcgaactcccaacctcaagtgatccacctgccttggcctcccaaagtgctggtattacaagcgtgagccgctgtgcctagcctcctttagaattttaaccttagaagattagcattagcctggttctcagcattcttttttccttactctgctatagaaagtctgatcagctggctgggtacagtggctcatgcctgtaattccagtactttgggaggccgaggcaagcggatcacctgaggtcaggagttcaagaccagcctgaccaacatggagaaaccccatctctactaaaaatacaaaaattagctgggcgtggtggtgcatgcctgtaattccagctgctcaggaggctgaggcaggagaattacttgaacccgggaggtggaggttgcagtgagctgagatcgcgccattgtactccagcctgggcaacaagagcgaaactctgtctcaacaacaacaaaaagccgggcacggtggctcacacctgtaatcccagcatgaattgcttgaactcgggaggtggagggtaccagtgagccgagatagcgctgttgcactccagtctgggcaacaagagcgaaactctgtgtcaaaaaaaaaaaaaaaaaaaaaaagtctgatcggcattcttaaatttgggacattttacatttgaagtgaactgttgttttactacaaaagtcacagggctgtgtaaattgccttgtgtgttgttttcgtaggtggagtatcacttcctctctccctacgtatctccaaaagagtctcctttccgacatgtcttctggggctccggctctcacacgctgccagctttactggagaacttgaaactgcgtaaacaaaataacggtgcttttaatgaaacgctgttcagaaaccagttggctctagctacttggactattcagggagctgcaaatgccctctctggtgacgtttgggacattgacaatgagttttaaatgtgatacccatagcttccatgagaacagcagggtagtctggtttctagacttgtgctgatcgtgctaaattttcagtagggctacaaaacctgatgttaaaattccatcccatcatcttggtactactagatgtctttaggcagcagcttttaatacagggtagataacctgtacttcaagttaaagtgaataaccacttaaaaaatgtccatgatggaatattcccctatctctagaattttaagtgctttgtaatgggaactgcctctttcctgttgttgttaatgaaaatgtcagaaaccagttatgtgaatgatctctctgaatcctaagggctggtctctgctgaaggttgtaagtggtcgcttactttgagtgatcctccaacttcatttgatgctaaataggagataccaggttgaaagaccttctccaaatgagatctaagcctttccataaggaatgtagctggtttcctcattcctgaaagaaacagttaactttcagaagagatgggcttgttttcttgccaatgaggtctgaaatggaggtccttctgctggataaaatgaggttcaactgttgattgcaggaataaggccttaatatgttaacctcagtgtcatttatgaaaagaggggaccagaagccaaagacttagtatattttcttttcctctgtcccttcccccataagcctccatttagttctttgttatttttgtttcttccaaagcacattgaaagagaaccagtttcaggtgtttagttgcagactcagtttgtcagactttaaagaataatatgctgccaaattttggccaaagtgttaatcttaggggagagctttctgtccttttggcactgagatatttattgtttatttatcagtgacagagttcactataaatggtgtttttttaatagaatataattatcggaagcagtgccttccataattatgacagttatactgtcggttttttttaaataaaagcagcatctgctaataaaacccaacagatactggaagttttgcatttatggtcaacacttaagggttttagaaaacagccgtcagccaaatgtaattgaataaagttgaagctaagatttagagatgaattaaatttaattaggggttgctaagaagcgagcactgaccagataagaatgctggttttcctaaatgcagtgaattgtgaccaagttataaatcaatgtcacttaaaggctgtggtagtactcctgcaaaattttatagctcagtttatccaaggtgtaactctaattcccattttgcaaaatttccagtacctttgtcacaatcctaacacattatcgggagcagtgtcttccataatgtataaagaacaaggtagtttttacctaccacagtgtctgtatcggagacagtgatctccatatgttacactaagggtgtaagtaattatcgggaacagtgtttcccataattttcttcatgcaatgacatcttcaaagcttgaagatcgttagtatctaacatgtatcccaactcctataattccctatcttttagttttagttgcagaaacattttgtggtcattaagcattgggtgggtaaattcaaccactgtaaaatgaaattactacaaaatttgaaatttagcttgggtttttgttacctttatggtttctccaggtcctctacttaatgagatagtagcatacatttataatgtttgctattgacaagtcattttaactttatcacattatttgcatgttacctcctataaacttagtgcggacaagttttaatccagaattgaccttttgacttaaagcagagggactttgtatagaaggtttgggggctgtggggaaggagagtcccctgaaggtctgacacgtctgcctacccattcgtggtgatcaattaaatgtaggtatgaataagttcgaagctccgtgagtgaaccatcattataaacgtgatgatcagctgtttgtcatagggcagttggaaacggcctcctagggaaaagttcatagggtctcttcaggttcttagtgtcacttacctagatttacagcctcacttgaatgtgtcactactcacagtctctttaatcttcagttttatctttaatctcctcttttatcttggactgacatttagcgtagctaagtgaaaaggtcatagctgagattcctggttcgggtgttacgcacacgtacttaaatgaaagcatgtggcatgttcatcgtataacacaatatgaatacagggcatgcattttgcagcagtgagtctcttcagaaaacccttttctacagttagggttgagttacttcctatcaagccagtacgtgctaacaggctcaatattcctgaatgaaatatcagactagtgacaagctcctggtcttgagatgtcttctcgttaaggagatgggccttttggaggtaaaggataaaatgaatgagttctgtcatgattcactattctagaacttgcatgacctttactgtgttagctctttgaatgttcttgaaattttagactttctttgtaaacaaatgatatgtccttatcattgtataaaagctgttatgtgcaacagtgtggagattccttgtctgatttaataaaatacttaaacactgagttgtcatttctttagataaattttttaaaaagagcagttttaggctcatagcaaaattaaacagaattcccacacatccactgtttctgccacttacacatcctccatgacggtcaacagcttgcgccagagcggcatatttgttacaatgggcagcctacacgggtgcaccattagcaccgtcagcatcattagtctactgtttacgttagggtttgttctacggtttttgacaaatatgtaatatcattctagtagcttacagaatagtttttattgctgtaaatcttgtgctctgcccattcatccatctcttctataaggccctggtaaccacagatcttactatatccataattttaccttttccagactgtcatacagttggaatcagaatatagccttttcagattggcctctttcactaagcaatagcatttgtttcctccatgtcttcatgacatgatacctcatttctttttagcacagaacaatattctgttgtctgcagttaccatagtttatctagctcacctacttactaagtaatcttgcttctaagttttggcagttatgaataaactgataagcacctgtgtgtatatcttttctgtgaacataggtcttcagctctttaggtaaataccaaggtacatgattgctgctgtcttctaagtgggcgatctcagcccactgcagcctccgcctcaggcagttctcctacctcagcctccgagtagctgggattacaggtgtctgccaccacgcctagctaattttcatatttctagtagacgtggggtttcaccatgttggccgggctagtcttgaactcctgatctcaggtgatccgcctgcctcagcctcccaaagtgttgggattacaggcgtgagccaccatgcccagcctctattggcaatttctaaatatacaatatattgtcaccatataccacatatgtaattttatttatttttgagacagaatctttgctgtcgtccaggctggggcgcagtggcgctatctcggctccccgcaacccccacctcctgggttcaagtgattctcctgcctcagcctcctgagcaactgggattacaagtgtgggccaccacgcctggctaatttttgtatttttagtagagatggggtttcaccatgttggccaggctgatcttgaactcctgacttcaagtgatctgcccacctcagcctcccaaagtgtgtgattacaggtgtgagccaccaccacgctctgcctccttttttttttttttcccgagacagtctcgccccatcgcctaggctggagtgtagtggtgccatcgcagctcactgcaacctccacctcccaagttcaagcaattcttgtgcctcagcctcctgagaggctgggattacaggtgtgctccataccgtgtcttcaaactcccttgtacctcaagcaatgcacatctcagttttggctagccacatttcaggtgctcagtagccacatggttagtggacaccagctctatagcaaaaggcgtaattgttgagagttttcttattttggccttctaccgtgtggttaccaaaaaatccatcacacaattgaatctcattgctatgagtgccagccaggattcttaagtatggccacgaaaattgtggcccctagaattggaagcctaattgcctcacctatgccccagctttcccgtgtccaaattagccacattcatacccttgagaagcaagatgattattaaactgctgtattctacgggagaaactgcctatgtgaaaggtcatgggttaggaagctgtcctaaacaaatatttgtaaaacacctggttatctgcaagacagctttgcctagaattcaatatcagataccaatgtcttccttgtggctgtcaacaggtttaggtgctgagttaaataaagcctttgcagtttgctgcatttgccctttaagctgcctcatgcttaatccaccccaaatggacagctttgtataattttcttttcttttcttttttttttttttctgaaatggagtctcattcttgttgcccaggctggagtgcaatggcgtgatctcagctaactgcaacctctgccttccaggttcaagcgattctcctgcctcagcctccccagtagctgagattacaggtgcatgccaccatgctcggctaatttttgtatttttagtagagatggggtttcgccatgttggccaggctggtctcgaactcctgacctcaggtgatccgcccgccttggcttcccaaagtgctgggattaaaggcgtgagccaccgcacctggccagctttgtataatttttaatgccttttttgaaaatattcacatacggtcaaagtgcagaaaagtctgtattaaaaagtattttcctcttagtctccagagttgtcatccctctaaatctccacaattaccaatttttctttttttattttgagatggtctcgctcttgtcacccaggctggattgcagtggcatgatttcagcttgctgcaacctccgcctcctggattccagctatcctacctaagcctcctgagagtagctgggactacagacaggcaacaccatgcccagctaagctaatttttgtattttttgagagatggggttttgccttattacccaggctggtctcaaactcctggactgaagtaatacacctgcctcagcctcccaaagtgctgggattacaggtgtgagccactgggcctggtcatttaccgatttcttatgtacattttcaaagttgtctgtgcataaatgagaattctataccagatcttcctaaaagcatatatgggggctctggttccacagtcaccacataagcctcctacaacctatccctcctgctgcttacagccagaagctcagtaagacggggggaaaactctcccaaacctgagatgtaaacaaaggtaggcaaacagtggaggggagtaaaacttggagaagtgacctcaaaagggaaagaattggcaggaaccaaaagaggaacaaacaaaaaaactggtgaagtggcatgctgagtccagccatatcaataattacattattgacatgttaacattctaatcaagactgatgattaaaaaacaatcaaggcccatttatatgctgcctataagaaactttaaagacagatgaattgaaaggggaaaaaatacaatatgtacactagcatactatgactggaatggttatataaatataagattaaatagactttgaacagatagtaccgtaaagataggaatattttataattgtaaagagagccattcaggaagatagcagacttataaatacgtatgcaccttaaaatacatgaaaaagaaatgaaaattctgccattaaaatagattttaacacccatttcttagcagtaaatagagaagctagaccaaaaaaatcaggacaaattatttgaaccactgtatcagccacctcaatctacttgacatttgtagaacaccacattcaacaactgcaaaatatactttttttaggtatatgtggtatattcagcaagatagaccatatactgggtgatacggtttggatttgtgtccctgcccaaatcttaggtcaaatcgtaatccccagtgttggaggagggggcctggtgggaggtggttggatcacgggggcggaatgcccccttgctgctgtcatggtagatcccacgagatcgggtagtttgagagtgcgcagcgcctttgctgtcttcctccttctccagccgtgtgggatgcgcctgcttcccctctgccttctgccatgatggcgcagtccctgaggcctccccagtcatgcttcccgtgtagccggcggaaccatgagccaattaaacctcttttctttatgaattacccagtctcaggtagttctttaaagcaatgtgagaatggactaatacattgggtggtaaaacaagtctcaatttttttttgttttgtttttgacttggagttttgctcttgttgaagattatgtagctcgtttcgggaagcttctatcttcttacgatctgcagcatctatcctgtaaacaatagccttgactcgtcgctgtcacacgggctggagtgacgtggcgcgatctcggctcactgcaggctccgcctcccgggttcaagcgattcttctccctcagcctccgagtagctgggattacaggcacccgctaccacgcccggctaattttttgtatttttagtagagatggggctttcaccgtgttgcccaggctggtctcgaactcctgacctcaggcgatccacccgcctcggcctcccaaagtgctgggattacaagcgtgagccaccgcccggccggtcctggatctttattgtgacatgacctttagttactttcctcgtgttgaaacccactgtggccgtcatatctccgctgaattcacctgacgtgatggcagtgacgaaggtggccttgcccgagtactgcagcccacgagcatcggctccatctcctccttccagacgagcgaaggggaccgtccggcaggcggcagatgagcgctagcatgatggcggctgtgagccaggacgaccctccacaggagcagcctccacccgagcccacgacggctcctccaggcccgcgccacacaggcgggcacaggccggcggtagcggccttaatttttttttttttttttaaagacaagctcttgctatgttgcccaagctggtcttgaactcctggcctcaagtgatcctcccacctcagcctcgagttgctgggattctaggtgtgagtcactgcgtctggctctctgaacaactttatgtccccaaatttgacaacttaaatataagtagacgaatttattgatatattcaaattaccaaaattaacgtaaaatcaggacatctgagtagacccatatatacaattattatttttaaatctgcatgtctattttacttccatcacaaaaatattacctatataaaattgtggtccactttcttctccttgacctcaaatttaacactttttgttcctttttttttttttttttttttggagagagcatctcactccctcacccaggctggagtacagaggtggctcactgcaacctccacctcctgggctcaagcgattctcctgcctcagcctcctgagtagctgggattacgggcatccgccaccattcctggctaatttttgtatttttagtaaagacggggtttcaccatattggccaggctggtctcgagctcccagcctcaggtgatccgcctgcctcaccctcccaaagtgctggtattacaggtgtgagccaccacacccggccaatttccacactttaatttcactcaagtaaaagcaggatcacattcctgacataagaactaatatttcacatcattagtttggattcgatatgttcttgattggttgtttctcgggaatagtaactcatctttcctacgtgttatttctcttttattgattgaggaaataaatgtaatgaccatcatagatctgtgacgaatatctctttcctgtgttcagtaagacaggtgtacataggtgtaattcaaaaccgtaacgacgccgggcgcagcagctcacaccggtaatcctaacactttgggaggccaagatgggtggatcacttgaggtcaggagttcgagaccagcctggccaacatggtgaagccgcacgtctactaaaaatacaaaaattacctgggcgttggtggtgcgtgcctgttatcccagctacttgagaggctgaggcaggagaattgcttgaacctgggaggcagaggttatggtgagctgagactgcgccactgcactccagcctgggcaacaagagcgaaaccccacctcacaactcaattacacaaacttttttagaacatagaggaggaacaattgtccaacttgttatgaagccaacataacatgcccaaaactaacaaagatagtataaaaacaaaaattacagaccaatattttcatgaatatatgtgcaaaaatccttcacaaaatacaagcaaattgaatccaatatatcatgaccaagtagagtttattacaggagtgcaagtgtagtttaacattaaaaaatcagtatatctggcaattccatgcgtatgtatatatccaagataaatgaaaacatgtccacataaaaatgtatatgggaatgttcatagcagcattatttataatagcctcaaattggaaacagcccaaaagtctatcaccagatgaacaaataaacaaaatatgatgtaagcacacaagggaatacgatataagcacacatgggaatacgacgtaagcacacaagggaatatgatgtaagcacacaagggaatatgatgtaagcacacaagggaatatgctttggcaatgaaaagaaatggagtgatgtcataggtggtggtatattaggaagtgccaggaagccatctttccacttaacgaccattgcgttgtcaggaactgttccgagtcattattgtggaactggggtctagttgaacatgtgcaacatccaggagagaacccaatttttggctttgtcggtagtgcctcaaatccccacttcccagccccacagcaggcagctgagagaagggtggtctctattcctggggtggcttccggaagccggggtgggcaataagaaccttgtcttccaaacctcaggattctgtattttgatggctgattgctgcttttgactggggaaggtgactgctgaggtaatagaacaaaaaccttagtgaccacacataacaaggcatgcttcgcaaaaaatagttcggaaaagtcacaatggatggctccaacactcaataaacaaggttctgcaacccctgaggactgagagaattagatctccagagttactgcaacacagtgttcaaatatttccagttctcaatgaggaaattacaaaacagagaaacaagaatgtgtagcctacacacggagagggggagaaaccaatttgacagaaattagcccctgaggaagcccagacactggaattattcgtccaagatgttaaatcaactgtgttaaatatgtcaatgagctaaaggaaactatggaaaaaaaataaaggaaatcaagaaaactatacatgaaccaatgagaatatcaataaagagatagaaattattacaagcaaccaaatagaaaatctggagctgaaaaataaaataactgaaataaaaaagttgctatagagtggggcatggtggctcatgcctataatctcagcactttgggaggctgaggcatgtggatcacttcagctcaggaatttgagaccagcctgggcaacacggcaataccccagctctacaaaaaacacaaaaattagctgggtgtggtggcacgtacttatagtctcagctactcagggggctgaggaggtgggagaatcgcttgagcctgtcaagtcaaggctacagtgagccatgtttgtgccactgcactccagcctgagtgacgaatgagactctgtctcaaaaaaaaaaaaaaagaaaagaaaatcaatctaggggttcacatttgagcaggcagaagaaaggatcagtaaactgtaatataagaaaattagaactccccagtctggcaggtgcagtggtttacacctgtaatctctgttctttgggaggttggggcaggaggatcaattgagacctgggcaagatggcaagatcccatctgtaaaaaaaaaaaaaaaaattcttcttttaaattagccaggtgtggtggcaggtactatagtcccagctacttggaatgtggaggtgggaggattgcttgagccaggagttggggattagagtgagctatgatcacaccactgtcctctagcctgggcaacagggtgagactctgtctctaaaacaacgaactatccaatctgaagagcagagtggaaaaagaatgaagaaaaataaacaacagagcctgaggtccctgtgggataccattaaacatgccaacatgtaaattataaaagtcccagaagaaggcagagataaacgggaagaaaaaacatttgaagaaatgatggttaaaactttccaaatctgaggaaaaccatgaatacacacatctaagaagctcagtgaacttcaggtaggatatactcaaataaatgcacactgagacatataatcaagttatcaaaacccaaaggaagaataggagaattttgaaagcagcaaaagagaactgacacatcacatcacatagaagaggagccttggtaagatgattaccagccgcattcaagagggcctgggtaagattaccagctgcttctcttcggaaaccatggaggccagaggcaatggggatgacatgaagttctgaaagaaaaaaactggcaaccaagaattctatatctgccaaagctgttcttcaacaatgaaggagaaaataaagacatttccagatgaacaacagctcagggagctcattaccagtataaccgatctgcaagaaacgctaagtggtataaggctgaaatgaaaggacactggacagcgactcaagccatgagaccaaaagacagagcagtggtaaagggaactatgtggataaatataaaagccagtattattgtactttcggcattccttgtggcttttctctttttcttatataataggcaaatgcacaaaacaataattacaaatctatgttaatcagtacacaatgtataaagaagtaatctgtgacaataacatataaagagggaaagacagatttataggagcatagtatatactattggatctaagctggtattattcaaactaggttgttacaaatttaaggctgggcgtggtggctcatgcctgtaatcccagcactttgggtggccgaggcaggtggatcacttgaggccagtattagaggccagcctgcccaacacggtgaaacgctgtctttactaaaaatacaaaaattagctgggtgtggtggtggatgcctgtaatcccagctacttgggaggctgaggcaggagaatcacttgaacccaggaggtggaggctgcggtgagccgagattgctctactgcactccagcctgggcgacagagtgagaccctgtctcaaaacaaaacaaaacaaaacaaaacaaaacaaaacaaaacaaaactaggttgttatacatttaagatgtgaattgtagcccccatgttaaccgttaataatttaaaaatgtacagaaatggaatgatgacaggagtttaaaaagtacacttaaaaaaatacaaaaaggcagtaatgaaggtattgaggaatttttaaaatgtaagacatacaaaaacaaatgcataaatggcaaaagaaaatatagttttatcactaatattaaatgtaactgaattaaactctcctatgaaaaggctgggattggcagattggatttaaaaaaaaaaaacaagatccatctatacgttgtcaacaagagattcactctagatgtaaggacataatgttggaagtaaaatgatgaaaaaaggtattttaccaaatagtaattaaaagagagctgagtggttgtattattatcaataaaatagactttaaaatgattacaaaatacaaaaaagggcattatatagtgataaaagatttgacacaaacttgttttggcacctggccaaaaacaagttttaatacatttcaacagactgaaatcagacaaagcattttttccaatcacaatggaatgaaactagaaatgaataacaatgaaaacttgaaaattcacacatatatggaaattaacacttttttttttttttttgagatggagtcttgctctgttgcccaggctggagtgcaatggcacgatctcggctgactgcaacctctgcctcccaggttcaagcgattctcctgcctcagcctcctgagtagctgggattacagacgtgtgccaccatgcccagctaatttttgtatttttagtagagacggtttcaccatgttggccaggctgatcttgaactcctgaccttgtgatctgcccacctcgaccgcccaaagcgttgggattacaggcatgaactactgcacccggccggaaattaacactcttaaatacaaatgagctaacaaagaatcacaagagaaattagataataccttaagataaataaatgaagaagaaaatatacctaccaaaacttatgagatgcaacaaaaacagcattaagagggaaatttatagttgtaaatctatacatgaaagaaaaatactgcaaacagtggattagtgtcccctacgattgcagacttgtattattacttcttcttctactaattttttttttttttttttgagatggagtctcactctgtcaccaggctggagtgcagtggcgtgatctcagctcactgcaacctctgcctcctgggttcaagtgattctcctgtctcaacttcccgagtatctgggaccacagacacacatcaccacacccagctaatttttgtattttttagtagacacggggtttcaccatgttggccaggatggtcttgatctgttgacctcgtgatccacccatctcggcctcccaaagtgctgggatttcaggcgtgagccactgtgccccaccggacttgtatattacttctatagttataagctataaaccacagtttatagttctgtaagctttacataactgaaattcatgcttttagatatttacaaatttatgagctgcctatggaattgatctttttattactttgaaatgcgtatctttatatcttgtaattctactttagatctactttgtccaatattaatatagccatataatttttcccttggttaatatttgcatgatctattttcatcctttcagttttagactatgtatgtctacatacttaaaatgtttcttttgtaaataaaatatggctgtgttttattttttatgtagctgacaaattctgtattattttattttttactcagaattcttttcttcttatgaggcataattgacaaataataattatattaaaaagagaagaaagatctgaaattgacaacctaactgtacacctcaaagaactagaaagagaagagcaaattaaactgaaagctagaagaaaggaaatcataaagaaccagagctgagataaatgaagtagagaatagaaaaacagagaaaatcaatgaaaccaaagtttttctttgaaaacatcaacaaaattgacaaacttttaaccaggtggattcagaaaaaaagagagaagattcagtttactacaatcagaaatgaaattggagacattattaccaatttaacagaaagtaaaaggtttataaaagaatagcataaacagttgtatacaacaaattggataacctagattagatgcacatattcctagaaatacacgatataccagaaatgactcataaagcagtagaacatctgaatagactctgaactactaaggttgaatcagtaagacctggccttttcttcaccagatggtttcactggtgaattcttcttcttttttttttttttttttttttgagacagtctcgctctgtcgcccaggctggagtgcagtggcacgatctcggctcactgcaacctccctctgccgggttcaagcgattctcctgcctcaccctccccagtagctgggattacaggcgcgcaccaccatacccagctaatttttgtatttttagtagagatggggtttcaccgtgttagccaggctggtctcgaactcctgacctcgtgacccacccacctcggaatcccaaagtgctgggattacaggcgtgagccactgtgcccgtccgccattatgaatattgatgcaaaatgtttaatactagcaaaccaaatttagcagcttatcaaaataattatataccatgactaagtgaggtttagtctgtaaatgcaaggatggttcaacataggaaaatcaaccaaggtgatgcaccacattaatagaatgaaggggaaaaccccaaatgatcatctcaattgatacagaaaaagtatttgacaaagtccaacacactttcatgataaagcagtcaataaactaggaatggaagggaattccttcaaaataataaaggttatatctgaaaaacccacagctaatatcatatacaatggtgaatttcttaaaactttaccccaaacatcagaaagaagataaggacttctattcaacacagtagtagccgttgtagtcacagcaactcggccaaaaataaatcgcatctgaactggaaaggaagaagtaaaatcacctctgttcacagaagacacgctcttacatgtagcaaattctaaagaatccacaataaaatggttacatctcactccagaattcagagacatggcaagatacaaaatcaacacacgaaaatcagctgcattgttatccactagcaatgaacattccgagaggatattaagaaaacaattctggctgggtgcagtggctcaacgcctgtaatcccagcactttgggaggccaaggtgggtggatcacctgaggtcaagagttcgagaccagcctggccaacatggtgaaaccccgtctctactaaaaatacaaaaatcagtcgggtgtggtggcacgcagctgtaatcccagctacttgggaggctgaggcaggagaatcttttgaacctgggaggcggaggttgcagtgagattgtgccactgcactgcactgcactccaggctgggtgacagagtgagattctgtctcaaaaaaaaaaaaaaaaaaaaagcatcaaaaagaattaaaaatacacaggaataaatttaacgaaggaggcacaagacttaaacttatgtattgaaaactataaaacattgccaaaagaattaaagaagacataaataaatggaaggatattccatgttggggattgggaggcgtagttgttaagatgacaatactgcccagcctatctacagagttaatgcaaaatccctttcaaaatcccaggggtgttttttgcagaaatagaaaaacctaatttgaaattcaggccccgcatggtggctcaggcctgtaatcccagcactttggaaggctgaagcaggcggatcacctgaggccaggagttcgagaacagcctggctaacatagcgaaaccccgtctgtaccaaaaaatacaaaaattatccgggttgggggttacgtgcgcctgtagtcccagctactcgggagactgaggtgggaaaatcacctaagtccgcggaagtcgaggctgcagtgagccttgattgagccaatgcactccagcctgggcgacagaaagagactctgtctcaaataaatttttttaaaaaagtaagtaaataaataaataattaaattaaattaatgtgggatctctcctataggctctgggaagcctgtggcttgagatgtggccccgcagaggaatgcgcatgcgctgagtcacccaacgatttgggttggcggaaaagtaatggcggtttttgcccttcctttttttttttttccttgagacggcgtctcgctctgtcgcccagactgcagtgcagtggtgccatctcggctcactgcaagctccgcctcccgggttcacgccgttctcctgcctcagcctcccaagtagctgggactacaggcgcccgccaccacgcccggctaatttttgtatttttggaaccttttgtattttagaaccttgaaaacgttatgttaagtgaaataagtcagacataaaaggacaaatactgtatgattccagttatatgaggtacccagattaggcagattcacagggatggaaagtaaaatagaggttgccaggggctggggtacagaggaaacgggaagttactgcttgatgggcacagagtttctgtttaggatgaagagaaagctctggaaatagtggtgagttacacaacattgtgaatgtacttagtgccactgagttgtatacttaaaagtggctaaaatagtgtattttatgttatgtgtgttttaccacaataaaacattctaaaaaataggaataaagtactacaacacgggtgtactttgaacccactatgctgagtgaaagaggcccttcaccaaagaccacataggtatgatttgatttctgtgaaatgcccggaacaggcacatctacgcagacagaaagtagatgaatgattgccatgggctggatgaggaggaagcggggagtgacagctaatgggtatggggtttctttttgcagtgacagaatgttctaaaattaggtaggggtgctggttatacagctctgtgcatgtcttaaaaaccaccgaattgtacacttttaaagagtgaattcactttttaagagtgatttttttaatttaaaaaatgttttaaactattttctgcatccaaccaaccattactttgtttaattttttatttatttattttttttgagaagaagtctcgctctgtctcccaggctggtgtgcagtggcacgatctcggctcactgcaagctccgcctccaggttcaagcgattctcctgcctcagcctcccgagtagctgggactacaggcacgtgccaccacgcccggctaatttttgtatttttagtagagacgggttttcactatgttggccaggctggtcttgaactcctgaccttgtgatctgcccgccttggcctcccaaagtgctgggattacaggcgtgagccactgcacccagcctttgtttaaatatttttaatttaatgtctttaacaattttttttcgagacaagatctcactctgttgcccaggctggagtgcagtagtgcaatcaccattcacggcagccttcatcacccaggctgaagcgatcctcctgcctcagcatcccaagtagctgggattagaggtgcatgccaccgtgtctggctaatttttgtatttttttgtagagacagggtttcgccatgttgccaggctggtctccaattcctgggctcaagcgatccgcccatcttggccttccaaagtgctgaaattacaggcatgaggcaccgtgccccgccttaaaggatgatttttattgtatgtaaattatatatcaataaagtcatgaaaaatcaatcagggtaattcaccatattgacagaataaaggagaaaatgcatgatcatgccatagatgcagaaatagcatcttgtgcagatttacaccgtttcattataaaactagggataataggaagctttctcaaactaataaaatggcacctaataaaacttacagctagcatccaaaatttatgataaaaaactgaattgttcatctataaaatcaagaacaaggaaacaatggccatttttactacattttttgtttgtttgtttgttttgttttgtttgagactggtgtctccctctgtcccccaggctggagtgcagtggcacaatcactgtaacttcaacctcctgggctcaagcagtcctcccacctcagccttctgagtagttggaactacaggcacgtgccatcatgcctggctaattttttaatttttttgtggagagagacgaggtctcgccatgttgcccaggctggtctccagctcttgaactcaagcgatcctcctgcctcagcctcccaaagtgcagggactacaagcatgagccacggctccagccccaccactttttaaaaaatttatcacctcaataatttttcatttctttgtgttataaccattccagttataatcttttagtttttttaatgtataataaattattgttgactatagtcaccctactgtgctatcaaatactagatcttattcatctaattatattttttacccattctcttccccgcttcccccactgttcttcccagcctttggtaactgtgattctgctctctatctccatgggttcaattgttttaatttttagctcccacagataagtgacagcatatgtgaagtttgtcttcttgtgtctcacttatttcactcaatataatgtccttcagtttcatccatattgttgcaaatgactggatctcattttattttatttatttatttatttatttttgagatggagtctcactcttgttgcccaggctggagtgcagtggcatgatcccggctcactgcaacctctgccttccgggttcaagcaattctcctacctcagcctcctgaatagcttgggattacaggagcacaccaccatgcccggctaatttttgtatttttagtagagacggggtttcaccatgttggccaggctggtcttgaactcctgacctcaggtgatccacctgcctcagcctccctagtgctgggattacaggcatgagccactgtgcctggccacttttttatgccctaatagtgctccattgtgtatatgcaccacattttcgttattcatttgttgagggacacttagattgattctaaatctcagctattgtgaatagtgctacaataaacatgggcatagtgatatctcttcgatatactgatttcttttctttttggtatttcctttcttttgggtatatgcagatgactactgaatcatatggtagttctatttttagttttttgaggcaactcaatactcttctccatagaggttgtactaacttacattcccaccaacagtgtatgagggttcccctttctctatgtctttgccagcatttgttattgcttgtcttttgcacaaaagacattttaactggggcgagataatctctcactgtagttttaattttaattcctctgatgatcaatgatgttgagcacctttacataacctgtttgccatctgaaggtcttcttctgagaaaagtctattcagatcttttgcccatattaatatcagataattagatttttcatgttgagttgtttaagctccttgtgtattctgactattaatcccttgatagatggatcgtttgcaaatattttctcccattctgtgggttttatgtgcattttgttgattgttttctgctgtacagaaactttttaacttaatgtgagtccatttggtcatttttgctttgtttgcctgtgtttgtggggtattactcaataaatctgtgccctatctgtaaccccagcactttgggaggccaaggtgggcagatcacttgaggccagtagactgagaccagcctggccaacatggtgaaaccccatctctactaaaaatacaaaaattagccaggtgtggtggcgggtgcctgtaatcccaactactcaggaggctgaggcaggagaatcactttaacttgggaggtggaggttgcagttagctgagatcacaccactgcacttcagcctgggtgagagagcaagactctgtctcagtaataataataataatacagaaatctgtgcccagaccaacgtcctggagaacttccccagtgtttttgttttgttttgttttgttttttagtagtcttccagtttcaggtcttagatttaacttaatacattttgatttgattttcatatatggcaagagacaggggtctagtttcattcttctttacatggatatccagttttcccagcaccagttattaagacttgccgtttccccaatgtatgttcttggcacctttgttaaaaatgagttcactgtagatgtatggctttatttttgggttctctattctgttccattaatctatgtatctgttttatgtgggtaccatgatgttttctttactatagctttgtaatataatttaaagtcaggtaatgtgattcctttagttttgttctttttgctcaggatgagtttggttattctgtgtcatttgtggttccatatgaattttaggattattttttctatttctgtgaaggatgtcattgttattttgatagtgaatctgtagattgctttgggtaatatggaaattttaacaatattgattcttccaatccatgaatatggaatatctttccattttgtgtgtgtcctctttgatttcttgtatcaatgttttacagttttcattgcagaaatctttcacatctttggttaagtttatttctaggtattttattttatttgtagttattgttaagtgggattaatttctttatttctttttcagcttgctctgttggcatatagaaatgctactgatttttgtatgttgattttgttgattggcattgatcaacaaagttgcagttgttgatcctgcaactttactgaatttgtttatcagttctaacagttttttggtggaatctttaggtttttacgaataaaagatcatataatctggaaataagatagtttgacttccttctttccaatttgcatgtctttatttctttgtcttgtttgattgctctggctaggacttccagcactatgttgaatagcagtggtcaaagtgggcatccttgtggtgttccagagcttagaggaaagactttcagtttttcctcttcagtatgagactagctgtgggtctgttgtgtatggcttttattgtgttgtggtatgttcctcctatacacagttttttgagggtttttatcatgaagggatgttgaactttatcaaatactttttcggcatcaattaaaatcatcatatgatttctgtccttcattctgttgatatgatgtatcacattgattgatttgcatatgtggaacctaccttgcatccctggtatcaatcccacttggtcgtgatgaatgatattattaatatgttgctgaattaggtttgctagtattttgttgtggatttttgcataaatgttcatcaaagatattggcctgaagttttttttcttttgttcttttttaaaatgtgcctttgtctggtttggtatcaaggtaatattaaccttgtaggatgagtttggaagtatcccctcctcctctattttttggaatagtttgaacaggattggtattagttatttaaatatttggtaaaattcagcagtgaagccttcaggtcctgggcttttctttactgggagacttttgattatggctttgatttcattattagttattggtctgttcaggttttggatttcttcgtggttcaatcacagtaggttgaatatgtctaggaatttatccacttctaggttttccaatttattagcaacatatagttttcatagaagtctctagtgagcctttgaatctctgcagtatccgttgtaatgcctccttttacatttctgattttatctatttgagtcttttttctttttttcttagtctggctaaaggtttgtcaattttgtttatcttttcaaaaaacaaacttttttgtttttttgatttttttttatttcaatttcatttatttctgctctgatctttattatttgttttcttctgattttgggtttgacttgctcttgcttttctcgttctttcttttcttttcttttttttttttttttgagactgattctcactctgtcacccaggctggagtgcagtggtgccatctccgctcactgcaacctctgcctcctgggttcgagcaattctcctgcctcagcctcctgagtagctgggattacaggtgcctggcaccacacccagctaattttttgtatttttggtagagacagggtttcaatatgttggccaggctggtcttgaactcctgacctcaagcaatccacccgtctcagcctcccaaagtgctgggattacaggcatgagccaccgcgcctggctcgctcttctagttctttaagatgcattgttaggtggtttatttgaagtttttctactttctttctttcttttttttttttttgagacagcgtctcaatctgttgcccaggatggagtgcagtggtacaatcttggctcactgcaacctctgcctcctaggttcaagagattctcatgtctcggcctcccgagtagctgggattagaggcgtgtgccaccccgccctgctaatttttgtatttttatttatgtatttatttaggagacagagtcttgctctgtcacccaggctggagtgcaatggcacaatctcagctcactgcaacctctgcctcctgggttcaagcgattctcccacctcagccccccgactagctgggactacaggcacccgccaccacgcccagctaatttttgtatttttagtagagacagggtttcaccatattgaccaggctggtcgctggtcttgaactcctgaccttgtgatccgcccacctcagcctcccaaagtgctgggattacaggcgtgagccaccgtgcctggcctgtaatctttaaagctcaatagaaatgtaagatcttgctattgttatgcgattataaaatcttccattccttgctttttccttggttgctggcctagaaactaaatcaattctgttctctttttattttttaaaagtaatctcgaacatgtgaaattgctgatattttaatgtattgctgatgtttcatctattccaatggtagcttcctctggtttcttctaatagttaaaactctatcatgcctataatcccagcactttgggaggtcaaggcgggcagatcacctgaggtcagaagtttgagaccagcctggccaacatggcaaaaccctgtctccacttaaaagatgaaaattggcaggagaatcgcttgaacccgggagaccttggttgcagtgaaccaagattacaccactgtactccagtctgggcaacaaagcgagactcagaaaaaaaaaaaaatatatatatatatatatatatatatatgtatgtatatatacacacacatatcaaagcaatatatttgtatagtgaaacctcagacagtgccactaagtgaatgataatataaaactcttatttcttattttgctatgatgttaggttctcaacaatcattccgcctgctggtttaccttggtcttttttcccattgagatgggtttcccttcaatgtctggtgattcttcattgttcacatttaatagtgacacgtgaagaaggagaatgagtctgtgttatcattagtgaaaggctcgtctagatggtgattcttcactgttcacatttaatagtgacacgtgaagaaggagaatgagtctgtgttatcattagtgaaaggcttgtctagatggtgattcttcattgttcacatttaatagtaacacatgaaggagaatgagtctgtgttatcattagtgaaaggctcgtctaggtggtgattcttcactgttcacatttaatagtaacacatgaaggagaatgagtctgtgttatcattagtgaaaggctcgtctagatggtgattcttcactgttcacatttaatagtgacacgtgaagaaggagaatgagtctgtgttatcattagtgaaaggctcgtctagatggtgattcttcactgttcacatttaatagtgacacgtgaagaaggagaatgagtctgtgttatcattagtgaaaggctcgtctaggtggtgattcttcactgttcacatttaatagtaacacatgaaggagaatgagtgtgttatcattagtgaaaggctcgtctaggtggtgattcttcactgttcacatttaatagtaacacgtgaaggagaatgagtgtgttatcattagtgaaaggctcgtctagaggttttgcttcggggagtcgatggggtttccgcatgttagtaagtgatgcctttggtctggatggtttccttcctctggagaaaaccttctcctctcctctctggaaggcagctgcttgcttgttggttgttggtgttctactcactggttacccgaggggtggggtgctggcatcggtgagggaggataatgagggttgactgtcaatgtacagattttaatcgaccctcctgttttctgatgcctgcctcacttctctgcccctcacccccaggaaggtccacagatgatgctccttctcacggatgcgaggccatcaaatcactttttgtctccgctgctctctctccatcgtggatagccaccatggtttctcaggagggaaaggacacaactgggtcagtatttcgtctaccatctttaacttggaagcttcttcttccaactaaagctagaatagcaaagcttgagaaagggttttgaaaatatttagtaactcaagtttttgggatgatttgaacatcttaaggcactaagttactgggttttctgaaaatggtgatggggaatcattaattaattaattaatctctgctttgttttaaatatattgcaccaggtttgtgtgttagaattcacactcaaaaagtacaggtttaattttgatatattttctttgaagaaatagcttaactgctcttcaatgctatacttaggatgtggccaaatctttatttgagacaaaatgtattatttctctctatgtaaattaagatgttgtactttgaaaaatcattcctttgggaatttttagatctttctcagttttcttgaaccttttgtgtaagagcaatgaccttatatttgtcacattgttcctattaaacacttagctgtgggcacgaaagaaacgggcagttctgttacaagaataaggtggagaaggtagtatcactcttactctttcatggatgggcaaacaggttcaggaatttcccagaaccaaggttttctatcttataattgggtgttctttgtctcacaacatgcgcttcgtccttccgtatgaatctctttgctcaggctgactctgaatgtcagctctcacatgctaagcacacattaatttctcttatcctttattcccacctagtgtgcgggtggttttgagaggatcctgtacggtatggtcctcaggtgcttggcaaaatgggtccaccccctcccgggtaaccctggctctaggccctcttccatgtcctggccttccccagcagtcccctggagccctctggcgaccaaaactccacagtgaagcgccgcctggagtggtggccggtgaagggttcccagttcgggacacgttattcctcttctgtaaaaactgcaccactttcagctagactctcaggcaaaggcacagaaaattacctgattagattcatgatcttttagaggtttcctatcgctgaggtcatctgagccagcagttttcaaaatgagttgacagcttcatatcctaaaatgttgcatttaaattccagttaaaaatagtttaactactgtatttttccattctaagacagatttttttcatgctttgctttttctggagttagcatgcatcttataattgatacacttcatttaatatgatgggatctcttctgttcttctaaaaaattatcaatacatttgtgatgaatattggtttaatagcatctcagaatgtaaaacatccaggttgcaatcattacctcttctacaatatttaggtgaagaaggtcatatttctttcttttttaagtcaaattatatctagcagaaactcccatatatcaagatgtggaagattccaattcacggaggttcctcgtcatattctgtgccagacactggaggccggtatggtgggacttcatgctccgcaccttcctgtctcactacttttcctgtgactgccaattgctggccctttactctgaagggggttagaggacgactgcctctggcattggggaggggatactcctcacagcacaagaagtggcaagaaagcagctgacaaatgctggaaccttggccacaccaaccacatctggggaattgcatgtgactagggccaagcccattaggaatgctccttttctgggaacatctctccagtatcttcgttttgatttcccattggctagtccagcttacccccttagattattctagatctccccagaaaatacctgggtaagagttatccaggcaaattctcttttcctccttttaaccctaaaggctatattgggtgtatgtgtgcacgtgtgtgtgcgtgtgcgtgtgtgtgcatgtgtgtgcctgcgcgtgcgtgtgctcgtgtgtgtgcgcgtgtgtgtgcgctcatgcgtgcatgggtgtgtgtgtgttacagagagatctaatctgcagaagcacagcttctgggaaaagggaaaagggctgctttatttcctgatgcctccaaagcacacacaaagaagatataagttagtacttgctctaatattccatctgtaacattgagcatttaaaagtcataataatacattaaaataccatgcccatacaagtgcatttaaaatgtagcattaatgaaacaattaaatgtcccaacttaacctgtcttcttgcaagccacgaaataaatttctcccactatctctatgtgtatgtttaccatttgtgcaaatttaccactgaaaagagattgtagacaatttttattttgatagcaatccactcatgtaaaattacacacagaaatactactataacccatgtgtattgcaagatccaattaaatgtaaaccaaggcccatttgttcatgcatgtgtttttatgattttgtctgttgtttctctgacttacatatttataatacagaatgtgagaagagtgagctctttgtagttatttagctttaaggcatagacaactgttttagaacctttaaaaagcaattgcagatttttttaaaagtctcttgaaattacaagtcctttttaaaaattattattctttgaaactacttttctgtatacatcaagatttatcaatagcatatgaacaaaataaaacgggacaggatggtaatggccacctcatattgcttatttcttttataataactaagtcatataaattgagctcacaaaaatatttatattaataaaattataatttatcattggtaatgtctgagtttttcttgtacatttttatgtagcaagaaaaaaatttttactgttaaaaatggtttttaaaaaatcgcagcaagcctaagccccttcattttacgaacacaataacctgaggctcatcagggctggtgactcacacaggcgcacactcagcattgctggatgtcggctcaggatccagaatgcatttgaacaactcacgctaagttaataaacgcactttaagataagcccatattaatcccaaagtaactaaacttgtggaatttgtaaaagaagatgtttatgaacgaggacatggcatttccacattacttctgattctcccctttctaaaagcagaatctacggtctctattttcccgttgcgagatttcagcggagagcctggtggcacttacagcagacatcacagatgcctcagcgtttcggatgaggacagtaaagaccttccttgcttcatgaaaccttcgttttccaggggagaaaacacaggttgagtctaaactcagtcctcctgttgaaatattttaatgacgctgaaagaggctgttgcgtttggcaggtgcgtgtggagctgtgtggccctgcactgaagccctgcagtcctgacttctgagtggagctacaggagaattatgttaatgtgtttgcactactcgctcagttgtaaaaagttacaaatatatttaatgaggataaaatagtttaacaatgtttacacacctattttagttattacattctctaagctatttttatcctcacaaccatggaagcactccgccatctccatttcagaaagtagacaataactgaaaaaaaactgtctacttttttaaaacgtgatttacttcattatgaaagttcatagtttatgtaattaatacctttttgtggtctgcgttcagtgggtgttggcatctgcacactgtcgtgggtccactgttgtggtgaaatcgcacacagtgatctcactgccctaaacatccggggctctctgcccatccatcctttcctctccccaacccctgtcgaccactgattattttactatctatgtaattttcccttttccaaaatgtcacgtaattacatagatattttactctctatgtagtttttccttttccaaaatgtcacataattggaatcatacagtatgtagcctttttggcttctttcacttagtaatgtgcattttgggtccctgtatgccttttcatgacttgatagctcatttcttttctcactgaatgatattccattgtctgtaggtaccagaatttatttctcaattcacctactgaaggacatgttggtcacctcgtttctggtaattctgaataaagcttctatgtaggtgccagccctacagggtttgtgggttttttctccccatgtgcagagatgagagattgtagaaaaagagacacaagacaaagagataaaagaaaagacagctgggaccgggggaccactaccaccaagacgcagagaccagtagtggccccgaatgccaggctgcgctgttatttattggatacaaagcaaaaggggcagggtaaagactgtgagtcatccaactgattgataaggtcacggagtcacgtgtccaccagacagggggcccttccctgtttggcagccgagtcagagagacagagaggacagcttatgccattattttttctatgctcttttcagaaagatcaaagactttaatactttcactaatttgctactgctatctagaaggcagagccaggtgtgcagagtggaacatgagagcggaccaggagcgtgaccactgaggcacagcatcacagggagacggttaggcctccggataactgcaggcgggcctgactcatgtcaggccctccacaaaaggtggaggagtagagtcttctctaaactcccccggggaaagggagactccctttcccggtctgctaggtagcgggtgtttttccttgacactgacgctaccactagaccacagtccgcttggcaacgggcgtcttcccaggcactggcgttaccgctagaccaaggagccctctggtggcccggtccggccataacagaaggctcgcacccttgtcttctggtcactcctcactatgtcccctcagctcctatctctgtatggcctggcttttcctgggttatgattatagagcgagggttattataatattggaataaagagtaattgctacaaactaatgatgaatgatattcgtagataatcatgtctatgatctagatctagtataactcttgttattttacatattttattacactggaacagctcgtgccctcggtctcttacatcggcacctgggtggcttgctgcccacatttctataaacatttgtgtgcaagtttgtgtgtggatataactcttcaactccattgggtaaataatgaggagcacaattgttaaatcttatgacaagactatgtgagctttgtaaaaactgccaaactgtcttccaaagtggctgtgccattttgcattcccacagcaatgaatgagagttctcattgctccacatcctcaccagcatttggtgctttcattcttgtggattgtggccattctaacaggtgtgtagtggtatcttattgcgtcttaattggcaattcctaataacatattatacacagcatcttttcatatacttagtttccatctgcagatttgttcagcttttgcccagttttgtttgttttctcattgttgagttttaagagttctttgtgtatttcagatatgaatccttagatatattttgcaaatattttctcgcagtctgtgatttatctttttattctcttaacagtatcttttgaaaacaaaagtttttcatgttaatgaaattaaacttcccaatttttttctttgtggatcatgcttttggtgttgtatctgaaaaaaaaaacaccaaatccaaagttatctagattttttttccttatgttatcttctagaagtttgaaaattttacatttcatatattggtctaatatctactttgcattaacttttgtaaaaagtataaggtctgttacatattctttttttttttgcatgtggatgcccacttgttccagaaccatttgttaaaaagactctcctttctccattgaattgcttttgctcctttgtcagaaatcagttggctgcatttcattctgtttctgggttctctgttctgtttcactgatgtatgtgtatgtgtcttctgttttgccttcaatttaaaaaatatctaaatatctacttgctacctcaatttgctgatgaattctcatttgtaaacagaaaagcataaattaaagcctgagtatcttttggggtagatgttgcattgaatacaatgagcagaatgagttataatcttaaagtgaatataaaaatttgaccatagtggtaacagatttgtgcactagtgacatcaatgacagagtccattgcaatattgcttcctcccataggctcagctctgcttcacaccaggtaactaccagtcccttttgtgcttcattcaaggatttctgtggggcggaaagcagaaatatcatgagctcagtggagagagagaaggcagttttccaggctgggagcagtcagatctccagtgggtcccaacactgctctgtagcaatgcctagaaggtgatggaaacagggtgaacatgaggtgggtgctggccccggggttcccagtgttaccaggttcccatggtctataagacgcctggaaatgagatcttctgggctttgggggcccctgtggaattggaaaataaggaagtgagcagtgacaatctagactggttattagaggtgcatctcccatttttcagaagccaaggagcccttgattagtgaaattgtggccccacaacaatggtggagtggagtgtcctgccattctggaggggagatggctcagggtcaagactgaactcattagaaaatacaagaagtttttttgttttttttttctatctgagtttgtgaatgaagagctacactgctgtgaaatgtgcaaatcattggctactgtttctcatgtgcattccaggagtatcaagtccaaaatgaagctcttcaaaccatctgggaagagaaaacagcatgacaaggaaaggtgtatttgtctgatcccagtaatcaatataaacatcaatgataaccccacctatttttttaaatgtatgatttggatgaaacaagagaaagagactgattgttgctgagtccctgctgcagtcctgacacagctctccttattttgttgatgctcatgaggaccctgatgtctgaggaagaaggttcccgtccagctctgcccctggtgtgtcacatgccggccttgtcaacgcacacgagaacctgacagggtgagtgttataacccagtcatagaaaaggaaactggctctaaagtgtatggcatcttgcccaagttctgacacttagcagaggcctgagtttaaatacagcctcgtcttgctcttcgacagcctcagcaccacatgccctgggtggcccacgcagtgagtcactgacagccctcgtggttggcccgtggcacagcatggagcgaaatggtccagtgaccttttcagacactcgggcaatgcgtggtatagtgtatgtggtcactcccagtgagtcctattgttcagtttaatagaatatctaattctatgtttattctgaataaagggagatttcttgtggtttttaagaatatgaagcatatctattttgcctacaagttggaagttccgatactgtaggaagcataagtgcaggttataatgatgggttttttataagactgaattcacatcaaactgaatcagtaactccagctgtatgaacagggtgaaacattaaacatttaatgaaaacaattcctttcttaggtcacagcaaggactaaatatgtccaattatcatgcccactaagaagatgtattgtaatatttgcagttaatcactcattcacttcaaagggtgtttattaattgtctgctctgggcataacattaattggaagcagtgtgttcacatggaaacaaaacttacctgagactctcagtcacaactttccatgaccagtacacgtttctaatttgaaatacatatctaaggcttcaaatgcataaataggtatcccaatgtagaactaagtcaatagttgctttgaattaattgtttaaattaacctgggaatcggaaagatatgtctccatgaaacaataaaggctgtgttagaattagtaaactttagaagagcattttaatcctaatatataaacatactacctaggcacactgtttaaatacatctgcaacctactatttttagatttaagaaaatcattaaaccttaaatttggaaaagattccagtgttagacctctagactatgaaacttgaatgtttttctaaactctttgagttttatccagaaatacagattttcctggcactgacaactgcaagaaatttcacttggagtctccacatagtcaaccatgtgatgttaacatcagtgtaatagatactatcacaaaca

SEQ ID NO: 34 - DNA, 73232 bp, Homo sapiens
cacctccgcctcctgagtcactgggattacaggcatgagccattgacctcagctctgtttaacctttaaaatggaggaaggaagaactctgggtctggctggcctgactccagattatttccaccgacagcagaggtgagtttactccagtgaggaggtctcattttatcaccagactttctgcaggagaccatctgtgctgcctccattttccaagctctccaaagtctactgcctccactcaactgggagtgttctgcaaaggtcaaggtcactgagggcctctggactgacattttcagtcattctcctacttcgcctttctgcagaatttgacctgtgactacactctgctttgtgaaatgtttctactcttaatttaagtgatgtaatcctgttttggtttctttccctcctccctgatgcacttattcacagcttctttctctggctgtatgcactctcaccaagtgtattagtttgctggggctgtggtaacaaagtaccacaaactggggtggcttaaacaaaaaaaatttattttttttctggaagccaggagtccaaacttagggtttccacagggttggttctttctgaaggttgtgaggaaagaatctgttgcgagcctttctctctggcttgtatgtggatggccgtcttcgccctgtgtcttcacaccgcttttccgctgtgtgtttcccttccttacaataagcacaacaattgtcttggattaggacccaccctaatgacctcatttaaattttattatctctgtaaagaccctatctccaaatatgatcaaatcctgaagccctgggagttaggatttcaacatatgaattttaagggagccacaattcaacgcttaacatgtagtcactacagttacctttcatgtcacatctcatgtgttcaacatggaaagcttggtaaatatgctctttccatgaatgcattctcctctttcttgcatccatctccccacttgatttctttcttttttttttttttttgagacggagtctcactctgtcacccaggctggagtgccgtggtgctatctcagctcactgcaacctctgcctcctgggttcaagctattctcgtgcctcagtctcccaagtagctgggactacaggcccacttgatttctatgacaccacttttctcctgggctgctccagtctctctagcccctccttagtatctattgtagattcttcttcctcatctccctccttagatgtcaaggttttccaggttctgtccttggcttcctctcaatcctccaacctctctgctactgaattgacccacaatgagaatttcaactgtcaaccatacttatgcagaagactcttcatgtgcattccaggccatccctcttttttgaacttgcacctaaatatctacttgtctgcttggacatctctatccagctgctccacaggcacctcaaactcaacatgttagagaaggaattcaccatctgtcttttctctctgcctggcgcaaacccactctgcttcctataccttccattttgtgaaggatgccactatgcacttagatctctcctcctctcccagtgtctacatctgtcaaaaaccaaattctgtcaattctggtgctaaaatatctcttaaatgcatcctctccagtctgatcccaccataactgccctggtttcatgccctcgccatttctccttggcttactccaatagtctcctaaatgatctccttgtcactccaaatcagttttcattcttctgccaagggattttttttaaagtaaattttatcatgtctctatttgtttatgattcttcaaacttaggctgttcctttaggatgatcatagctggatgcctggactgtgggctccttgttctggccccacccagcttctttctctattattactccccattaggcatcttctcaaagctatacttaaaattcccccatgcacctagaccccatttgtctatttaattacccaggtcttgagactttaaaccacattaacctcccgtgaagcccatagctggtggcctacaaaagccccagtagctctgagtcatctgctctctcttgcactagctctttgctccaggcttcattcctgctcctaagttgactctcagtttccttaacttcacctgcctttctaccatttggcttcccactgtcatcagtcactccctggaggctggccttgtcctgggtactgcttgttttagatcagctcctccatcccaaaagcacaacttggggttgtcctgccaggcacagaggatactgaacatttctgctggaaaaaaccttcctccattctgttcttagtaatgccattaagtggttgtataatcttggacaaatcacttttcctctgtttcttaatccaaacagtaatagtaataaaaactactaacaattcctgagtacttagcaggatatggattatctcattaaaatctcacaactactttacgacatattaccatactcccattttacagacaagaaactgggaattacaatggttaagcaacttgtccaaaatcacatagctaggaagttggggaactggtattcaaaccccagcagcctggcttcaatgtgcggccacttagccactgcactgtcctccctctcaatatgcaactcaccctagagagccatgcaatcacttctgtaaaataagggaagagtgctgcagcctgttctaaatataaaattctatcagaacatgcctttcaagatctaatgagttatgggtagagtgggtgtattttgaagaggattcaagagatgaagaaagataaatgcaaagggctaaagccctaactatggaatctcacaacttataaattatcacacatcactagatggttacttctctgaaaaaaaccagctattgttttttttaaatcttaaatatttaactttatttttctgcctacagatgggattcaaattgaaaagcacacagtagaaaatacaaactacctatatttctgattaatattgtttgtatacatgtatcatgtataaaagtgatagcactgttcgttctgcatttttcccctttaactaaacacattatgaattgttctacagtggaattttaaataattacatggtattccattatggatgttccataatcatccaatcacttgtttttaaacacgtaaattgtttctaagattttccttattagaaacaatagcaagaaaaatatccatcactaaaactttacaaacatgtattattatatcttagaataaattcctaaaaggtgaattgcttggttaaagggcatatacattttaaaggcttttgatatgtatcactagattattgtccagaaagatgatatcaccactagtgcgcaactagggtacaaataatcctcccttcttagcaagatagagggttcttgattgcttgctttttaaaacttaatatttatctctttgatagagaaaaaatgatacttcactgttgttttaatttgtatttatttcatctcttatgagaacagacattgtttaatggctattactggttcatgaccaatcttcaggcactgtgaaacaaaaggaatcttaacaagttcaatatagacagcagcctatggttttttagacctctgcagacagtgctagcataattaagtagtatcccctctatggtaccacaaaaattataaattttgaaattctttttttcttcatacaagtataacgcttcaaaattccactggagcaaaaggaatctttactggaaaattaaattttaatcttctgaaataaaagcaacaaagctttttctcaaaccagtaagcactgggtagatgaaagttacttcgattttcaaagaacagtaattataaatacatagtgacggccgggtgcgcggtggctcacgcctgtaatcccagcactttgggaggccgaggtggccagatcacaaggtcaagagatcgagaccatcctggccaacatggtggaccccgtctctaccaaaaatacaaaaattagccgggcgtggtggtgggcgcctgtagtcccagctactcaggagactgaggaaggagaatcgtttgaatccgagaggcggaggttgcagtgagctgagattgcgccactgcactccagcttggcgacagagcgagactctgtttcaaaaataaataattaaaaataaataaatacatagtgactggcgccagctgccaccacccaagagaagggcgggtgtgactccttccaggaagtctccacagcatggagaaaccttctggcgcaccacgaagcgggcaggaaagattttagctctaccccttatgaatagtgtgaacttgggcaagttttttaagccacagttaccccatctgtcaaaaagaatgatgatgtctttccaaaagtcattgtgaagaataaaattcaatgaaatagcactagtaaagtacccagcacatcatgcatgttcaatacatggtaactaatttaatcactctacctccttccactacccaaccctgcccagaatctcccatggcctgattatgacatattaactgagttttgcattttctccttatacctcttttttctctttctttttcttgatctctctccctctaccttctctatctcattcctccaccctcagaccaaactgaccctggtagacaaaaaacatattccctgttatttgtcattcttatgcagatattttaaaaattcctgattcttcactaaaatcaatgactgtaacattcagtatttgaataacagatttacaaaaccaaaattaggcacctaaaaatatatataactaccaccaatgaactgctttgggcattgcaaataattcttgcctttatgtgccaaagatcttttgtagaaaaagaaagcttctccacttaggaactaagtgaaggacacacatcaaagcaccatcttcaacctcagcctttcactgcagtcacaactcataacttctctgcaaagaataagaattattactcaccactggggatccattttggctgcttctgctgtgacctaatatctggaaatgaccccactcatccgtgtgtctgtgctagtccctgttacagcagcagagaagcaaagctttcaccctgtgcaagccttcctcggcaatgactgtatacctacccagctaactttctttaagagaagctgttcctcttttctctacagattttgaccacacttgaggaagaaatttaaccctttccttgcagtttaaactcattgacgtaggtctatatgtattaaagaatatataattcagtagcttgagttccagacatgacgttaagatgagcctgaataaaaaatctcccctcttgaaattccctcaaaaaacctagaaaataaaataattagaaagagaaaacaaacctccgcagcaacaaaatagaataaagaggcattctacagattttgataagataataaaaagtgatttattgtggatgtggattgggagtgagtagccacctaaccctgccaatttccacaaccaaagtgtggagagtttcactgagctggggtggggggatgggagatggggagatgttctgtaaggactgcataaccaaggagggcagacagaagctactgcttttattatttcattcctactatagccaaggattacattgatgaaagcgaatattctgaaacagaagtctgaaaaaaaggcagcattataaaattaatagatgtccctaagagacaaacatagaattaatcaagcagaaactatactagaagatatttcctcgtatgaattaaaatgggcatcatctagaaactcaaactgtttagtgtatcaaagcaaaagttatgaaaatcgattctcatccagacaaatcattttgaacattttaaattccaaaggcaaagctaaaaacaaaatgaaaacagaatgactacagagaaacaaaaaacaacttggcatcttactcaaccctaaatggcaaaaaacaacagaacaatatctgcagaattttgaattagcattatctacctagataagatgccagttaagtgtcaagtcaatagaaatatgtcaccaagcaggcaagaaaacaacaactgcaacagaaataccaccaccaagacagccttcctaaataaattatttaaggatatattccagaataataaatgaattaaaatagccttaaaatggagaagccatggctgaaaacaccagtgctgagctttaaagcaagttaaacatggagaaataaggctaaataattataaattagtttagaccaaaatgctaaataagaaaaacttattagaagtagattacatatattatttcaaggaagtttaaaaatagcagatgacatcactgctaactagagcaaggaagcaaaatcaacacaattattaatcttcaaataagaagatagaacaatgattattttatcaactttgataatttcatctggatttgagaattttaaaaaatgaagacagcaataatataagttatctatcttcaaaattattgcagagcaggagtgcaaataaaatagtatttataactacataacacatcagaaataagatgagataaaaaaatccatgtaaacctcatttgttataaatattaaatattaaaggtatgggatgtcatttttcagtttcttggtagcagtgtacacactcaaatttccatttcttggtatcaatgcatacactcaaatttttatttaagatagcataagcattttctcctgttatcataaactttttagtagtcattaaatagtacattaatagtacatcaagtatacactgtgaaagctggctgtaatggcacatacctgtaatcctggctactcaggaggctgaggtgggaagattgcttgaacccaggagtttgagaacatcttgggcaacataatgagaccttgtctcatacacacaaaaaaggtatatattgtagtaaaattatcttcctaatatcagacagttttagcttttagtatttttatattacaattttctaattaatatatttagtatatacatttaggagtttttagtatttattagttatccattgctgtataacaaattatctcaaaatttatttccttaaaacaataaatgtttagggattgatatccagaatatatgattaaaaaaactcctacaactttgcagaagaaacaacaaacaattaaaaagtaggcaaaagagttgaacagacatttcttcaaggaagatatagaaatggccaatatcacatgaaaatgtgctcaaaaccactagtcattagggaaatgcaaatcaaaaccacagtgaacgtcagcaagatggcagaatgagaaaccccagcctgtgctccctcccagagagacactaacttaactatacacagaccaattccttttgtgagaaatccagaagctggctaagaggctacatcacactaggtgagcaaaaaaaacaactgcactgaagccagtaggaaaattcacggtataccctcaccatagtctgtcctctcggcacagggccacatggttaggaggaaattcccagtttttggcttctccctgaagaagaaatgagaagactagaccatatatccaaagttctgactttttggccgggcgcggtggctcatgcctgtaatcccagcactttgggaggccaaggcaggcggatcacttgaggtcaggagtttgagatcagcccggtcaacatggtgaaaccccatctctactaaaaatacaaaaattagccaggcatgctggcacattcctcccagctacttggaaggccgaggcaggagaattgcttgaacccgggaggcggaggttgcagtgagccgagattgcgccattgcactccagcctgggcgaagaagcgacgctccgtctcaaaacaacaacaacaacaaaaaaccaaagttctgactttcctgggggctgcctgagggactagcctctgtcttacctgtcttagagagtttataggacccaccatactctagatgcctgggggacactgagaacaaaaaaatactgggtgatatattgctgtcctagagggttcttgctacagcagatacagactgatacagttcagtggcctatccctaggggacatggaaaagagtgaagcatgcaaccaatattcctgctttttggggaaatggggagatgcccataggattggtttctttcttgtctgtcttgaatcactggcatactctagatgcctggggccccatgaaaagaaaccaaagagctaaatagcatgatgctatttcagaggacctgtggcacagcagaggccaatacagctcagtgccctcttcttcaggagggcaagagaaaaatagaacatgtgtccagaattctggcttttcaaagggctgccaaagggactggtttccatgtagccccacttaaggcagagaaggtctaacatactctagaagactaggggctgccaagatcaaaaaaaaagagctggacagtgtgctgctactttggaggacacacactatagaagatagacaacagatggagcaagagataatgaactcttaaaaaagagaagccagaaaatctctctacttaggaatctacgtgcataagcccagagaaaacgtatccacagaaaatgtttgagaggtccccagaatctttagccaggctaaagattatgaaggtctttcccagtacaaagccggctggtaaagactggaagaagtggctggtttgttgttgttgttgttgtttgtttgtgtgttttgttttttaatatgcagataccaacacaaagttctaagaaatatgaagaaacgggaaatggtcaagtcaaagaaacaaaataagtctccagaaacagatcctaaagaaacagaggtatatgaattatctgacaaaaaattctaaataaccatcatattgatgctcaatgagttcaggaaagtgatgcatgaaccaatgagaaattcaataaggatagaaaatattaaaaggaaccaaatagaaattttggagccaaagaatgcaattttaactgaactaaaacattcactagaggggttcaactacagacttgatcaagcagaagaaataatcagcaattcaattacaagtcatttgaaattatccagaggagcaaaaaggaacaataaaaatagcaacaaagaaaataagtaaagaaagcctgagagacttattggacaccatcaaatgtaccaatatatctattagagcagtccaagaaagagaagggttggagagctcatttaaagaaataatggctgaaaacttctcaaatctgagggagaaaatggactacagatccaagaagcccaataggcctaaataagatgaacccaaacaaatagacactgaagcacattataatcaaattgtcgaaagccaaaaagagaattttgaaagcaacaagagaaaagcagttcattacatacaaggacactcctataagattagcaatggatttcttagcagaaactttgaaggacaaaagggaatgggatgaggtattaaaagtgctgaaagaaaagaaccagccaaccaagaatactctctctggcaaaactagccttcaaaaatgagaaataaagactttcctaaacaaacaaaagcagaataagatcatcactagagttgcctttcaagaaatgctaaagagagtccttgaagttgaaatggaaagatactaaacagcaatacaaaaacatgaaagtataaagctaactggtaaagatagatatatagacaggtacagaatactgtaatagtgtaacagtattgtgtaaatcacttaattctggtataaaagttaaaaaaaacaaaagcatagaagtaattataattataaaaatatattaatggctgtacattattaaaaatataatttgtgacatccataactgtggggggggggaagtaaaagcaaagtttttatatgaagctgaatttaagttttatcggctttaaaaagatagttatatctataagctgttttatgtaagtcccacagtgagcacaaagaaaatacctatggaatttccacaaaagaaagtaagaaaggtataaaatcatgtcaccataaaaaatccatgaaacacaaaggaagatagcaagagataaaaagagcaacagaatagctacaacacaaaaaacaaatttcaaaatgttgatagtaaccccttttctatcaataattactttaaatataaatggactaagctgcccaaatgacatagcacagttgaatgagttttaaaaaaataagatccaactatgcactgtctacaagattcactttagatttaagaacacacataggctgaaagtataaggatggaaaaatattccatgcgaatgataaccaaaagagggcaggagtagccatacctacaaaagataaaatagactttatcttcgtctgtttgtgcaactgtagtaaaatatctgaaactgggtaatttataaataacagaaattgatttcttacagctatggagattgggaagtcaaaggttctggcattcaagtcttgtgaaggctttcttgctgtaacctcacatggtggaagaaggacaaaaagagatgaattgctgtgtcctcacatggtggaagagtagaagagaaaaaagggcctaagctagttctgtctaggcatttgatgaggctataatccatccatgaaggcagatatttcattatttaatcacgtcccaagaggctccacctcttaaaaccaccacaatggggattaagtttcaacccatgaatttttggggacattcagaccataacagactttaaatcaaaaattgtcaaaagaaacaaagaaagacatcatataatgataaaaggttcaattcaccagaaagatataacaatgataaatttatatgcaccaacatcagaacacctaagtatatgaagcaaacattggcagaactgaagggagaaatagacagcaacatgataataatagaggattttaataccctagttccaataaaggttagaacatctagacaaaagatcaattagttaacaaggggcttgatcgacactatagaccaaatggacctgataaacatacacagaacattctacctaatagcagaagaattcacatttttcccaagaacacacagaacatttttttttaatagatcacatgctggatcacaaaacaagtcctatcacatttaagattgaaataataccaagtaccttttccaatcacaatggaatgaaaccagaaatcaatattagaaggaaaattggaaaattcacaaatatgtggaaatgcaacaacatactcttgaacaaatgggaaattagaaaatatctagaaacaaagaaaataacataccaaactttatggaatgcagcaaatgcaatactaagagggaagttgataacaataaacatattaaaaatatctcaaataaaaaatctaaccctacatgttaaataactaaaaaaagaagaacaagctaagcccaaagttagcagagaaaggaaataatgattaaagcgtaatggtggcttatgcctgtaatcccagcactttgggagcccaaggtaggaggatcacttgaggccaggtgtccaagaccagcctgggcaacgtagcaagaccctgtctctataaaaaaaaagagaagactcagataagatgaaaaatgaaacaggagacattgcaattgatgccacagaaattaaaaaaatattgtaagagactgctgtgaacacttacgttccaacaaattggataacctaaaagaaatggacacattcctagaaacagaacctaccaaagctgaatcataaagaaatagataatctgaacagacctgtaactagtaatcagattgaatcatcaatcaaaagcttcccattaaagaaaagctcaagaccagatgacttcactggtgaattctatcaaacatttaaagaagaattaacactaatccttctcaaactcttccaaaaatttgaagaggatagaacacttccaaactcattttacaaggccagtgttaacctgacagcaaagccagaaaaagacactacaagaaaagaaaactacaggccaatatccctgatgcaaaaatctgcaataaaatactagcaaaccaaattctatagtacattaaaaggattatactctatgaccaagtgggatttatccctggaatgcaaagatgattcaacatatgaaaattagtatggtacatcattaaaatcatatggtcatctcaatagacacagaaaaaatacttggtaaaatttaacactctttcatcataaaaccctcaacaaactaggaatagaaggaaagaaggaatttacctcaacataataaaggggatatgtgaaaatcccactgctagcatcacacttaatggtgaaaaacagaaagcttttccttgatgaggaacaaggtaagtctgcctacttcatcacttctattcaacacagtgctggatgccctagccaaacaattgggtaagaaaaagaaataggtgggaggagccaagatggccgaataggaacagctccggtctacagctcccagcgtgagcgacgcagaagacgggtgatttctgcatttccatccgaggtaccgggtttatctcactagggagtgccagacagtgggcgcaggccagtgggtgcgtgcactgtgcgcaagccgaagcagggcgaggcattgcctcacttgggaagtgcaaggggtcagggagttccctttctgagtcaaagaaaggggtgacagacgcacctggaaaatcgggtcactcccacccgaatattgcgcttttcagaccggcttaaaaaacggcgaaccacgagattatatcccacacctggctcggagggtcctacgcccacggaatctcgctgactgctagcacagcagtctgagatcaaatgcaaggcggcagcgaggctgggggaggggcgcccgccattgcccaggcttgcttaggtaaacaaagcagccaggaagctccaactgggtggagcccaccatagctcaaggaggcctgcctgtctctgtaggctccacctctgggggcagggcacagacaaaaagacagcagtaacctctgcagacttaagtgtccctctctgacagctttgaagagagcagtggttctcccagcacgcagctggagatctgagaaccggcagactgccttctcaagtgggtccctgacccctgacccccgagcagcctaactgggaggcaccccccagcaggggcacactgacacctcacacggcagggtattccaacagacctgcagctgagggtcctgtctgttagaaggaaaactaacaaacagaaaggacatccacaccgaaaacccatctgtacatcaccatcatcaaagaccaaaagtagataaaaccacaaagatggggaaaaaacagaacagaaaaactggaaactctaaaatgcagagcgcctctcctcctccaaaggaacgcagttcctcaccagcaacggaacaaagctggatggagaatgactttgacgagctgagagaaaaaggcttcagacggtcaaattactctgagctatgggaggacattcaaaccaaaggcaaagaagttgaaaactttgaaaaaaatttagaagaatgtataactagaataaccaatacagggaagtgcttaaaggagctgatggagctgaaaaccaaggctcgagaactaagtgaagaatgcagaagcctcaggagccaatgcgatcaactggaagaaagggtatcagcaatggaagatgaaatgaacgaaatgaagcgagaaggaaagtttagagaaaaaagaataaaaagaaacgagcaaagcctccaagaaatatgggactatgtgaaaagaccaaatctacgtctgattggtgtacctgaaagtgatggggagaatggaaccaagttggaaaacactctgcaggatattatccaggagaacttccccaatctagcaaggcaggccaacgttcagattcaggaaatacagagaacgccacaaagatactcctcgagaagaacaactccaagacacataattgtcagattcaccaaagttgaaatgaaggaaaaaatgttaagggcaaccagagagaaaggtcgggttaccctcaaagggaagcccatcagactaacagcggatctctcggcagaaaccctacaagccagaagagagtgggggccgatattcaacattcttaaagaaaagaattttcaacccagaatttcatatccagccaaactaagcttcataagtgaaggagaaataaaatacttcacagacaagcaaacgctgagagattttgtcaccactaggcctgccctaaaagagctcctgaaggaagtgctaaacatggaaaggaacaaccggtaccagccgctgcaaaatcatgccaaaatgtaaagaccatcgagactaggaagaaactgcatcaactaacgagcaaaataaccagctaacatcataatgacaggatcaaattcacacataacaatattaactttaaatgtaaatggactaaattctccaattaaaagacacagactggcaaactggataaagagtcaagacccatcagtgtgctgtattcaggaaacccatctcacgtgcagagacacacataggctcaaaataaaaggatggaggaagatctaccaagcaaatggaaaacaaaaaaatgcaggggttgcaatcctagtctctgataaaacagacgttaaaccaacaaagatcaaaagagactaagaaggccattacataatggtaaagggatcaattcaacaagaggagctaactatcctaaatatatatgcacccaatacaggagcacccagattcataaagcaagtcctgagtgacctacaaagagacttagactcccacacattaataatgggagactttaacaccccactgtcaacattagacagatcaaccagacagaaagtcaacagggatacccaggaattgaactcagctctgcaccaagtggacctaatagacatctacagaactctccaccccaaatcaacacaatatacatttttttcagcaccacaccacacctattccaaaattgaccacatagttggaagtaaagctctcctcagcaaatgtaaaagaacagaaattataacaaactatctctcagaccacagtgcaatcaaactagaactcaggattaagaatctcactcaaagctgctcaactacatggaaactgaacaacctgctcctgaatgactactgggtacataacgaaatgaaggcagaaataaagatgttctttgaaaccaacgagaacaaagacacaacataccagaatctctgggatgcatttaaagcagtgtgtagagggaaatttatagcactaaatgcccacaagagaaagcaggaaacatccaaaattgacaccctaacatcacaattaaaagaactagaaaagcaagagcaaacacattcaaaagctagcagaaggcaagaaataactaaaatcagagcagaactgaaggaaatagagacacaaaaaacccttcaaaaaatcaatgaatccaggagctggttttttgaaaggatcaacaaaattgatagaccactagcaagactgataaagaagaaaagagagaagaatcaaatagacacaataaaaaatgataaaggggatatcaccaccaatcccacagaaatacaaactaccatcagagaatactacaaacacctctacgcaaataaactagaaaatctagaagaaatggataaattcctcaacacatacactctcccaagactaaaccaggaagaagttgaatctctgaataaaccaataacaggagctgaaattgtggcaataatcaatagtttaccaaccaaaaagagtccaggaccagatggattcacagccgaattctaccagaggtacaaggaggagctggtaccattccttctgaaactattccaatcaatagaaaaagagggaattctccctaactcattttatgaggccagcatcattctgataccaaagccgggcagagacacaaccaaaaaagagaattttagaccaatatccttgatgaacattgatgcaaaaatcctcaataaaatactggcaaaacgaatccagcagcacatcaaaaagcttatccaccatgatcaagtgggcttcatccctgggatgcaaggctggttcaatatacgcaaatcaataaatgtaatccagcatataaacagagccaaagacaaaaaccacatgattatctcaatagatgcagaaaaagcctttgacaaaattcaacaacgcttcatgctaaaaactctcaataaattaggtattgatgggacgtatttcaaaataataagagctatctatgacaaacccacagccaatatcatattgaatgggcaaaaactggaagcattccctttgaaaactggcacaagacagggatgccctctctcaccactcctattcaacatagtgttggaagttctggccagggcaatcaggcaggagaaggaaataaagggtattcaattaggaaaagaggaagtcaaattgtccctgtttgcagatgacatgattgtatatctagaaaaccccactgtctcagcccaaaatctccttaagctgataagcaacttcagcaaagtctcaggatacaaaatcaatgtacaaaaatcacaagcattcttatacaccaacaacagacaaacagagagccaaatcatgagtgaactcccattcacaattgcttcaaagagaataaaatacctaggaatccaacttacaagggatgtgaaggacctcttcaaggagaactacaaaccactgctcaaggaaataaaagaggatacaaacaaatggaagaacattccatgctcatgggtaggaagaatcaatatcgtgaaaatggctatactgcccaaggtaatttacagattcaatgccatccccatcaagctaccaatgactttcttcacagaattggaaaaaactactttaaagttcatatggaaccaaaaaagagcccacatcgccaagtcaatcctaagccaaaagaacaaagctggaggcatcacactacctgacttcaaactatactacaaggctacagtaaccaaaacagcatgttactggtaccaaagcagagatatagatcaatggaacagaacagagccctcagaaataacgccgcatatctacaactatctgatctttgacaaacctgagaaaaacaagcaatggggaaaggattccctatttaataaatggtgctgggaaaactggctagccatatgtagaaagctgaaactggatcccttccttacaccttatacaaaaatcaattcaagatggattaaagatttaaacgttagacctaaaaccataaaaaccctagaagaaaacctaggcattaccattcaggacataggcatgggcaaggacttcatgtccaaaacaccaaaagcaatggcaacaaaagccaaaattgacaaatgggatctaattaaactaaagagcttctgcacagcaaaagaaaataccatcagagtgaacaggcaacctacaaaatgggaaaaaattttcacaacctactcatctgacaaagggctaatatccagaatctacaatgaactcagacaaatttacaagaaaaaaacaaacaaccccatcaaaaagtgggcgaaggacatgaacagacacttctcaaaagaagacatttatgcagccaagaaacatgaaaaaatgctcatcatcactggccatcagagaaatgcaaatcaaaaccacaatgagataccatctcacaccagttagaatggcaatcatttaaaagtcaggaaacaacaggtgctggagaggatgtggagaaataggaacacttttacactgttggtgggactgtaaactagttcaaccattgtggaagtcagtgtggcgattcctcagggatctagaactagaaataccatttgacccagccatcccattactgggtatatacccaaaggactataaatcatgctgctataaagacacatgcacacgtatgtttattgcggcattattcacaatagcaaagacttggaaccaacccaaatgtccaacaatgatagactggattaagaaaatgtggcacatatacaccatggaatactatgcagccataaaaaatgatgagttcgtgtcctttgtagggacatggatgaaattggaaatcatcattctcagtaaactatcgcaagaacaaaaaaccaaacaccgcatattctcactcataggtgggaattgaacaatgagatcacatggacacaggaaggggaatatcacactctggggactgtggtggggtggggggaggggggagggatagcattgggagatatacctaatgctagatgacgagttagtgggtgcagcgcaccagcatggcacatgtatacatatgtaactaacctgcacaatgtgcacatgtaccctaaaacttaaagtataataataataaaaaaaaaaaagaaaaagaaataaagggcattcaaattggaaaggaagaagtaacattatctgtgttcacagatgatgtgatcttatatatagaaagctctaaagattccaccagaaaaaaaaaagttaaatctaataaatgaattcagtaaagttgcaagatacgaaatcaacacacaaaaatcagttgcttttctatacactaacaatgaacaacctgcaaaggaaattaagaaaacaattcaatttataatagcaccaaaatttcttaaaaacttaggaataaacttaaacaaaaaggtaaaagacctatatgctgaaaactgcaaagcatcaatgaaagaaattaagaagacaaagataaatggaaagatagccatcttagtctgttttgtgctgctataacagactacctgaaactgtgtaatttataaacaatagaaatttatttctcatggcttcacatgctgggaagtccaataacaagttgtcagcatctttcaaggggcttcttgctgcatcatcccatggcagaaggcagaagggcaagacagggagacagtgagagagaacaaaaagggacctaattcacttttataacaaacttatggcagtgataacaaacccactcctgtgataatgacattcatccattcataagggagggagtcctcatgacctaaaattatcccattaggccccatctcccaacactgttacattggtaattaagtttccaaccctggcttttggggggatacattcaaagcacagcatttgccatctgcatatcttctttggtaaggtgtctgttaaggtttttgacccattttaaatcagtggttcattttcctattgctgagttttaggagttctttatatatttcggataacagttttttaaaaattaaatatgtcttttgcaaatattttctcccagtctgtgtcttgtcttttcacactcttgatggtgtctttcacaaagcagagatttttaattttaataaagtgtaactcatcaattctttctttcatgcattgtgactttggtgttgtacccacacagtcatgaatggacccaaggtcatctatattttcttttatgtcatcttctagtattgcagtttttcattttaaatttaggcctatgacccattttgagctaattcttgttttttttttttctttttttttttttgcatctggatttccagttgttctagcattatttgttgaaaatgatatcttcttcattgtataccatttgctcctttgtcaaatatcacttgactgtatttttgtaggtctatttctgggctctctattgatctataatctattcttttgctaataccacactgtcttgactactgtagctttataataagtcttgaagttaggtgtatcagtcctccaagtttactgtttttcttcagttttctaagatattattttttatattttcctttccaaacatgtttgcattaagacattttttaaattcagatattttatatatttttagtaaaactatggatattttttatgcaacttcttccaacccctttgaatctgacaaaacccatttcccaacttgaaataaaatttttcaattttatctttttttggtttccaagattgcagttttacatgtaactttatgtaaaattgactttactaagttggtgaggtgagaatgtaaataaatcctttccctcattttaaaccagttgttcccttgttatttgtttaattctggtttactcctccactgatttgtgatgttttcttagtaatattataaaatctttcatgtatgtgaaataatatacagcttgggggcaattatgtatcatactcttaattaacatagatttaaaatatcttataataattttagtatccattaaggctatctcttattaatttattttcaaaatcttcaaaagtcatagtaattattctttctatttacattctgaagtaattttatggtattttaaaaagtagtctctctttaactgagtcttttaagaacttgtcagtaaattttacaattgtgctattatcatttattttatttttacccatgttataaacacataatacattgttataattttgctttaaacaatcaattcttttagcacattgaaatataagtaacaataaattttatcttaccctcatttattctgttttcaaatctcttcatttcttcgtgtatattctagtttctaacccatattatacatcatatttcttctgcctgaaaaactttttttcttttaaaatttcttgcagtgtatgtctgctggcaatgaattttaccagtatttgtctgaaaaagtctttatttctccattgcttctgaaaaatatttttgctgcataaagaacatggggtcaacagttttctttcttacagcactttaaatatatccctttactgtcttcttacttacatggtttctggaagaaaatgtctgctgtaattcttatcttgtttttctacgtgtaatatcttttttcctctacgtgtaatatctttttctctctggctacttttaaaattttctgtctttggtttttagtggtttgaatctaacgtacctagaagtgagttttttgcttttggtttttggtatttatacttcctggtgttctctgggcttcttagacctgtggttggaggcatgctattaattttagcaaattcttggttattatttcttcagatatttcttatgtcttatattctgtctctctgatcctcttaaatttcagtacgtgtatgttatatcacttgatgttttcctccagctcttggtggttctgtgttttattttcactctctttttcctctctgcatatctgtttgtgtaatttctgttgacctattttcaagttctctttctttttaaaattttttcaaaattttattttttaattggcaattaataattttacacacagggtagataacaatattttgctacacataatgtatggtgatcagatcagaagttccctttcttttgctctggtctgacaggctggtttaaggcattatttatttctgtccatgcaattttttatatctagcatttctattgattctctcttatagtttttgtctttctgctgaaaatatctgtctgagcttacatgctatttaccctttccaataagtcatttgatatattaattatagctattttaaattccatgtcagttaattccaacatctttgttatatctgtatctgattctgatgattcctttgtctcttcaaattttgttatttcttgccattttgtgtgccttatagttttttgttgcaagttagacgtgttgtataagatagtaaatactgaggtaaatatattctatgctgcagataaacatgccttttcttctgcaaggcctttagtagtatggggatttacattaatttagcgtggagttcagttggatttgaagtttgttgttagtatcattgacctcagtgcactataggcttcaaatttctttagtaatacctgtgctagggtatgggctatttgccagagtgtttctctaaatgtctgctccccacttggttttgtgtttccctgctttgttttggatcttcccttcacactgctccacagaatgaatttgtctcttgcaactctctgagctatattctgttcttattttacttggtttattagagtggttatgatggtgggggaaagttctctgatgttctgatcaggttttgtagtagtccattttcacatttctataaagaactacctgagactgggtaatttttgaagaaaagaggtttaattgattcacagttccacaggtgtataaaagcatggctggcaggcctcaggaaacttacaatcatggtagaaggtgaaggaggagcaagcacatcctaccatggtggaagaggaaagagagagagagagagagacagagacagagagacagagagagagagagaggaagtaccacacacttttaagccatcatacatcatgagaactcattcaatatcatgagaacaacaaggaggaaatctgccccatgatctagtcacctcccatcaggcctctcctccaattcaacatgagatttgggtggggacacaaaaccaaaccatatcattctgcccctggcccctccaaaatctcatgttcttctcacattgcaaaatacaattatcccttctcagcagccccctagtcttaactcatttcagcattaactcaaaagtccacagtccaatgtttcatctgagacaaggcaagtcctttctgtctacgagcctgtaaaatcaaaagtaagttagtgacttccaagatacaataggggtacaggccttgggtaaatgctcccattccaaatgggagaaattggccgaaacaaagaggctacaggccccatgaaagtctgaaacccagcagggcagtcattaaatcttaaagctccaaaataatctcctttgattcaatgtctcacactcatggcacactgatgcaaggggtgggctcccacagccttgggtggctccaccccagtggctctgcagggtacagcccctttggctgctttcatgggctggtgttgagtgcctgaggctttttcaggtacacggtgtgagctgttggtgggcctaccattctggggtctgggaatgatggtcctcttttcacagttccatgaggcagtgccctagtggggactctgtgtgggggctccaaccccacaattcccctctgcactgccctaataaagattctccatgagggctccaccctttcaccagacttctgcctgaacatccaggcatttccatacatcctctgaaatctaggcagaagttttaaaacctcagctcttgccttctgcacacctgctggcctaacaccatgtggaagccaccaaggcttggggcttgcaccctctgaagccatggcctgagctgtaccttggccccttttagccatggctggagctggagcagctgggatgcagggtgccatatcctgaggctgcacagaggagttgggccctgggcctggtccatgaaaccatttttccctcctaggcctctgagcctgtgatgggagtggctgctatgaaagtctctgaaatgccctagagacattttccccattgttttggttattaacattcggctcctctttacttatgcaaattcctgcagcaggcttgaatttctccccagaaaatgggtttttcttttctaccacatggcaaggctacaaattttccaaatatttatgctctgtttcctcccttttttttttttttgaaatggagtcttgctctgtcacccagactggagtgcagtggcatgatctcggctcactgcaagctccacctcccgcgttgacaccattctcctgcctcagcctcctgagtagctgggactacaggtgcccaccaccatgcctggctaattttttgtatttttagtagagatggggtttctctgtgttagccaggattgtcttgatctcctgaccttgtgatctgcccacctcagcctcccaaagtgctgggattacaggcatgagccaccacacctagcatctgcttcccttttaaatatgagtttcagtttcagataatctctttattcatgcatatgaatgtacgtttttagaaacagcaaggtcacctcttgaatactttgctactaagaagtttcttccaccagatgccctaaatcatctctttcgagttcaaaatttcacagatctttagggcagaagcaaaatgccaccagtttctttgctaaagcatagtaagggtgacctttactccagttcccaataagttcctcatctccatctgagaccacctcagcctagacttcattgttcatgtcactatcagcattttggtcaaaaccattcaacaagtctctaggaagttccaaactttcccacatcttcctatcttcttctgagccctccaaactgttccaacctctgcctattacccagttccaaagtcacttacacattttcagttatctttgtagcaatcccccactttcctggtaccaatattctgtattagttcattttcacactgatctaaagaactacatgagactgggtaatttttgaagaaaagagatttaattgactcactgttccacaggctgaacagaagcatgggtgggaagcctcagaaacttacaatcatggtggaaggcaaaggggaagcaagcacatcttaccatagtggagcaggaaagagagggaagagggaagtgccacacactttcaaaccatcaaatcttgtgagaatttactcactatcatgagaatagcaaggaggaaatctgcccccacgatccaatcacctctcaccaggcttctcctccaatttgacataagatttgagcagggacacaaatccaaaacatataaggtgtcttttttttggggaaaaggcatacagatttattaatgtatacatagggagaaccatagagtgattatcctaggtttccattctaatcaggcattgtgaacctgcttcatggggggccttcactggtgttacaagccctcctctagctctagtactaagcctagaacttatacttgcccttctcccagggataaacttttttttcttgttttcctcccccagtggcaatgggttgccacaagcaccctaagaacgaaatttttgtttcctttatgcctacagagtaagcgttctgttccatagggaagatagagtagatgagtctgggcagagttttggcagtagttgctgtcccctcaccaagccagcctggtgatgaaaactttctaagaattttttccaatttttctcttgagctcctagtgggatttgatatggtttggctgtgtccctaccaaaatctcatcttgaattcccacacgttgtgggagggacccagtgggaggtgactgaatcatgggggcaggtctttcccatcctgttctcatgacagtgaatgagtctcacaacatctgatggtttcaaaaaggggtgttcccctgcacagctctctctttgcctgctgccatccacataagatgtgacctgctcctccttgctttctgccatgattgtgaggcttccctagccatgtggaactgtaagtccaattaagcctctttcttttgtaaattccccagtctcgggtatgtctttatcagcagcatgaaaacagactaatacaggattcttatagaaaaaacaacaacaacaacaaaaaacctgcgagaaagtgtgaacactaaggggtttactgtattacactagcccatacttagcatttaaaaatttattaaagttttctagcttgattcttgttactggcttacatggcatctggaagcatcagctaaggtaataaaatgctctggtcttgtttttctgtatatgagcttgctttttccagattttgttgaatttttgccctgtgacctcagttctcttagggattcaagaaatttcatttgtttgcagtttgtccaggattttcttgtcatatggatgaaaataactctctttctagctctctacatctctgaagtgaaatcagaactaatatctataacttttaatatataatttctagaactcaatgaaaattaaccagacacaagaagttactggatttaaccttgtggtcaatatatttaaaaatcaactgtacctctatataccaacaacaaataaaatgttaaaaattaaacaatactatttaacataaagggtatgtgaaatttcttttaagttcttacattggaaggcttaataacataaaaattccaattcttcccaaattgatctattgatttaatgcaatcccagtgaaaaccctagcgatttttatggaaattgacaagccaattctaaaatctatgtagaaatgcaaagaaccaagaatagttaaatcattcttaaagaagaaaaatgaggtggaaggacttgttctggtagatatcaagacttttgtagagtcataatagttaaaagagtgtgatactggcacaaggacaggcaaatagaccaatggaagagaatccagaatcagatttacacatgtatggtcacttgatttggggtaaaggtgacactgctgggcagcagggaataaatttcattttcaatgaaaatgtgctcagaaaattgtttatccataagagaaacaataattaaacttaacccctatctcacagctcagttccacgtggattgtagatctaaacgtaagaggcaaaatataatagtattaggagatactaaagaaaaaaatcttcatgacctggggaatacagcattccttatataaaacacaaaaatcttgaggactttaaaggaaaagattgataaattaaactttattaaaataaataataaaaatatctgtttatcaaacaatagcattaagagagcaaaatggcaagtcactaattgagagaaggtactttgaacttgtaaaatcacaaaggcactatatccaggacacataagaaacttctacaaactccagtaagaaaaaggaaagtgaataaataaaaaaacaaaagattccaccgagactcaagaaaggatatccaaaagttcaagagtccaataaacatgaagtgttcaatgctattagtcattagggaaatgcaaattaaaccacagcaaaataccatctcacacccaccagcagagctataattgaaaagactgttagctccaaatgttgccaaggatgtggaacaactaaaaatctcaaacactgaaaatgtgtaggtaaatttggaaaaatctttggcatatcctactaagtttgaacatatgcatactacattggttatctattgccacataacaaagtaccctaagacttaatgatttaaaacaacaaacatgtttcctcactgtttctgtgtgtcaggaatttgacagcagcttggctgtatggtttttaacttagtgtctctcatgagttagaagtcaaggtggcatttcttccgaagactggactgcagctggaacattcctttttaagatggctcactcccttgattattggcagaaattcttggttcctcagatgggagtgagccatcctttctcaccatgtggactttccatagtactgcttgagcattctcatgacatggcaaatgacttttcccagagtggacaaggaagaagctatagtaccttttatgacctaggcctggaggtaatacactaccacttctgctattctatgtactagaagcaagtcactaagtccagcccacacttgagggtcatggatttagtctcctccttttcaagggaggagggttgaagaatttatggacatatcttaagatcaccatacatatcctatgaccaaacaattttaccctgaactatagaagcaaaaatggatggatgggtgaccctcaaaacaatgtaacatgtcaaagaatgtttatagcatcattattcataatagccaattagcagaaatcaaatgtctgtcaataatagaatggataaacacattgcagtatattctaatacaatggaatactattcagaaatgaaaacaaactacaaatacatgcaaaacacagaagaatctcaccaacatattaagcaaaagagataaacccccagaatgtgtactacattgttgttttatataaatgttaaaaggaggcaaagccaatctaaaatataagaagtcaaaatggtggttacctttggggagaagcaaggagggaataattaagcagggttacaagagagttacaagagggagcttctgttctatattttgtcctgagtggtggttgcaaaggtatatttacattgtgatggctcattcagccatgcattactgatttgtacatatttcagaattgccttatacttcaattttaaaaaattgttaagatatcaaggaaataaacagtactcatccagcaagaaagaaaacaagtatgtgtgcaatttggcatgaaagtagccagtgtgtaatgtctgctttagacccagggttggtgtcctattgcatttgggctgctataaaaaactactatagactggatggtttataaacaacagaaatttgtttctcatagttctgaaggctgtgaagtccaagatcaagattctggcagattcaatgtctggtgaggacagacttcctggttcatagatggctatcttctctctgagttcttacatggcagaaatggtcagagagttttttgggggtctctcttataagggcactaatcccattcatgagggctccaacctcatgacctaatcacttcccaaagatcccatctccaaataccatcaccttggggactaggtttcaacatatgaatttgggggcacagaaatattcagtctctagcagttgataaatgtaatctgtggcaggcctcaaagcatatagttgtggtagactttggtggtaagcatcagtctattcccacaaagtctgagttgtagaatgttggttctgaaaagaacttctggatcatttggtccagtgatttttcaaactgacctccctggcagagacaaccccttaggtactccacaggatgtcagaaattctcagaacacagtgtgaaaactactgatctagttaactccctggtgctacaaataaagaaactaatatttagagagactgttacttatttagagttatgcagctacttgtggcaatgtccggagattcattcccatctgaatgtaatatcacatgttatgctgttctggtggagaaggaagaaaggggaaatgttacacatctcagggccatgagctttggagtagatactctcctagtctgtcactctaggcgacgaaaaagagaaagttagcaaagagaagctgagatagaaaacatgttagaaagtgttccatttaggggctgccctggggaatgccctattttgtcaccaagatgcaagacattctctcattcaactcatgctttaactagcttctcagctctggctgcagattagaaccacctgggaactttaataagctactgcttcctgggcctccccaaatactaattgaaacagactttctggagtgagctggaaagaataggatattttgatcctcattgagcttaaccgagatgtatgtggactgacctcataatttcagagtagttctgactctgaacatcaaactgagccttgccagaagagtaagaaacacttagagagagagagagagagagagagagagaaaaacccttgcctctttgttctgggactgagctcacagagataatgaaagggaaaccattaaaaccatccatagttggctgcagagtggtggcatgattcagcagaaggaattcacatccaccaatcacagcctcttgcattttggtcaagaagaggtggcaaagagatgggggaatgtggggacagtggcaagtggcaatgacagggaaggggagaagcatgtggctgagtggtattgtgtctgtttccatactgattaataattttctctctctccctcccctccccctgcttcatgttgtcaaaggaggtggtggcaaacttcagacactctacctttgttgctatgacttgaggacttgaacctcttctctgcggctctagtcctaggaatgcagcccccatttgtccttggtttctccccttataataaaatgttgaaagaattagattcttaggctgtgcatggcaagtgcaattaaagttccttggttttataagtggcttttggcagaccatggagtctacacttctacttagaatgggtggatcctagcaagacttttctctgagagaggtcacccttaaagatactttagttctccattcctttttccagctaagggagcctgacatcttcctaacctggattcttctcccctcccctttgaagtgtagaatgccagaagtgaaaagaaccaaagagattattacatccagtttccattttgtagattaaaaacacacttgaacaaaagtgatttatgtaaggttacccagtatgtcaggggaaatgtcaaggcacaaacatacttggtttaattctatagtaaaaggtcactagtttttgtctttaaaatatttataatgataaaatatgccaaagatacataaaactacataaaataataggcaccatctatcttatatcacctaaatttaaatgattttgcatgtctagtgtgtttcatatgtttgtaaaaaaataaaatgttaaggattcagctaaagcacccgctaatccatctctctcctctctccctcctcaggagtaacaacatttaagactggtgagtcccattcccctaaatatatatatatatatatatattttttttagacggagtgtcacctgttgcccaggctggagtgcagtggctggatctcggctcactgcaaactccgctaccttggttaaagcgattttcctgcctcagcctcctgagtagttgggattacaggtgtgcaccaccacgcctggctaatttttgtatttttagtagaaacggggtttcaccatgttggccaggccgttcatgaactcctgacctcaagtgatccacccacctctgcctcccaaagtgctgggattacaggcatgagccaccacacccggcccccctgtatatttttatactttgttctacatacatatgtatcttccataatactatacgatattgttttgtgtcttaattagcataatgctttagtcttttacagcttctttattcacacaacattatatttttaatattcacccatgttgtaaatctagttaatccactttaacagctgcatattatctcactcgtgaataaacaccactctgtttgtctattattcctccattgtaaagttgttcccaagttttgcacaaatcgctttgcaatgaacatccttgcacaggtacctgtgtccaagaatgagtttctatagagtaaagaccttgaagggaaattacagggtcctaggatatatacacctttaattctacaagatattgtcaaattgttcaacaaagtggttgactcaatttacacttctcacatgtttgccaatacttagctagctcagactttcacattttaaccaatttgatggatatgaaataccatttgttgttttggtttccattgtcctgattaccggtacaagttgagtgtcttctaatgtttaatagtgaatcagattgcttcttatgtgaattacatgtttatctgccttagcagagggttgtcttctactgatttttaaggagttctttatatatttccaattataacttttttgcctttttcatgcacagcaaatatcttttcctagtttgtgacttttaaaaaaattttatgtagtcttttggttatagaactttttaatttaatatagttgaatgagaataacaaactgtttttcctttcacacaatacttcacttctgacacaagatatgagggtattttttccataccaagcagttttcctcctttttttttttttttttttttgagatggagtctcgctctgttgcccaggctggagtgcagtggtgcgatcgcggctcactgcaagctccacctcccgggttcacgccattctcctgcctcagcctcctgagtagctgggactacaggcgcccgccaccacgcccagctaatttttttttttttccgtatttttagtagagacagggtttcaccatgttagccaggatgctctcgatctcctgacctagtgatctgcccgccttggcctcccaaagtgatgggattacaggcgtgagccaccgcgcccggccagttttccacttcttggtggacatcaagtgaacatcctacaattttactcaattctaatacaattacctggagatagcatcagatcccaaagattaagggttcagccccatgagactgtcccttccaatttcagatgctaattgcgagtcaaggttatcacctatgtctctgaccgtctggctataaattggaggtactcacaacccccttgtcaggttcaataattttctagaattgctaacagaactcaggtaaacagtttacttcctagattactagtttattataaagcatacaactcaggaacagccagatggataatgcaaattatctctttcttcttcttctaaattgtcttgtctatttactaccttataatttccagttaattttagaaacggtttgtaaaattctgaaaaaatttcagattcttattagaaatacgtagaatttgttaatttgggaagaattgtcatccttaatgatactgagggttcttatccaagaacacaatatatctttgcatttatttaggtctttaaaaaaaaagtttcaggccaggcgcagtggctcactcctgtaatcccagcactttgggggtccaaggcgggtggaccacctgaggtcaggagttcaagacaagcctggccaacatggtgaaaccccatatctactaaaaacacaaaaattagctggacgtagtggtgggcgcaggtaatcccaactactcaggaggctgaggcaggagagtctcttgaacttgggaggtggagtttgcagtgagctgagactgcgccactgcagtccagcctggatgacaagagtgaaactccgtctcaaaaaataaaacaaaaaaaatgttttcattgagaatgctggcttgatactaacttaaaacagtaacaaaaaaagaaaaaaatgttttcagtaacggtttacaattttcttcattaagctattccacatattttgttggacttatttctagttacttaatagatttattgtgtattttaaagtcatatcttccaaatatatgttgctggtatattcaaatgtcagtgacattaatatattgatcttgtttccagcaacctctcttgttagtccttatatataatgtatagattctctttatattctgtgtagataacgtaatattatcaataatatttttactcttcattttcagccttttaattctattttataattgtgttggctagaatatccagtataatgttaaataggagttgtaataataaacatacttgttcccagacccctttcattagcttccaccacctcctgcttttatccttactccagattgttttgttctaggccactagccaagaagtaagtctctcagtccctgccgacccagacttccctgtacaggcatgcagctcctacaaacctcattcagccagttgtgcttaataaaggtgtccaaccatccttaggagttttattttggtggtccagtactctctagcgcaatgtgtctgaggtgcttgaaaacattttattctttctatatgtttatgttcattaaaggaatcactatctatctagggtcaatagtcagaaacctatatccttgtctcaacccccacactaattgatcatcaattatgtcagttccacattctacataactgtcaaaatattctctctgctccatttccaacaccagttattgacttgggccctcagttctcccaccttaactatagtaacagtttcctaactagtctccctgtctttcatctaagttcccaaacaccattcttctcactgctgccaagtttatctttcgaaaatgcaattctcattatgcctctccggattcaaaattcttcattggctctccattgtctcctgcatgaagtcttagttctccagctggtcatacagactctttatttattctggctagctctctaacacaccagcctagcaaaacttaagtgcttattgttcagctatgctgtttattggtgctgtgatttttgtataggctggtctctctgcttggattgctctggcaaagtcatattcattttcaaacctagagcagatgtcccttcctccaggaattattgataaagagtgcaacaaatatttattgagtatatctatatttcagatactatgctagatgctgggaatacaaaatgcataagacatagtctgaatcttctagtgtcaatcagctacttacacttcttacctccctttagctttaagtagctggtgcatgatttttacttacctgattcttcattcttttccctgtatgtctacaaaatcttctccattcttgataaatactgtacacatataaatgtacaaatattacattattctaacacagatgcacatatatagtattcagaaaacacacagtgttcagaaacattcatagacacagtttcaactaggaagtatgattataaatgatgagataacagcttagtactttgtggtcagatcctagctcagtcaacacacagaagcattgtacagctagggtggtgaagggtattgtgttctgaaaatagattgcctaaatttgcatctcagctctgctacttacaagctgggtaggcttgggtaagttaatgaacctttgcacctcatctgtaaaatggggacaatgatgatccctgagtcatagtgctgttcagtacaaattattgaatttgtatttacttcaataatgaaagtgcttggaagctagtttgagcgtagtgagttatctcaattggttattcccagtcagctacagatggaactccttgttgtctttcccccattctcactagcacatttagctagcatttttttaaaagtgcctagaatagtgcctaagacaatgtgtttaatacatggtagctattatcataactttgtataggaggaagtcactatcagcaggtcaagtgatttttactttatatctagcaatgaaagaactgctgttgttctgagccacgtacatgctcttatctaatctttattggacgaatggcacatgtgggaagaatgactggcccaagagagcccagagctgtgggattcagttttcccttatgtagagctgaataacatatgtggaaagaaattgtattagcacacattgacagagccagctagctgtaaacacagacagatggaaatatattaatagctatgtgagggtctatagtgtttcagctaagagcacaaactctggagtcagatcacctcacctaggctcattattctgccatttaccagcatcgtaacattgagcaagttatctctttgtacctcggtttccacatctataaaatgggattgataataatagcccttatttcatgcagttattgtaagactttaattaaataaagcatgtgaagcactaagaacattgcttggtacatagtacataataaatcatgaagaaaaaagatgcacacagtagacagagaagcaggtgaaaataagtcatctaagtgttcacttcaagagaagccatgaaggtagatgttcaactggataagtaattcccaagggaaaaataaggaaattctaattctaatgcacttgagataaactttattaaagctatttttcatttgtttacatagaagtctccaacttatcttccctattatgtttggtttacagcaccagtatttcccaaaataagttctgtggagcatctgccctaaaccatatgtgagaaaaaagggttttgtggctgaatgactttgggggaatgctgagtgccatatttctttctatattcaaatgtacattaacactctaaggtttaatatgtcctgaaaaattgtttcatttagtttaatccagcatttcttgaattgacttaataatagagcccttttttcatatactgtgtattaacattccggggaactactgttcaacggaacaaacatgggagaaatgctggcttagatgaatattaaaatggcctttataccaaagcgggggctgaggggtatgggggggaggtatgggaaagacagggctcacatgtctttttagactggaattgagcacttgccgaagactattcacaaacccggaaactatgcaaatccctcaggatcacagacatccaaacatacacagtgttgctgggagcatgtacagggtctttagagggggttgagggacctgaccctcaaccctcacactgcagcttcctcctgctgctgctgctgctgctgctgctgtgctaggatccctccacggaagacctatgaggctcctaaacattttaccatctatctttggccacttacttcctgaatttactctctggaagagaagaggcccactggggaaaagagaagtcagatccaggagggaaccggaagaaggaaagacagggagaagagactgggttaagatcccgcatcagatctaggacaaggatgctcctctgggtagaggcgaaatgaaagatatcagcaacgcagggtaaggggccccctcacagcagagcagggcatgacatgcgctcaggagaaaaaatatcgacttctaaggttagtgaccagaatgggagcttcctgaaactgtgtttaatgaatttaatgaatttttattcatttatttttcttgaagaaaaatgtgatggctggtgggcttcctgccgtggaaggagagactgagattacatgctacgtggcctggtgcaaagagacctaaagtctttgcaaagcaaaaggtcaaaaccttgatctggcaaggtcaaaaccttggtgggggttgaggtctgtgagtggcttctcagtgacaatgaaggataagaaaaaataaaataaatatgtacctacttataatatttttataagaaaaaataaataaacattagaatattagaataaataatagaataaataaataaatatacctacttgaacagtgcctagctatggaaagctgcagcaggatttttttaaactcccataactttttatttttctataatattttacttttatagttgtagaaacttgagtcaacttctctagtttatctctaccttctagaaacaaatatttatttatttatttatttatttatttatttatttatttattttcgagaccgagtttcgctctgtcgcccaggctggagtgcagtggcgccatctccgctcacttcaacctccgcctcccaggttcaagtaactctcgggcctcagcgtcccgagtagctgagatttcaggggcgtgccaccacgcacggctgttttgtatttttattagacagggtttcgccatgtaggccaggctggtctcgaactcctgacctcggatgatccacccgcctcggcctcccaaagtgctgggattacaggcgtgagccactgcgcctggcctagatacgaatctttatttcctagaaaatctgaacagacattacgtgtaaacttcatattactgtgtttttagtaaaacaatgttttgcaagtatttataagggaatggaaatataacgcaggaaacacaccctagaaagttatatccacataattctagaaggagagggggatacatttgcaggggatgagatttcccgagaacttctggaggaaagtgggaatcttctccgtcagcggggtgggggacggtgtttcagcgagcaggaggcggcagcaggtagggaaggtggccgcagtcccccgggaggcgggggcggagcaggaaacggcggcgcgcggggcgggaggcggagccgtggggagcgccgcaggtggggacgagccgggcggcacctgccccgggaccagagcggacgctccctccccgctgcgccgagggaggggaaacccgaggggttccttggagaaggtggtgcgtcctggggcggcagctgaggaagaaagacgcagtgccccgaagcccctgagctgaaaagggccagaaagggggcggcatggcatggcccaaactgcccgcaccttggctgctgctctgcacctggctcccagcaggtgagccttggaaaaatggtacccaccctggacccaaggagacaggaagccattgtggcgtggccttgcagagctggccgcgggcagggcagtggaggcctgggccgcgctctggtggcgcttggcatgggcgccaggaggtgcggggactggatcgagtttctgcctgtgggaacctgttgcttttctcttttgttagtccaggcccttcccaaacaggtgcaactgagaaacctggagcctttgaactttcgttcctgcagtcattaggcagttcttgatctctgaagctgaactgataggggcaaaagcaccgttctttaaaattcctaattactttttcctttcatctgatatggtgacaaccatattggcccagaagtgcatatatttcatttctgggaggttataatgtgtcctcagtatgtaaagcaatgtttggccagaatctgaatctactgtgcaggaccacaacatgtacttctgggctaaccatgttcaatgtcacttttctactttctctgtatccagtcactgccctaactttaccccttgctcatcctgcatcaggtgtccaaccatctaccctctcaggcttcattctcttaccctccacaccaatctcctctctgttttggaaaacatgattttgtgtatctctgtgtgtgtcctggaaatctgacagaagtgtgtatctccacgagtgaaaccaggtaggaaagggtagctgagggacagaatgggcaggctctttcagctcttttccaattaggatgtaggtgtgaccttgcaaagaagaatttataagttcccttggaagctccaccctgttttatttcattttacccctcccctccctttcagaatagctgccctcttacctctaagttgtcagtggaaggtcaacttagagtttgctcacagaccaatttgagtcttgtatttttaggttgggaacagatgcaatatgaaggtgtgttggcagaatgttctttctacaagctccataagacataacgaatttctcaggtataatcaaatcttattcagacaggattctaccataacttaagcgtaatgctgagaataaaagggagagaggcttgcaaaagggtagggaaactagaaaattgatatcccccaaggccctctggcttacaagattttctacaggatatagaccctagaaactgtctgaagttgacaagactagatgttggacacccacgatgcacagggaaataactaaacctcacctcaatttgtgtccaaaatttcaccaaacaccatcttaggctatgaatgcaaatttataaaaatcccacagctttgcacagtcttctctcctgtggctcccctgctcatctcaaactccacagcagctggggatttctgaagctgcttgagctacctttttagaaaaaatagagttctgctcccaccactgcccctgggtattctatccccagaattaagactttgtaatcctaagcaaacctctaaactcacgttcactttatagatgagaaattgatatttcaactgtttgactccaacacttggaggggaaatagctattttagcagatagttttcctatgtgtagaaatgtaaataaactacattcagctatttaatgtggtttgtgtcaatgatgtttatgtgacactgggcaagttacgaaactattcaaagcttccagtaaatagcaattattatagtacatatctcatacagcttttgtgaggattaagtgaaattaaggttttaaagtgcttaatagagtgcctgaacaaagtgagggaaagcttaatcaatattagctagggtgataatagtagtcaggaattagagccaggtaggattgtttaaagctaactttaaggaaacaagtttctctattcctccttcccctatggctaagaaatgtgagctatagtaacaggtgattatcaggttggaattctgaatctccttcttactagttgtgactttggatggattacttaaactgcctttgcctggaaaacaggtgaaattcctgacaagccaactccctgtgccctctcaataaggccaactattgttgggtggattaaggtcaagcacagtgtcaatgacacgctgcaactgtgatatgcactttggaaaaccctgtactagagtgtgttcattttggtccatcaccttgttctctcctgtctctgaagaagagtcaacccaattctctgattagcctccaagttcccacaattgcaaagtgtgaggcagtagtaaaattgtgtcatatttaggtatttgctggtcactgtggcttggggcccctaatgaagcttctgaggccagggagtcttgtgatattatcacagtccttgtgctctgagctgtgtagagatcacttgtcagaagtaggtgtgtgtggtcttcactcaggaaatactgggcataagtccttctctactcccccaccttttccttaatttttaagccaaacttcccaaagtgtctgtcaagatcaaactgaagatcaagcttcctctcttgctctcaatatctatcaaagcagtggtttctgattttttttcacagctcccagaaagatccaagtacattgtgacatgtatgcacacatatacagtttataaaatggaagcaaaatgatcacaaaaattttattactaagttgaataaaataataacaatggatattacatattatcttactgatattaaaattcatttaaaaaatcatccccacattaacaatatcacaagtgatatgtgaatatctgctccttaaaacattaaaataaggctaaagtaagtaccattgttggctaatagctctagttgccttcatccaatgtcaaagtttattctcagaatgaaagtttagtgtccctgccgatcccccaaactctaaaaggatgtgtgtcatttctgctttagtgaattttttttaacatcacagtgtggtgttaacttgcagatccacacagctatcaacttgtattatcattctttgggaaatcagacaaccgacccctaagtaagaatatccttagagagacagcatctagaacagtaatttttcctgggtggtgggggtggacgtatggaccataccgtagacttaatgaaatcttacaaagttccctgatatatctcagggtgagggggtatgggtgatggatgggagactgtccactcagctgctcccttgtctccttgggagctcctgaatacctccccagaatcccagagctctgttgaacacaggtagaaatcactcccagcctttatcttcccctcccagccagttttacagataaggaaatctggacccaagtcatgtgtctcaggttgacagagtggagttagtttgagaactgggaccagaaccctggtgtcttcaccctttctccattgctctctctcctatttcatactgtggagcaggttttttgtttgtttgtttgtttgttttaattatactgggttacatgtgcagaacgtgcacttttgttacataggtatacacgtgccatagtggtttgctgcacccatcaacccatcacctacattaggtatttctcctaatgttatccctcccctaccccccccccaccccaacaggccctggtgtgtgatgttcccctccctgtgtccatgtgttctcattattcaactcccacttatgagtgagaacatgcggtatttggttttttgtccttgtgatagtttgctgagaatgatggttcccagcttcatcaatgtccctgcaaaggacatgaactcatcctttttatggatgcatagtattccatggtgtatatgtgccacattttcttaatccagtctatcattgatggacatttgggttggttccaagtctttgctcttgtgaatagtgctgcaatagacatatgtgtgcatgtgtctctatcgtagaatgatttataatcctttggatatatgcccagtagtgggatggctgggtcaaatggtatttctagttctagatccttgaggaatcaccatactgtcttccacaatggttgaactaatttacactcccaccaacagtgtaaaagcgttcctatttttccacaacctctcccgcatctgttgtttcctgacttttaatgatcaccattctaactggcatgagatggtatctcattgtggatttgatttgcttttctctagtgaccagtgatgatgagtattttttcatatgtctgttggctgcataaatgtcttctttggagaagtgtctgttcatatcctttgcccattttttgatggggttgtttgcttttttcttgtaaatttgtttaagttctttgtagattctggatattagccctttgtcagatggatagattgcaaaattttctcccattctgtaggctgcctgttcactctgatgatagtttgtcttgtttaattgaattctagtatacagaaatagaaacaggtgtctgcttcctggatgtctaactaaatgctaatgtttaaacatcttgccccaacaacaatgcagtgaaacaagccgttgggtgattagtgtacagtctacctgggtttcttttaccataataatttatttcattatctgaagtccttggtggaaaataaaattgtgtgttttaagaattgagaagactctggccgggcacggtggctcacgcctgtaatcctaacactttgggaggccaaggcaggtggatcatttgaagtcaggagttcaagaccagcctggccaacatggcgaaaccccttctctacaaaaaatacaaaaattagcccagcgtggtggcagatgcctgtaatccaagctactcgggaggctgaggcaggagaatcaattgaacccggtggggcggaggttgcagtgagccgagatcgcgccatttcactccagcctgggcaaaagagaccccttctcaaaaataaataaataaaataaaataaagaattgagaagactctggccatgtccccagttctttctagatctcccaatctgcaactcttgagataaggagggatcagaggaaagcaattttgacactttctttatttctcataaccaggtaatcactgagttctgttacttagtcccaggatctgccccttcttttctattttgggtgacaattcttatactagcctactttaagcatcttcttgcctctagtcctgctacttctgtctacttccaaccattctctatgcagatgataggttaaacctacctgagttaatcattcccactttcattttaatcttccatccaaagaagctccattagatccctatagcttatgagactgggctaaagctctttgtttgaaattcaaggccaactaattctgggctcactactttgggaagccttgtccccccagatacaggcatggtcttattgtataacctttctcctcaacacacacccttctttcttgctttttgtctggctgtactagacatggttaatgttaaccatttttttgaacttttagggcacttaaaatttgttccaagcaatttagtctatcttgcatgaatgtatctgttcttttgtttagcaaatgtttaatgtgcacttggtgcaagacctcgtgctggcaaacaaaagccatcatggccctggcccccgtggtgcttattgtctaaagggaattcaagtgaatgtagaaatacaactgtgacaaggccaggaaagaaggatacaaggtaccacaagagcacttagtagatggattttgctcagtcagaagaccctccctgaagggatgatgcatgagtactgaggaacgatgaattcaaaccaaagtaatagcatctgcaagactgctggataggagcttagtgtgtatgagagatgagaagaatgttagcgggactgagtgaaggaagccacaggaagagtggtggagttgaggccagagaagtgggtaggaccagatgtgcatggctgcatgggtcatggtaggaagttttgtgtttatcttaacagaaatggacagctgttagaggtttttaaggaggaggaattgggagactaacagcaatgtggaatccacctagcagggggaaccagagcatgcatgagtacagtactaggtaagcacaggtgatatggaggctggacataatagtagcttgtgctaggatagtagtgaaattggagagagagagagattctggaaatatttcggcgataaataagcccaatctgattgtagactgtgtattagtccgttctcatgctgctataaagaactgcctgagattgcataatttataaaggaaagaggtttaattcacttacagttctgcagggctggggaggcctcaggaaacttataatcatggcagaaggggaagcaaacatgtccttcttcacatggtggcaggagaaatgattgcccagtgaagggggaagctccttataaaaccactggatcttgtgagaactcactatcatgaaaatagaatggggaaaccaccccaagattcaattatctccacctggtccctccaacaacacatatggattatgggaactacaattcaagatgagatttgggtggggacacagccaaaccatgtcagactgtatatgaagagcaaaggaaaaaaagataccaggatgattccttcctagtttttggtcttttccattcactgagatgggaaatgtgggagaggcccaagtttgtatggaaggatgatgatttagattttgggcttgatttagaacttgaaacaaccaagaagaactatcaggagcatttggatacatgtgtctgttttagtcccttattgtacaggagtaagatttaatattcaatgctctcgtagtttctgatcaatgctttaaaactcatccatgacaggaactactttgtctgtgtgtttacttgtttatcattgactctcctaccaggagcacaagttccaagagtgcagggacctgtatctcttattttctactaatgactggctcagagtgtgtactcaataaatgaatgaatgtgtgtgttctggtcatgcctaaatttgcatgtgctctgagattagtgtgtggagacatgagtcactaacctgggtgaatgactttgggaaaccccaagcatctgcccctcaaccaggtcttggcctctcccccggtaaccaaaaggatgttaagttcaaaccacctgagtggctatttatttcacttagtagtttatcaaaaaaaaatttaaagattgatattttcctcttttgaataggttgtggtgaaacatgggactgtcactggctatttatgggaatatacatttctttcctgaagtatctattcgaatagaaaaggtttattccctttaactcactttgagatatatattctactggaataaaagaacgcatgtgaagacgtacttatataatcatattcatttcagtaattaatgccagcattgcttataatacttaaaagtcagaaacaacctaaatgtccataatttggaaaatgtgtaaataaaagtggctcattgatggagtgaaatgttcatgcagttactaaaaaaaaatagatctgcatatactgatatacaatatatcattagtttgaagaaaaagtcacaaatcaatgtacataatatgattaatttaaaaaaaacaacataggaaaagatgtgaagggatgtagaccaaattgtcaacagcagtacctctggaaagtggaattcatggtgagcaaggaggaactttttacttgataccccctccactgtttgaagtttctcacttatttattttgtattaacaaacaaaaaggaagaagagcttctgtacaaaatgattaaaataaatttgtgaatgtcccttaagtgcgtgaatattcctcaaagggttaaatctcaaccatttagaaaacttatccagaagacatggtagtgtagtggaggtctaagcttaaatccagctttgctactttctagctgtgtggccttaagcagattacttaatctctcagaattttcctcatcaatgaaattgagagaaagtaaagcttatctcatcagtttcttgcaaaggttaaatgagataatgtataataaaacacccaataccgtgtcaaacaacatagtaagtgctcagcacatagcactttccttctcggggtgctgcactgttaagtgttgcatgccagaccttgggtaaacacacagtacctagacatcattccgctccccacccatctgctttcctggtctcctctctctgctctccctatcctttccttcttgttcgtgaccactccctcttgtctttgtctcttcttgtccatagctagtcacttcttgtcttgctccttcttgttcatagctagtccctcttctccttgattccgctcatatttgcactgttatctgaggaaatgtaacaggcactgatggtaaatatgcttggtgagatagcctgctcagccataaactctgatagcattgaacctgtgtgcattttgttaacctgccacatggagtcagggtgcttgtatacctgaaaaacactcaggaatcaattcctgtcagtcccaggccactgccccttgccggcaaagacctgccttcaccctcctgcctaccatcccttccaagcaggcctgttcataggaaaggaggggaagtgccatctagtccttcaaaatagttcttaattttaaaaatattttaaaatatatacctgtattcctatactgtgtgagtatcttctacaaactaaaactccttcttgccaaatctaatactacacaggaaatgaggaataaaaaaatgtgcaaagatgtgcatgtatttaggaacagatgacatttagttgtaaagatactctgccctggttggtgtgtttccttctgttttagtgtaggatggtagtccccactcagcacagcagcctggccttggaaagtacctgatggcgggaatcagagaatccccttccccttctctccttcccatgagctctgatatctcatctgaagtttcctttctacccatgtgacaggtctccttcccttctttcacagagcctggcaagctgtgaatgagtccaccagggtacaaagctatgaaacttttgaagcttttgaggcaccaactcattttgcaaagagaagacaatcatgatagtttacatttgtatcattttttcaaaatgcttttacatgctagtctcagtggatctggaactcctgaagtagtcaagataagtacaaatgatacaaatgatagcttaggtttgttgaatgtctatatgtgccaggctctttgctaaatgggggacatttttttatgctcaccacaaccctctgaggcaggtattatcttcatctcagttttgcatacaaaggaaaacaatagtttggaaataacttgctaggtcaacttctgactctaaccaaattcccttttctgacccccagcaactaatgttgactagagtgtttaataaactgctgtttatattacattaccattcagctgttagggattggagacagaatctgaactcagggagtcaggttctagaattaacatttttgagagaaaatgatagagacagctaggaaatgaggagtcaatgaactggggaggagaaaattccacaggataaaggaattttaagaatagaaaaaaaattaagaatttgaaaacttgtagtaagcctgaaagagcaaagttgcaaccaggatgactacaatcaggacgtttctcttttttgatcctgttcacattttcagcctgatttgctgctttgggtcctttcttgaaaactccacctgcttagttctgtgcatgcccagtgtggttaggtttacagagaagttagaggatataggaaaagaaagtgggtgatttttgcctttgagatggactgtcttgctactgcctttccttcccaatctggaaaatctgactgctttttaagagcctggcgcctgacttctactttggaagatcaagcttgcttgcttgggaaaaattgggatttgttgtcagcaaggcccaagctcaaatcctgatgctgacactttttaggtatgtgatgttggacacgtgggggtgtggcttatactctgagctgaacttctgcccacctatatgagcagggctgttgcctagctgagggggtttgtgagatttagagaccaagaatgtacatcacccggtgcataatagatgctaaggacccacagcaacaactgagatatgggagaagagtttgctgggttgttcagtacctcttctcctgggactcttcccgtgtgtgtgtgtgtgtgtgaaagagagagagagagagagagaaagagagacagggcagggggtggacgtttgaggtctgcacaggatgctgtggggctggctggcagacccctggagagagtgtgaatgagctcaagatggccagaacttgttgaacctggcagatatcaaggcttgatattcacacagggatgaaatagaagagaagataaaagagtacccaagcagcaaagtcagtgctgacgttggtaaaggtgagttttgtcaccccaaatgtggtttgtccacaataagggcattcatggaaggggagctgagtgatcacctttctccccatttcccctcctcaagggtgtcagattctgcaatcttcaaagctaccccacagcaatttctgactctaaccaaattcctttttctgacccccagcaaacctggtctccctgctcccaaatgcgctacctctatacaggtgatattgactagagtgttgattaaactgctatttatatcaaattacattcagccaaataaggagcctacatgttctttattttactgtgtcagagtgactgcaccagttatattttaattattgctcacatagcctggcccccagctcaaattatttgcaaacttgtgaataccaattatcttttatttaaagaatagccaagctgagaggcaggagcactgctcagggacagaatctcgactctgacccccttagaaaaaacgaatgaccacagacaagtcccttaaatttccaagcctcagatttgttgtacaggaagtgagcacagctaatcttctcccaggtatcacatttagtatataaaagaatatatttgaagatgctgttgaacctaagattttatttagaccaatatcagtgttttcctctctcttctcatcggtatgtgtgttatggaacaaaataagccagtgttgacaatggcaacctattcattgtgaaaatcttatctgtggctgcttctactattcagataaaactgtggttggtgagatctccaaggtctatttcaggtcagttctggaagaaaagaaacaaacaaacaaaaaacaaaaaacacacaaaggggtagtcacagagaaagaacaagaaccaaaaattagattaagaaagccatgttaggcttgagatgctggtcaccggcccttccattctaattggcctgatttctgggactctacagcttacggagacagcagctttttttcccaaaaccactcaaggtttatttttaaaatgatatatatttttttttcatttacagctgagtggggaagtcatctatcttcctaaaaacaccactttcactgtattactgttcttcagaaaagacttcagtgatgatccatggacaagaaattgaactggattgtgatttagacttcaccccatcgccccacctcccactcaccaccaccagccccgccttatttatcttctctgttttccataaagctggagacacagctagattggtttcccccaggttacccaagtaactgccccttcctaataaggctctttgctccctcctttcttgcttactgaaacaatgagtttctctgccttcttcctacttctcatgcgtgatcttagttctacctgcttcttggagcctaggttaaatcatttcctttcatgaagtcttcctgcccacagctctcgcctgcactgccgcagagtctctatccagcacatctgccatggggcatctgcatcacagcccagtcctggagataggtggtcaggtcatttctgtgagtgcctgtcctgagcagcattctgctgtctgtctatggatgtgagaaacccagatgcaggtgcctatcagaagtttaaggggacagtcttacaagggctgtgaccagtaggtcaggcaggacccaagaatcatgtgctctagcgttcaagacaggcccacctagctgctccgtaggataataactacatttgttttgtttgtgggagtaccttggtcaaaatgaaggtggctccgtttgaaaactctgttggagaaaaccccaactccaacctctttctccttggccctcgtaataaggggaaaaaaaggaagagactcacatactgacactaatgtggcagtgtatgtgcaaggcttcatgccaaggacagtagattatctcattgcattcttgcaaggacctgataaggctagcactatcatcatcttcattcatggctgagaaactagctcagagagagagtaaataacttgtccaaaattcaagtaaatattaaagtttaatttgaacccagctgtatctgaatctaaagcctgtgtgtgtgtgtgtgtgtgtgtgtgtgtgtgtgtgtgtgttttaaattgagtctacaccagtggttctcagagtatggtccttagagcagtagcatcagcatctcctggaaattagttagaaatttatatcaattgctgtgtgcagtggctcacgcctataaccccagcactttgggaggctgaggctggaggattgcttgaggttaggagttcaagaccagcctgggcaacatagcaagacttcatctctactaaaaatttaaaaagtcaggcatggtggtgcatgcctgtagtctcagctacttgggaggctgagatgggaggatcacttgaacccaggaggtcaacgttgcagtgagccatgattgcgccactgcactctagcctgggcaacagagcaagactgtatctcaaaaaaaaagaaaaaaagaaagaaagaaagaaaaaaagaaggccaggtgcagtggctcaggccgggcgcagtggctcacacctgtaatcccagcactttgggaggctgaggcgggtggatcatttcaggtcaggagtttgagcctagcctggccaacatggtgaaaccctgcatctactaaaatacaaaaattagccaggtgtgatggtaggcgcctgtgatcccagctacttgggaggctgaggcaggagaatcccatgaacccgagaggtggaggtggcagtgagctgagatcgtgccattgcactccagcctgagtgacagagcgagactctatctcaaaaaaaaaaaaaaaaaagaaaagaaaagaaaagaaaagaaaagaaataaaaaatgcgtgtctctgggcctcacccaagtcctacggaactagaaactcctagcatagggttcagtgatctgggctgtcacaagtcctctggtgatgcatactcaagtttgagtactagtgctccacactaaacctcccactagagaaccccttcacaacttggcctagaaaccaaactaacataggaatgttccaaggtgctggttatgtctggacccctgactgtgccaaagtcccacctgacattttggtgctacctaatcccttatcaaggcacacctggagctttaagtatgcctgtaggtttggagggtagggagaggacattttttaaaaggaaaaatctcctcttaatttcttcaagtctttcttgatccagtttgtcacatctgttttatttgctctatgcttatgctcactgcctgtactgctgaatttccactggttaatatattcttagtcattcattccatcatttattcaacaagcatttgttgggtgccaagtaggtgacaggcacagtactgggcactggtatttgagcaatgactttgagaaggccgactgcgtttttctctgagcccacagttagcagaccatcaacaagaagcatgaaaagtgctgcctaggggtaggttggcgcacttaggaaaaaaatagggaggcccctctcccagatttgcagacaggagggctgctggagaaggtagggttacagacacagaaccctgtctatggggtagacagaagtagaaaccctgttcagctgaggtcccaaggcacgaatcataattagcccagggaagagagtggagcagtggcaggtgatgtggaagagtgctccaggctgaaagagctgcacctggagaagagaatggtcttagcatgggaaggactgaagaaagctcagaatggctgacccctcgatgggacgtgaagggacacggggcagacgagaagggcagtaggctgacctaacgggtttcgtaggcctggttagggagcttgaactttatccttaggaaacgggaaaccattttaagaagagacatgatgtgaggaaaaaaatatattagcagtgtcacttctgtacaaatgtggctttattttgatacaatccttatattgttgttggatatgtcatcactgttaatgcactgtaaattcctgggagttttcctcactcctttcttcctatgtccctctgaggctgctgagtgcgttctcaccccaccccacccatagcctgcccaggtgagtaagaacccagactctgtctgtgagctcctagccaggtcaggcaggatggcaggcaatatcttttgcccatttgcattgtttttcttacccatgagcagagtaggtcaccttcagcattttctcctgctcttggctttagggtgcctgtccttgcttgtgacggtccagcacacagaacgctatgtcaccctgtttgcctctatcatcctcaaatgtgactacaccacctctgcccagctccaggacgtggtggtgacatggcgcttcaagtccttctgcaaggaccctatctttgactactactcagcgtgtgagtatccttacccccttggccctctgtgggtcccagacacctctgtgacatactgcggttagggttgagggattatttaggattacaaatcttggtagtgaggagaagacacaaagatcacctaatgtagttcctctgttttatagataaacaaacggagcccaggtagatgaaataatgtattcaaggtcacatactagtttattttaaaattttttcctgctttgttctcaaaaaaatttaaagaaacttaaacattagggaaaagtcctgcctccctgtccattcctggttccatgccaatgtgctgagctgatgatgcaggcccgcctcccctcacccccaccaccttagaatgcaggcaagaagactctacactcagcacaaatgatgagtggtcatttgtgaagtctcttgctccttgctatattcccttcttcagtatgccttcgggaagatggtcattcctctgctgactaagccctccagtgcccccccaggcagccctttaactgtgggaagtctcttagtgctacacaactcctccttagagttggccagtcctgcctttcagtaacaactgccccaggcatatgggttgtgctgtctggatcagagccctttcctagttgcccatttctgccttctctcaaagaacaaaggaacctagaaccaccccactgttagcaccaagacaattaattttttggagattttgagaatagaagtagacaccctgttcatagggaaaagtgagcctcctgagaagaagcaaatggagagggaggcattagtcttcacctttttgagcccttgagctaatgtctcacaatatgatttgagtagaacctcaagagctgtctgagccacccactgagtctgccattgtccccaaaagactcctctctaaattgaggcattgtttcctgggggttactcttaaaatgcctgggttaagtggccagggaggagaggctagggtagcaggcatttgccaggggcagatttaacagctctcagaccctatattttctgttttggttttttttttgtttgtttgtttttgtttttgtttttgtttttgttttgagatggagtttcgctcttgttgcccaggctggagtgcaatggcgtgatctcaactcatcgcaacctctgcctcctgggttcaagtgactctcctgccttagcctcccgagtagctgggactacaggcatgtgaccttatgttttaagggcaggtggatgaattccatgggagcagagagaggctggggtgactctgaaaatgagacaaaggaagttggaataggagatggggagtagagccggcatgaaaatgatggtcaggagtctggctgctcaaaatgtggtgtctggtatcacacagattctcattagaaatgagaatctcagaccccactctagacctgcagaatcaggatcttcgtgattaacaagagtcccaagggatgaatagtcttgggaaaaattgagacacttcactgtgtctcacgcccggagcaggaagggaaccttttttttgtgggaaccccctattgctgtgtgactctagtgtgccctctctcctcagcataccaggcagctttatccctgggccaggacccatccaatgactgcaacgacaaccagcgggaagttcgcatagtggcccagcggcgggggcagaatgagcccgtgctgggggtagattaccggcagcgcaagatcaccatccagaaccgtgagtgcgggggaggtgtcaggggaactgggggtggggggaggtgcagacaccaggcctggcaggctgagtcagcatgggatttcccatttctttctgctgcctgttggtctacttggtcactgtcattgtttgaggaaagtgccagcttcatagaatgtgctgcaccagctgaagtgacttccctggaagttggtctctggaccagaggttgttctgttgctatctatagctttggctaaaggtctaggggtgaatggttccctttgctttcctgagattcagggctaagttgtggatcaggtttctttgattccttccacaaattgctctcagggcctactgaaaccccaggtccctgagtttccttccggctattcctgttgttcacatggaaggaaatagggtcctctgagcagatgaccaccttgagaccactgtcctccactgatagaagaaagaacactgggcttggactaaaaagccccaagtgagaatcctagtgcttcctctcactagctcagtgaccagtgatcagttattttctttggcttctgtttcttcatctgaacgacaggcatcatggtatcttcctccctactccaaagtgaatatctagcgcgctatgtgagagctgtgtctaaagcctatctattctctgtgcccagtgcagggagtagtggtgagagccctgactctggagtcaggtgcgggtgtgcatcccaattctgcatttacagggtatatgaacctgggcaagcctctccaattttttcagcctcaatttctataaaatgggacttgccatagtacctagctcatggagatttgtggggactaaggtaatatgtataaagcatttagcaaacaggaagtgggcagtaagcattagttatcactccgtgtacttttggataaatggcttagcttagctcctcatatttctattgtgtaatccacagttgctgccatagagtagcacataattcagagcctatttcaatgggctttatgtgctgtgttaaataaatatttgttagttaaaaggggaaaaagggaagaatacacccagtgggccactcatggtggccatcgctacaatatcaaggaatcagtgaatattctgactgtttaaaggtaggtcacttaaggggaaccagtttaataattgctttcagttttgtctataacacttaagtctgattttttttttttttacattcggcatctgattttccccaagccagccctcagttttagggtacatctgtccttcttttctagtcttcaggggcatcttcaaagatccaaggtggttctgccttttccaaagccagcagaatttgttcttatctgacctcaaagtttcaagcctctttaattagcaaattacctgaacagtttctgaaggatggaaatccccatagtagctagtccctgctcttattatttttttttttctaaaaacgtgaaggtaaataccttccactactcccactcccagccacctttggctcaaaccctgcttcattcttactaccacaggaatgcattagtattctcctctgtttttatttctgtctccaggcttgttgtgacttcctgaagcccttgttttctgacacttttttgcctatgcctgcatcatttgagatgaccctgtcaaatcagtccttagatcctttaaaatattaacatatctgaaaactcttcttactctgacacccctaaaatactctttatgtcaccaataaaaattagagcagatttacaatacacatcatgccctgagggggagttttttaaaagcactttcatcatttttccaagtctggggtaagcttatttctgggaaaggtagtgggtttggaaaatagcgggtaggaaaaaaattgtagatattgacgtagaaagagaaggaaacagaagtcaaagttaggtccactggtgcgtgaccttgcatttttgtttcatttcctcaataaacatttcttgacaaacagataataaagaattgcagatattaccaccaacctagcaggagcaagtctgtaatgctaaggttccgtggcatttactgtgggtgggggagctggaactgcctgccgctgcacttcacacggaggctgccctgatgcctttgactggattttaaaccctttcaggacagaagagggtcttgtttctctttacatctcctcggtgcctgacataatgctggacccacaaaagggctttagtgaatatttattgactttgctaaacttgaacataaatattaaccattcattttaaattccttgtagatgctggatattagacatttgtcagatggatagattgcaaaagttttctcgcattctgtaggttgtctgtccaccctgatgatcttataagtggaagctggatgacgagaatgcatggtcacatggggggaacaatacacaccgcggcctgttggagggtgtggggatgtaggagggagagcgtcaggaagcacagctaatggatgcttggctttataccgaggtgatgggatgatctgtgcagcaaaccgccatggcacatgtttacctgtgtaacaaacctgcacatatacccctgaccttaaaattaaaaaaaaaatgaatgtacagcaaatatatatataaaccattcatctatcctaatggaggtacacaaaaaacctgagtgcccactagaactgaaactcttcttgagttacatttacttttaaaatactggcattttatctttattcaagttcatctcatacctgtccttcaggatccagagataactgctcattttaggctgataagggacccagaatgtggagtttttccacccaatttagagaagacaggaaagcttggtggttaagagtaccagctttgaggcagagagatgtgggtttgaacctacctctgatgagcattgtctccatgttattaggccagttcctttgagtcttgattttcttcatctgaaatgcagctaaataatcatttccagtgtaccagttaggattaggtttgattgcgagtaagtaaaagccccatatactggcaacttaaacagtattttatttttaacttttttttgagatagggtctcactgtgttgcccaggctggagtgcattagcacactcatagctcactgcagcttcaacttcctgggctcaagcgatcctcccacctcggtctccagagaagctgggactataggcacatgccaccatggctggataattttttttttattattttttgtaaatacaaggtcttgccatgctgcccaggtcttgagggtgtcatgggttagaaaccagtgctctctcctctgacactggcactttctccctccttactgtgtaggagcagatctcgtgataaatgaagtgatgtggtgggaccatggagtgtattactgcaccattgaggctccaggggacacatcaggagaccccgataaggaagtaaagctcatcgtcctacgtaagtgctactggagctttctattcagtcaccctcactgccgtaacacttttactcacaggaaaaaaaaaaaaaaaccagaaataagcaagcctaagttcttgtcattggattatcaacctctaaagttcccttatcaaagctaaacttttacctttttgccagtatattgctcaactttaacctgtaggtcaagagctgtgtttatgagacctctaggatatcagaactggaagtattccctccccctgaatatttagttcaacccctgcttggcttctcccctgcagactggctgacagtgatcttcatcatcctgggagccctcctcctcctgctgctgattggagtgtgctggtgccagtgctgtcctcagtattgctgctgctatatccgctgtccctgctgtcctgcccactgctgctgtcctgaggaaggtgagaggggacagacaagcagtggaatggagtggattagggaccaggacgtcaagcagatcagcttcaagtgccaggtcaaagattcttccaggttctcctccatgcccttctcccatcatagggacagaggacattagcctcagccctgaaaatgatgcctggggaggctaggtagccacatggaaggacatttgcctgtccactcctcaggctgcctaaagcatctctcagatagctctgcctactgatggcatttcctctgcagccctgatgtacctgtgcttcgatcttcattcctagcactgacctcatttagacataaggtgggctggagcgagtggtttaaataagccagtaagagagaaggccacttgtaaaggaaaacaaaactgttttttcctattctcacatgccactcgatacttctgacaccaagtgtgtgtgtgttttccccacacaaaaaggaattactcagcgcacaccaactgaatgtcctataatttaactcaattctgatgctatttacctggaaatagcaccagaccccacaggtggaaggcttagtcccacaagactgccccctacttcagatgctaattgcagttgcaactagtaggttgtcacctgtgcttctgagcaaatggctataaactgggagttacaatgaccctttcctccagttcaattaatttgctagagcagttcacagaatttaaggaaacagtttacttatgtttacccacttattacaaagaatatttaaaagaatacaagtgaacagccaaatgaagagatgtatagagcaaggtatgtgggagcggggaggggcttccatgtcctctccaggtgtgccaccctcccaggacctccgtcttcagcagccaggaagctccttgaacctagtccttttgggtttttatggagacttcattacataggcatgattgattaagtcattggctatcagtgatcaagtcaccttcagccactctcccctctccagaggtcaggaggtagggatgatttctgttttttctttttttttttttttcctccttaacttaatttttggctgccatctccgttttctgactcaacctgtctggggcaggacctgagaatttttatttctctggcaatcaaaatgagtgactgaggcataagtctcagatcattgaggtttattgagctagcttgagggcatacccagggaaaaaacataagtcacagatgcatctgtggctgtttttttttttcaaagaggttcccaggaggtttagtatttatacattttccttaagaagtgggaggcagcaatgaaacaaatgattatatacttgtgaaactttagttagtgcccagcaaatctatattttacataagataaggtgaatattagaaaaggggaaaagaagaattagaccttatcttgcctttgttctgtacctgggaagataaactagtaattgacattatccacgtggagtcttttgaaaggggtggtcactgtgagaggggatataatgaggtgagtctgacctcccatcccgtcatggccatgaacttagcttccaagatttctctggggtccccttggccaagagggggtctgttagtcatttgggggcttagaactttatttgtatttcttatctcaaaagtttccaggtgatgtgctgctgctggtagaggagccacactttgagaatccttgagttagggcaagggaagagggagcagatgatcttgctttcaatgtgatcttcctttggactaacatctgatcctttaaaacagagctataacagaattatgccctaaaaaatgttggctacagaatacatggtaaaggcaaaataatacaaaattattctataaagttattttcttggtcaaatagatggaatagcaccaactgctttaaatagaaggtttttaattttttttggcttctattttcaataacatttcctcttccagatgatctaaataaagtactatattgtaggaaatttgagaaattcaggaaaatgtaatgactcatctgagtacccagagataaccacctttatcagtttgatccatttgaaaggaaattttttaagggaaaaataatgaatgacctattaagatagaaacaaaacctgatctacaatgtgaagaaagtcggtggcctgagtctggtttcaggcctgtgctctgaggttgctgtcttacaggaaaagagaactaacttttattggatgtctgatgtgtagtccccttgcatacgtttcctcactgaatcctcacaaccaccctagaaggcagaagtcatctcttttaaaagatgggagaccaaaggtcagaaaagccccacagctaggaagtagcagtggttttgcagagttgaatccatgttcatctgacttgtgagagtctgcattcctacagcagagactgccacagcctctgtaggtggatcactgtgggattggctaagacaccgtaggaggggaaaagtcgtggaggatgcagcattggactgtggggccccctacctttcagggatcttagggaggaggccatggagaaatcactgtcactggagtaataatatgcaggatgagataagaaaaacccgcccaagatgcctgcttagactccctaggttcgtggggcactaaaagcaggcaagactggggacaaagctaacacaaatgataagtgcaccacttattagtaaactaataaatggaggttctgcgggagagttgtttctcctgagggattaggttcattttaaaaaactagtaaaatcaagaaatgtagattacaaagatccctgaacttgggccgatgaggtcactttcaaagtgagtcactggggtagactgtcctgagaagtttgttgacaagaagaattgcatggaagggcatgagttattaaagaaagctctttggttagaggagtaaggagttattgttggtgtttgtagaataaggtaatcctaaacatgtttataagcaaagaaccaaggttaatatcaaatgagtaaagtgaagcattaagaagtgaggtcactgatgagtgatgaagctggtaggagtggcctcagccctacaaggaaagaactggccttagaaagggagcggaagggaaagggaagcagcctggcctctgaagacagaaaggaagtcattaaaatgtggaggatgattaagatgtaagggaggaagctgagggagctcacatctgcctgactcgatttcagcaaatcaaaattctagatgcagaaggaagcttcaagaaacatgtcagtgattcttgaacttctttgatcacatcccacctccccaacctgctcccactttctagtgagagttaaaaaaggattagagaggagaaaaatgaaaataagaccaaattttagtaacccttgatagttcacctaatagtggtaaacagccctctgtaggacttaaagatagacatttttgaaatggaaacgtattttttccctaagaactggagaaacggctttcatccctagagcagttactggccctccttactggagaacctccaggcatgcccagcagtaggccacagccacagtgagactctctgatctctcctgccccatctccttctgcctcacagctgagggaagtgaagtcgagggagatttttccacaattacttgttacagcctgttagcagtgggccctggactaaacctaggtttcttggctccacgttcagggctggttcctcttcatcaatagagatgaagtcatcagcagaaagttcacaggcaggggaagacctaagaggtggggaatgtttaacctgctgctatagaggagggaatgcatgtttgagaggtcaagaaggaaagccctattgggaggagggctatttgaggtcaattgcctggttgggacccagaagcatctgctggtagtttcctaaagctaaaatgacaagagttcaaaggggcatcagattctaggaaacacctgaggatgtcccagaaatgactggtcagtcaaatcagggaggactggtagttttggagaaagcaaatagactaagtgaccataggttaaaagaagggcaagggctgggcatggtggctcatgcccgtaatcccagtactttgggaggccgaggcaggcagatcgcctgaggtcaggagttcaaaaccagcctggccaacatggtgaaaccctatctctactaaaaatacaaaaattaactgagcatggtggtgggcgcctgtaatcccagctactcgggaggctgagacagaagaatcgcttgaaccccagaggcgaaggttgcagtgagccgagatcgtgccattgcactccagcctgggtgacatagcgagactccatctcaaacaaaacaaaacaacaacaacaaaaaaaacaaaacaagggcaagaatgggttctgtaagagtggagaggggatggtaaggaatggtgaccaaagggttgttgagaatcctcagcagtcaattccaagttgactcctacattattggaacagggagcttgttgaaaatacaaattttcttgccttgcattagaccagctgaaggagagtccctgggagtgaggctcagaaagctgtatttttaacaagctcattaagggtgactaaggcagattttactccactgaggttaaaagataacttattgggagtcttttgcagctttgttgccttatccaggtttcctacttttattgcctatctgattccccattaggtgagcaacagatacccctgatagcctagacatcccgtgaggctgttttcagggatgcaggggaaggcacgcaagagaaaagctcaaaggctgtgtcttccatcctgtttcattagttttagtgcaagaaggaagggtgagaccctggaaaaatggtgtggcagctaagggagcaggtgaattaatctctggactgtgtgaaaaaaactcagggaaatgtcagaaacactcatggaggatctggaagggttgttagagagttatttgtggaaggagtcccattagtgaaaaaatcatttgaggagcaaagaggaagcacaactctgcctttctccctgattgaaggaagcaggaggagtggctaaatgggaataggaccatctggaagaagctaggattccattaaaggggtacagtgggtagggttgttctccttggaatcagatgtcccgaggctatggaaggagagactagtctggagtggactttgaaaggtctggagccgagttagagagaggtaaattgaggaggtgcctgcagggaaggttttttgcttcatcacagaaaataaaggagtctggggacttggcggtgcggcacacaaagagtgtaggcttgagcgtcacacaggttcacaccctggctctgccagtcgctagctgtaggaccttaggctgggaaggtaatctctctgagcccagcttcctcattggattcccacgtgaagagatttttcagagaactagttagcttatgtaaagtaaattacatgtataaggctgggcattccagtatgtgtgttggtggtggccagaagagggagctagggagaggcatctctgcagagggagagggcagtgctgagcctgtggacctgtcttcagggaggctccaggtgatcagctggcatgaaggtgtagctgctgggggagctgctgcaagtttgcctctgatttcttccaggctaggctgtgactcacactgagggttggagctccggacatttctggggactctgttacaaccacttcctgttgtgctggaagtttcatactggaatcactgagcagcccactggatgacccctttgctgctggccttggcaaaccctacaccctatgtggctgtgttcaggatgccagctttctgcccccttctactgtacgtggccctgctgttttaggggtggccacagggcccagggaagcaaggaggaactgagaatgccaggctggggcctaacctcgttcacactgaggctggcacttcctgcacttaacgtacaggcacacgtccaacacgcgtggataggcagagcccttaggaaacatgaggcactcagccacaactaccccaaaatagaaaagcacaaacaaaaacaacgaaatgcttttgtttttaatttgtactcactgcgggttgtatgcctcagaccagccccacctaaggggctggagtgacatttttatggatcccttgcactactttttttatatgattttctttgccataaaaggaaatagtatttctcatctcccttccctgcttccaccccacccctgagaaattcccctacttagggacaatctcaatacttaataaggcgggaagagtagaaaggactcactggaatctacttgagctttttgcacgcccttgccttcttcccacaaactttcttccacccagggttggcatgccagctagaaatactcttccatgcaattgccaagtaattctgcccattatcttcagtatcatgcccttccctttttccttcactctgagcagatgcccccagcccctgactcacagcatcctctaagtccttcgcatctggaccttctgtttctggcctttggcttctagttttattggcctatggcccacttattcattgtatgctagtatccatgaatctacctatgcattttgggtgaccttaggaatgggcaagatgatgaaatgattttgaggctaggaagtcaagttttaagaatatactttactggggtacaaaagttgcagtcttgaagataatttaattccagctcctcgccagggggacagttaatttactacccccttaacccttactcccatgcaaaataggtgagaatggacaagagaagctggcctcttgcaaggcccctaggtggaaagaagtgaagtgggaggtgtggggcttgccctggctgagggcctgcatttctccttctttccctgcagccctggcccgccaccgctacatgaagcaggcccaggccctaggtcctcagatgatgggaaaacccctgtactggggggcggacaggagctcccaggtttcatcttatccaatgcacccgctgctgcagcgaggtaaactcttccagagatttgggataggggagggcagagggcaagggcgggaacatgggctacatcaagacctctgtgaccgatgcggcaggcatcttcatgatggagatgggagggattcatgctaaccaatgtcacattttgatgtcctgattctgaggtgtatgttttgggccatttgttctattgtcctgtccttgtttccattcagatttgtccctgccgtccagcctcccgcagatgccaatgacccagaccaccaatcagcctcccatcgccaatggtgtcctggagtatttggagaaagaactgcggaacctcaacctggcccagcctctgccccctgacctcaaaggcagatttggccatccctgcagcatgctgtcctccctgggctctgaggtcgtggaacgcagaatcatccacctgcccccactgatcagagacctgtcatcctcaaggaggaccagtgactccctgcaccagcagtggctcaccccaattccctccaggccctgggatctgagggaggggagaagccaccaccattaccctgatttccaccaggagctccaggaccgggggccaaagtcttgggcattggaaagaagggagttggacccatcgtggagtggaaggcaccgtagctctaggctgaatgggtcacccatacactggtcagacagggacagcctaagcgatgtcccctcatccagtgaggcacgctggcggccgagccaccctcctttcaggagccgctgtcaggagaggccccgcaggcccagcccccgggagagcactcagaggcacgggagacgacgcaggcaccgcagctactctcctcccttgccctccggcctcagttcctggagctctgaagaggacaaggagaggcagccccagagctggcgggcccaccgccgcggctcgcactccccacactggcccgaggagaagccgcctagctaccgctcacttgatatcactccaggcaagaatagcaggaaaaaagggagtgtggagaggcgctcggtgagcctggggcatcctgctgagggttgggcatgggcagagaggagcctccagccaggcatgaccacagccaacacaggctgcctctcattccaccacagagggtgcctcctccctgttttgcccaaattacactgtgggctaggtggactacctcttgtcagagctaaagaaatcaagcgagtgcagagggcaggggagagttcgctgcctgtgaagggccttctcaccgtcgcttcggctgtcatcgcagtcctgtggggtaggccaagcgaggtcacaggagaaaatgaggctcagcatgattaagcaccttgcaagccatgagctaggacttgaatgcaggctgttgtggctagagcctcaccttccttcacagctgctttgctttctttacttagcaacccatttccataccccaaattagaacactgggcctgacagaagacacttgttaagtcagcattgcaaggccctggtatatatgaggttgggaccctctgagacatcccctggaaaggaccattaaactgatttttaaaaccctgatattccatatatgggccaaaacattaagattctgtgaataggcaagatgccaatgggtgccagacatagttaaaaggggaacacagaaggaagtaggcctttagggcccctagaaacagatcttttgtatttttttaaagaagtgactttaaaaattatttggggctgggtgtggtggttcatgcctgtaatcccagcactttgggaggccgaggcgggtggatcacctgaggtcaggagttcaagaccagcctggccaacatggtgaaactgtgtctctactaaaaatacaaaaaattagctgggtgtggtggcgggtgcctgtaatccaagttactcaggaggctgaggcaagagaatcacttgaatctgggaagaggaggttgcagtgagctgagatcgtgccattgcactccagcctgggtgacaagagcaaaactctgtctcaaaaaaaaaatttataattaatacatccaaatgacagcagtcctttaatgttgccactttgcaaagatatgttgccattgctcaaaaacattaataaactgcctcagagccaacttacaggctacccatgaagatcttttctctatttgaccaaaatccttttctcttttgcttctgttgagatagtcaaaggtatatgcagtaactctgaaataagttcccggagcagagagatattataaaagaagaagtgtagtctgtcacaggctttgaaggatacaactctcatttggaagtacatgttctgctgtgagttttttaaaaactcaatcacatacatggtgtgtgcaaaggagcaggcctcttaggagagccacactgctgctctttctagagcagagccttggtgagagagtgatttgtgaggaaggtagcaaagaccagcagacatttctgtaataattaatggcaattatgtcatcttctcacagatgtcccttgagtgacaaggatcaacaaaatagtgaaaatagctaccccttgctaagcggtactgagttatagacatcttatataacatcttacttaatcctcacaacaaccctgtgtgttttgtactattatcctcatttacagatgatacaactatttcttccgtgttaccagtaagaaaattacgtcctgaaagaaaacacaatcacacttcctttactcatgtagtgactaaaccaggtctcttcattataacaacaacaacaaaaaaagttaagatccagttttgggccccaaatctacatgctatcttcttctaagttaaattattttcttttcattttctgtaagttaaattatgtgacttcttgtaagtgagaaaagggtgaggaacaccagttacattccagacactggataagccctttaagccctttccaggctttcttttttttttctttttgagacagagtctcgttctgtcaccaggctggagggcagtggtgcaatctcggctctctgcaacctctgcctccccagttcaagcgattctccagcctcagcctcgtgattagctgggactacaggcatatgccagcacacccagctaacttttgtgtttttagtacagatggggtttcaccatgttggccgggatggtctcgatctcttgacctcgtgatctgcccgcctcgacctcccaaagtgctgggattacaggcatgagccactgtgcctggcctccaagctttatttcatttaatcctcacaactatgggagcctctgagaggttgagtagcatgctcaaagccacacagccaatagggagtgaagcttaggtttgaattgcgctttgattctcaagcctgtgccctttcaataattcatgctgcctccttagagagaagtatagtcaagtgcagtggcatgtacccgtagtcccagctactcaggagtataggaggatcacttgagcccaggttctaggctcagtgagccatgattgcaccactgcactccagcctgagcacagaatgcgaccttgactcagaaaaaaaaggaagagagaaagagattatcatttggagtcaatgatatcttctggtgactttatttcttcctaattttctgaaaatatcacagcttcctttaccacctaccacaaccaaaccaaattttcaattgtaaagttactcccaagaagcaaagattttgtacaagaaattgtaaaagcctccattgtttggaatctctttgagcttatctcccaaggagttatcactttacttatcacattcaactttccattcatattctgacagtgagcagaggcccaggatcaaagcttgatttggcagattgctcagtttgaaggcactgtgtttagtttgttttgtttgtaactggaattttgaatgcatttactgaggcaaagtctgcagggccaaagtcttgctgttccctcctctccttggggctggctgctgcttcttacacaggctgccttcctagcctctggagtcattggagcttgtagtgaaacatcctaatacaattgggcctctagatggtgaccttccatcatgcagcactggaagttcctgtttactgcttgagttgataagatgtatcactattttcctaaagcaggctttcagcagctacagctttaccataactttttataaaatgcttatttaaaatacttcatttggcatttagagaaacataaatggaacaactttttttgttgttgttcatgtggaaccttctctctcaagagtaatatttgacaaatagatattgacaaacaagggcttccatgcagatgatttcatggtaacctgaaatagataggaacgatatgttacacagtgcccatgagaaaatggaggttatattgagggatcttccacccaacttcagaaccaggattccagccaagatcttctcaattcaggtctggtggcgttttcactccactgaagctataacctcagaaatataaggggcaaaaacttcaagcttttaccttcagtgagtacagacttgagtggcccaggctcctggactccttccaatgaattatctttccttctaatcttgtcctaagacattctcaaggtatttctggcttcttccaaacttggccggtatacacctgttctaatacaagagaaaaccactgtgttctttcttctccaagctaaattcaaactttctaaagagaatcccagcttttttcttgactttttgatttaatgtttaaaaagttttatgtcggcattcttaatctcctactttcaacaaaatgtctactccttgatcatgtctaggttttcttttagcaaacttggacaagttccttttaccacatttcattgttttccgttatgtcagagaacatttatcctgcagtattttgattagaaatcatgacccctaaaactcactttcctgataaattggaaacttttttttatagcaacatgaatgtacatacatatgtgatcccttttgagcagtatattttaggacagatacttcgttttcttatttcaaataagatgaggaaggttacattcatggaccacaagtataagtattcaaaacttaaataaaatgatcccctaccgtagctagaaaaatatgagaaatgtaaaccacagttcttcaccctcaccgaggaagtggaaaaagcccaaagaccaagtagagtggaataacttctgaaaaaaagccactgagtttggtcaggaagaagtaattagtgatctctgaaatacaacttcagagaaatactaaggtttgaagccaaactttttagaaaagggctgggaaggaatgattcaggagattataaaaaggaaaaagagaactgagcaatgtcttcatgaatgaatgggagagagatggactgaagaatggaacagggtacccctttttcagtctaagggagacttgaaggtattagaaaacagagcaagaggcagagtgaattagactggaagaaattttcagaaattaaaggtatttgagggagtctctagagaggtaagcaagaaaaacctaagcctggggagagagattggtttcatgaagagtaaagaaatactttttaggttcagatctgctgtcctggcagccaccacccacttaggatttgtaaatcaagagcacattatgtgttacatgcatagacggattgcactgactggattttttttgtgtgtgtattcttctatttcccaggagaaagacagctctcatagtggaaggagtgtggtcatttagtcaccaagcacagcacaacttctgtggctacttctcggctcctgtgtgtcatcagcatcacctaggtttccagctgacttgggaactgcaagtctgagtctaacagtttttggcttagattctgagaatcaaatagaagaattttaaatacaagagtttgagattgggtatagtggctcacacctgtaatcacagcactttgggaggctaagaatcacttgagactaggagttcaagatcagcctgggaaacatagtgagaccccgtctctacaaaaaatataaaaattagttaggtgtggtggcatgcacttgtagtcccagctactcaagaggctgaggcagaaggatcccttgagcccaggagtgcaaggctgcaatgagccaggatcccatgatcacacatctgtattccagcctgggcaatagagcaagtccccattactaaaaaacccaaaaggccaaaaaacaaaaaagttagagttcgaggaattaccaactgtagttttagccttggttcatgctctcttgcatatttatataatctctgacttgtaatggaccctgactggaatgtgatccctcaggaacttagtagcctgagtctttcagtagactacactgcccagaaccctggccattctcaaaatgagaacttgggaatgtttaagaagaaatcaaacatgtttcaggaaaaggaaatctatggagtattatagggacattcccatgggaatgtatcttcctccatggcatgtcttgagggtcctttcttgttaggagtttatcctgccagcccataaatggactatttattgtaagtgtagaaaatcacagagaagcagttttgcaccagccttattcctgtgccttgttttcctcttgctctttttttacctgtatatctaatttatattttcatatatattgtgtattgattgaagtcactttaaatccttcttgggaatgacacagtatataaataaggaagaaagaaaacatgccaagctgagcatgctgctccaaataaatatctgctttccta

SEQ ID NO: 35 - DNA, 26215 bp, Homo sapiens
gccgggtttgggggttgggacctccggctgcaggtccgcctgggccagacgcgcgagcgcaagcagcgggttagtggtcgcgcgcccgacctccgcagtcccagccgagccgcgacccttccggccgtccccaccccacctcgccgccatgcgcctccgccgcctagcgctgttcccgggtgtggcgctgcttcttgccgcggcccgcctcgccgctgcctccgacgtgctagaactcacggacgacaacttcgagagtcgcatctccgacacgggctctgcgggcctcatgctcgtcgagttcttcgccccctggtgagtccattctgccgaggcgggggaagaaaggcggggctgggccgggggcgagagcgcggggaactgttgggcctacgcagcgccggggcccttcattcctgtgggcccctgctgcggcgggcacatttctcattcccgggagctggaggcgcctcgccgagagcgggggagtcggtgctgatcggcccaaggaaaacccgaaggctgcgctcacgcagggcctcatccttatctcggtgctcttgtggcacttcctatttgcagagggttttgccaccccttcccccagtccaatatgtagctatatcttttctgcgtgagtcagtattaatgctcctccagtctacagactaggcatcccaaagccttgtagtggaagcggacgtttcaccaaatgcagaagtcctggatccctagggtatttcctttcatcttacctcacgccgcacagccattggtttctagccaaggtcactgagtggctgcagaatggtcgtaagtgctttcttgaggcaggtaatttgtccgtcacatggtgtacagtttctcccttcagctgatcacttacatctcagtaccggcagatacctctgtccaaacgaaaggagtacgtgaacaagaataattccatcagaatctgtccatattgtctgttttaaatagcatttctttaaaatgtcaaaaaagactccaatgagaaaataaccaatattgattacatactccactttagggtgacttaagtgatcaagggtgtaaattccttagatagaactaactcgaaataaaaaactgttggggagaaggaagagcaaataagatttctggcccagtcaacttgagtgtttgttttttttttttatttgtgtgtgtgtgtgtttttaaacctccagatcattaccagagtaaacagtgattcctttatcctggggatagctctctatatataattcaatatatataattacagtacttaatttttcccctcctggcacagtgacccttggtttaatactatccgtgttcaaaaatgtcagtaaaagttgtgtataacttttatttgcttcagactcaggtcttcccttcttagcctcaaacaacttgctaagggttacacgaaaaaagtcctgtagtaaagaccacctgaatcagaatgatgtgctagagatggcaaattttgtttgcagcttggacagattttgtgtccagggcatttctggggctaactggcagtacagattacacatatagatagttcttatacatctctggaactcatgttctctcttaggaacaactcttcccaattatataatcatgctgttagctttgagggggtgtcaataatttgtaaaaactgggggtgtcactaagtttgtcagatctgagtgatgctttttactacaggggtcatgcaacaatttaaagtaggaattgttggagaatagtgggccactagaatattagtttaaaaaaggaattttggggctgggcatggtggctcccgcctgtaatcccagcactttgggaggccgaggcaggcggatcacctgaggtcgggagttcaagaccagtctgaccatcatggagaaacccccgtctctactaaaaatacgaaattagccgggcatagtggcacatgcctgtaatcccagctactcaggaagctgaggcaggagaatagcttgaacccaggaagcagaggctgcagtgagccacgatcctgccattgcactccagcctgggcaacaagagcgaaactctgtctcaaaaaaaaaaaccagaattttttatttgaattgaagggggtgtttcctactttaaattgttacacgtgctaccctaaaaactacatatcccatcaggcactgactgtcccaagaattgggtggatctctgctgtggtgtctgcttttaattggtttaaaagaaaaagtcatcctccacaatttcagcaagaaagatgagttttctgaatgagcaatttggagttaaagaagtctcctgttgaggtctttatttcttcacattccactacattttttttgtgtgtgtgtttgtgtatttttttttttttgagatggagtctcgctttgttgcccaggctagagtgccatggcactatcttgactcactgcaacctccgcctcttgggttcaagtgattcccctgcctcagcctcccgagtagctgggattacaggtgcctgccacaatgcccagctaatttttttgtatttttaatagagacagggtttcaccatgttggccaggctggtctcgaactcctgacttcaggtgatctgcccaccttggcctcccaaaatgctgggattactggcatgagccactgcacccagcctgtttttttgtttttgttttgttttgttttgttttgtttttgagacagagtcttgctctgttacccaggctggagtgcagtggcatggtctgggctcactgcaacctccgcctcccgtgttcaagtgattctcctgcctcagcctcctgagtagctgggattacaggcacgcaccaccaagcccggctaatttttgtattttagtagagacggggtttcaccatgttagcctgatggtgaactcctgacctcaggagatccaccctcctcggcctcccaaagtgctgggattacaggcgtgcgccacctagcctggcctctgtatttttatttattaacatttcagctggaaatgttttctgactgctatattcctttgtacagttcagtagtactatcttacaagaaacagttaaaaaatccttagtaagagtaaaatggggtctggccctgttgtgcattcctgtaatcccagcagtttgggaggccaaggcaggcagatcacttgagatcaggagttcagaccagcctggccaacatggggaaaccccatctctactaaaaatacaaaaattagctggacgtggtggcgcacatctgtaatcccagctatttgggaggctgagttgggaaaatcacttgaacccaggaggcagtggcgaggtaagagaccagcctgggcagcatggccagaccccatctctactaaaaaatgacaaaaattaaccgggcatggtagcacacgcctgtagtcctagctactcaggaggctgaggtgggaggagaagatcacttgagcctgggaggtggaggttgcaggaagctgagattgcaccattgcactccagcctaaatgacagtgtgagaccatctcaaaaaagaaagtaaaatgggcttttttttttttaaccttattctcgtcacaaaatagacctatttaagcaaattctttttccgctttcatgtttcaagtgaaagtgaaaggtgaaagcttgctttgcttgctttttttttttttgagacagtctctctctgttgccaaggctggagtgcagtggcgcgatcccggctctgcaacctccgcctcccctgtctggctaatttttttttttttttttttttttaagtagagaccaggtttcaccatgttggccaggctggtcttgaactcctgacttcacctgaatcacctgcgttggactcccaaagtgctgggatttcaggcgtgagccaccgtgcctggcttagtgaaagctttctttgcagttgattttgtagactaatatttccattatggagttaatctgctatatatttttaaggataagagtatctgaatttctctggggaaataacactatttaaatgtttggaaatgtccgaaaatttattgattagtgttaatatgtaatattaagtccttggccgggcacggtggctcacgcctgtaatcccagcactttgggaggtcaaggcgggtggatcacgaggtcaagagatcgagaccatcctggccaacatggtgaaaccccgtctctactaaaaatacaaaaagttagctgggcgtggtagcaggtgcctgtagtcccagctactcgggaggctgaggcaggagaatggtgtgaacccaggaggtggagcttgcagtaagccaagatcacgccactgcactccagcctgggcgacagcgagactccttctcaaaaaaaaaaaaagtcctcaacatctatttatgctatagatgtgtatgctaccctctaagacagtagtaataaataatggctgggtgcaaaggctcacgcctgtaatcccagcactttgggaggccaaggtgggcagatcacgaggttcaggagtttgagactagcctggccaacatggggaaaccttgtctctactaaaaatacaaaaattggctaggcacggtggcaggagcctgtaatcccagctactcaggaggctgaggcaggagaattgcttgaacctgggaggtgcaggttgcagtgagctgagatcatgccactggactccagcctgagtgacagagcaagactccgtctcgaaaaaaaaaaaaaaaataatatatgtgctaatttctttacttgtaatccccaccccgagttgatcttttcaacatcaacatttagctcatattttttttttccttccctggacaactaactggttgatcctgcctctctattggcatctaataatactgtgtcacccctgccagactggtgttcctataaggaaaggactataccaattttcttatcaaagacacttgataaggcacttatcaaaaagtacttgacgcatggcacacatgatgaagtgatgattatgggtgaatatatgttggaattcattatcaactgccaggtgccatccctgaggatagatagaattaattgtgttttaatattttctaggggtgggtgaaagaagtagtggttaatcttgaaggatgtatgttaaccaaccctgatttcccttaaataccacctgagttccattcctgctggatttgaagaggagagtctcctccagcctcattgaaactctttttgtggatttgatgaccttatggatattgccaaagtttaaggcagtggattttagtcccagccttgcagcttacacacacacctggttgctccccagatttctggagattctcattcagtaagccatgcatacttttgttgttttaatgctctgtgggtatttttgataagcatctagagttgacacctactggcttgacctagtaactattgtatgtgatttttttctcttaaaatgtttgaagatagttgaaacaattaactcataaatctgttgcctcagccttgacaactactatatattcaacagaaatctctcatctgtctcttctttattctcattgctgccattccggtccaagcttttattgtctgccatgtgaaatatattatcttctagatggctttactcttgtctctattttctccctttctgtcagtctttgacattgctgattgacgtagtcttagtacacgtgcacgcacatttattatctcacaaaagccctttacagttctctgaatgcatcatgcttactggtattcttttacgtttgctctactatctccctcatcttaaataccctgccctcttctctctgaagcgttaaatccttaaagacccagatccaattgttactccctttaaaatccatttactatgcagtattaaaggaatacagaggatataatgaataagaccctatttcacacacataagataccactgattgtgagaggaactatcttgtgtctcactgagaaagaaatactaccactgaaactataacatgactgcaaaatacatcttaatatcaggaaaaaacaatgaatctgaaatacagcataaggaatagcatttgtttgcactcagtctgaaaaacatagccagtacatttgaagtcccctatgtgcccctttaccatcttatacactcctttatcttgaatttggtatttatcatttggttcttttatactttaataggccgcctgaaggccttggagaataagctgttataatcctttattttaaacaagttttaggtgtacaatatttccaagttatccatcacttgataaaattacaccattgactattgaaatatatctgctcaagtttcttctctattatatttctatttttgctgtctacgggaaggttacagaactcaccttctcaacgtgatccctctgcaaccctttggcttttgaaaaggtgatgtacagctggtgctagctgtatatacactgattaggattttctgggcagaggagccggtgcttctggtggccctctgggaaaggtattctagtttacatgttttgttatcacttctcatggctaggtgaactatgtagctgtaaaaatcaggcctgccatctaaaagacttaatatcatacttgagacattacagggtttcagtcacaattttgtgtccccacccccaccccgagacagagtcttattctgtcacccaggctggagtgcagtggcgcgatgtcagctcactgcaacctccacctcccaggttcaagcaattctcctgcctcagcctcccgattagctttgattacaggtgcccaccaccacgcctggctaatttttgtattgtcagtagagacggggtttcactattttggccaggctggtcttgaactcctgacctcgagtgatctactcgccttggcctcccaaagtgctgggattacaggtgtgagcttcagtcactatttttaacaaccacaatgctggtttcccagggaattgtattttcctctggggaattctatcagaaatgggattatttctattttgtccttcattcagcctcattaattggtcaaaagggcattaacccattcaaccctctttaataatgtggcgtacacctttgactacagctttcacaacttagttatactttgtattgagaaaatagagctgccctgtgctgagccagtactatggagtcaacctcagtctaggggtaggacctttacctcttgagagttctggtttactttaacaataatgaatgttgttcatgtgatgattttgctttttggaagtgtctactagctcaaaggtagtattatagtttgagattcttcctagtgagacaacattaacaaattcataggactaaactgagaatttggcttttttaatacgtatataggtgtggacactgcaagagacttgcacctgagtatgaagctgcagctaccagattaaaaggaatagtcccattagcaaaggtaagtacaggtggattcttcactaaaggacgtgaagtattttaaaaagtagtttgttgtctcagctttgttacatggaaaaaaataacagtaataaatagtttgtaagattaacattcattttctctactcttattctgctaagaagagcgaatactagtttctgggcaaatacacaactgacttgtagtttcaaaagattaaaagtagtggctgggcgcaatggctcatgcctgtaatcccagcactttgggaggccgaggtgggtggatcacgaagtcaagagattgagaccatcctagccaacacggtgaaaccctgtctcaactaaaaatacaaaaattagctgggtgtgatggcacgtgcctgtagtcccagctactcaggagactgaggcaggagaattgcttgaacccaggagatgaaggtttcagtgagccgagatcgggccactgcactccagcctggtgacagagcaagactccgtctcaaaaaaaaaaaaaaaaaaaaattaaaagtagtgagagtaaggaaattactggcataagaagtaaaatagaccaggtatggtgcctcacagctgtaattccagcactttgggatgattacttgaggccaggagtttgttgcctgggcaacaaagcaagacctcatctctacaaaaaatttaaaaagctgggtgtgttggctcacacctgtagtcccagcttctcaaaaggctgaagcaggaggattgcttgaggctgcagtgactagacactgcacactactagactccagcctaggtgacagagtaagaccctgtctcttaaaaaaaaaaaaaaaagtgtaatcccagtactttgggaggccaaggcaagtagatcacttgagaccagcctgggcaacatggcaaaattccatctctactaaagatacaggcaggcttccatagtcccagctactcagaggctgaggtggaaggattgcttaagccagagaggttgaggctgcactgagctgtgattgaaccattgcactctagcctgggcaatagagcgaaaccctgtctcaaaaaaaaaaaaagtagtaaagtatatggtaaataagaattaaagatggaaagcagaagtacagctataaaggttaaaataatcattgaggctgggcacggtggctcacgcctgtaatcccagcactttgacaggctgaggagggcggatcacctgaggtcaagagttcgagacccgcctggccaacatggtgaaaccccatctctactaaaaaatataaaaattagccatgtgtggtggcaggtgcctgtaatcccagctacttggaaggctgagacaggacaatcgcttgaacccaggggggcggaggttgcagtgagctgagatcatggcactgtactccagcctgggcgacagagcaagactccatctcaaaaaataataataatctacaagtaaatgagttccctaaactgctatgtgataatcacaatgatggtaatacgaaaatgatatgaggatattgatgaaaatgtaaccaaatggtcaactgtaaacttggtatttgtttttacaattaaagtaatgcttccagaatgttgccattctgtagtaaacccatagttgttctagtctaaaagctcttacctctgccaaatagttcatatataaggctatttttggaaattacttttaatcttatcaagcagcttgccataggaaaaaaatttaatcatagccaggcgctgtggctcacgcctgtaatcccagcactttgggaggccaaggcgggtggatctcctgaggtctggagttcaagaccagcctggccaacatggtgaaaccccgtctctactaaaaatacaaaaattagccaggtgtggtggccggtgcctgcaatcccagctactcgggaggctgaggcaggagaatggcttgaacctgtgtggtagaggttgcagtgagctgagttcgtgccattgcactccagcctgggcaacaagagtgaaactccgtctcaaaaaaaaaaaaaaaaattcaatcacaattcctacctgtgtgactatagacacattaattaattttctggatcttagtttacccatcttagagcataaggatcatacttcataatcttatggagattaaatgagataatatatgcaaagtacttgtgcctgggttggagtaagtggctcgttccgggaaattattttccttcttcctgataggtctcactagatcggttatgttatggtatagcccagattcaaactagttcagggtacgtgtacaggtgttggtacctttgataatagctctagatgatttgcaaaatcaaattacattacacctaaaggatatgtaccaccatcgatatatccccttggtgatagtcgtaatcaaagtaagccactgttaataatttaagtgatttatccctcatgtgttctgaggcagaaaaaagatgaagaccaccgctttagctaatagagactacaagggcagaatttaaacaggaactttgcattttatgtgaggcctaggaatctcaattttaaagaattccttaggcagttctgatgtagttaggcaagctccagtctgcctttaaaatctaatgttctgtggcatatatgccaagaattccttgatccccttaggatttgaccaatcctagtattttgagaatataggaagaacctgcagcagaaacttggataagaaaatagtttgtgtattttgatctttaggttgattgcactgccaacactaacacctgtaataaatatggagtcagtggatatccaaccctgaagatatttagagatggtgaagaagcaggtgcttatgatggacctaggactgctggtaaggatcctgaattacattctggaaactgatgttaagtaccttattctttgtagtggaaacataaaaatgtgtttttctacacagtatactttcagtcttaaaacttcctcatctaagaggtcagtttggtggtaacaaaagacctctctaaatgaacagattatataagtaatatagaaaatacacaaacttgatttataaggtcagctcgacattttttcattttacaaatatttattgagtaattactgtgtgccagatattctaaatatactaggtcgttggcatttattgataaaatagacaaggtccctactcttgtgaagcttacattctgggggatgagggggagaaggcaacaaacaagttttaaaaatatagatgagctgggtgcagtggcacgtacctatagttttagctactcgggaggctgaggtgagagactgtcttgagcacagcctgggcaatataagtttgtccccatctccaataaaaagtttgggccggggccgggtgcggtggctcacgcctgtaatcccagcactttgggaggccgaggcaggtggatcacgaggtcaggagatcgagaccatcctggctaacacagtgaaaccccatctctaccaaaaatacaaaaaattagccgggcgtggtggcgggcgcctgtagtcctagctgctcgggaggctgaggcaggagaatggggtgaacctgggaggcggagcttgcagtgagccgagatcgcgccactgcactccaacatgggcgacagagcgagactccgtctcaaaaaaaaaaaaaaaagtgtgggccaggcacagtggctcacacctataatcccagcactttgggaggctgaggtgggcagatcacgaggtcaggaatttgaggccagcctggccagcatggtgaaaccccatttctgctaaaaatagaaaaaattagcactgggcgtggtggcacatgcctgtaatcccagctactcaggaggctgaggcaggagaatcacttgaacccaggaggcggaggttgcagtgagccaagattgtgtcacagcactccagcctgggcaacagagcgagactccatctccacacacacaaaggtatgtgtgttatctccatgtatatatggataaccatctcatacccattaggatggctactatttaaaaaaaaaaaaacaacgaaataggccgggcgcggtggctcacgcctgtaatcctagcactttgggaggctggcggatcacctgaggtcgggagttcgagaccagcctgaccaacatggggaaaccctgtcactactaaaaatacaaaattagccaggagtggtggtacatgcctgtaatcccagctactcgggaggctgaggcaggagaatcgcttgaacctgggaggcggggttgcggtgagccaagatcatgccattgtactccagcctgggcaacaagaaggaaactccgtctcaaaacaacaacaacaacaaaatagccaatgttggtatggatgtagagaaattggaaactttgtgcactattaggaatgtaaaatgggacaaccactatggaaaacacagtatgttggttcctttaaaaattaaaaatagggccaggcctggtggctcatgcctataatcccagcactttgggaggccaaggcaggcagatcatttgagatcaggagtttgaggccagccaggacaatgtggtgaaaccgtctctctactaaaaatacaaaaattagctgggtgtgatgcgcatacctgtaatcccagctacctgggaggctgaggcaggaggatcacttgagcccgggaggcagaggttgtagtgagtcgagatcgggccactgcactccagcctggggaacaacgcaagactccgtctcaaaaaaaaaaaaagattgaaaaaattaaaaatagaaggccaggcacggtagctcatgactgtaatcccagctctttgggaggccaaggtaggctgatcacttgaggtcaggagttctagaccagcctggccaacatggtgaaaccatgtctccaccaaaaaatacaaaaattagctgggcgtggtggtgcacacgtgtagtcctagctacttgagaggctaaggcaggagactcgcttgaacctggaaggtggaggttgcagcgagctgagatcacaccactgcactccagcctgggtgacagtgagaccctgtctcaaaaaaaaaaataaaaatgaaaataaaattactaggccaggcgtggtggctcacgtctgtaatcccagcactttgggaggctgaggcaggcggatcacaaggtcaggagagcgagaccatcctggctaacacattgaaaccccgtctctactaaaaatacaaaaaattagccgggtgcagtggcgggtgcctgtagttccagctactcgggaggctgaggcaggagaatggcgtgaaccctggaggcggagcttgcagtaagcggagatagcaccactgcagtctggcctgggcgaaagagtgagactctgtctcaaaaataagtaaataaataaataaaattaccatatatatgatccagcttctgtatgcccacttctgagtatacatttagttctcacttaatgttgtctatagattcttggaagctgtgacttttaagtgaaacaacctataacaaaacttgtttttttttttcctcatcaatgttacaggaaacagtgttattctaggacttgctatgcattctttctcttgaagttgcagtttctgagaacatatgaataatattgaggacttattgtatacccaaaagaagatagttgtacacctatatccacagcagcattattcatagtagccaaaaggtagaagtaacccaagtatcttatcagtgaatgaatagtaaacaaaatacggtatatgcatccagtggaagattattcagccttaaagaagaaaattctgactacatgctgctatatgattccacttacatgaggtagcacaaatagtatacaaaattgtatgtttaaaaatggttaacaagggccaggcatggtggctcacgcctgtaatcccagcactttgggaggtcgaggtgggcagatcacgaggtcaggagttcaagaccagcctgaccagccaacatagtgaaaccccgtctgtactaaaaatacaaaaaattagccgggcgtggtggcaggagcctgtaattccagctactcgggaggctgaggcaggagaattgcttgaacccaggaggcggatgttgcagtgagccaatgttgcaatcgcgccattgcactccagcctgggtgacaagagtgaaactccatctcaaacaaacaaaaaaatggtttaacaaggctcatgcctgaaatcccagcactttgggaagctgaggcaggtggtttgcttgagcctaggagttggaggccatcctgggcaacatagtgagaccccgtctttataaaaatacaaaaaactagccaggtgggatggtgcatgcctgtagacccagctactcaggagactgaggcgagaggtctgattgaccctgggaggtcgaggctgcagtgagcaatgatcatgccgctggaccccagcctgggtgacagaaggagaccctgtctcaaaaaaaaaataaagaaaagaaaaaaaagattggaaacaaatgtccatcagttttgcaattgtgtctgcttaaataaactgtggcacatttatagtgaaacactatgcattgtaaacaatgtttctgttaaaaaaaaaacttttttttttttttttgagacagagtctcactctgtcacccaggctggagtgcagtggcacgacctcggctcactgcaagctccgcctcccgggttcacaccattctcctgcctcagcctcccgagtagctcgggaccacaggcgcccgccaccatgcccggctaatttttttggtatttttagtggagacggggtttcaccgtgttagccaggatggtctcgatctcctgacctcgtgatctgcccgcctcggcctcccaaagtgctgtgattacaggcgtgagccacagcacccggccaaaaaaactttttaataataataaaaaacgctatgccactgtaataaaaggttgaggtagctatgtatatataattgcctgtttatgcagaaaatgtctggaaggatatacaagcaactgaaatcttggctgggtgtggtggctcacgcctgtaatcccagcactttgggaggccaaggtaggtggatcaaaggtcaggagatcgagaccatcctgtctaacatggtgaaaccccgtctctactaaaaaaatacaaaaaaaagtagccgggcatggtggtgggcacctgtagtcccagctactcaggaggctgaggtaggagaatggcatgaacacaggaggcagagcttgcagtgagctgagattgtgccactgcactccagcctgggcgacagagcgagactctgtctcaaaaaaaaaaaaaaaaaaacctgaaatcttacaaggaggaaactgggtgactagggacaagggtggcaagaagatttcatcttatacccttttgtaccttctgaattgtgaatgatgaataattgccttctcaaaaattataaataagttgtgttgtcataacttttattttgacttctaagatggaattgtcagccacttgaagaagcaggcaggaccagcttcagtgcctctcaggactgaggaagaatttaagaaattcattagtgataaagatgcctctatagtaggtaagtagcaaatattaaaccgtgccacagaattgtcagtttggtttccaaaaccctccatgtctgggaaaaccacagaattaaagcagttaaggaaaccttggggcagttgagaaggcaactgacagaattgggtcagcaattactataatgtactatatagtacattatataattactatataatgtaattataatgtggggggcaattggtgttttatttgagtgggtttgtgttctcatagatgtaaaggtttaatttcaattaaagggactggaaggggtgggtgtggggaaaaaaataaaggactaggataggaatatcttcagcgttttctaatgcttcttaaactctgagatttgactcacaatagggtagttatgactgaaaataaggttttaaggtaggaagatacaagtaaataataaacctctgctattttcacagaaattagggaactttaaaatcagatcgctaggatttatcttgtttttgcagcattcattgctttctcatgtgttgcagtatctcgtttttaaatgacatgagccagttaaacactttctgcatcttagatgttcattgttttgttttttaaatgtgatatatgataaatttgactaaaaaataaatttaaacataaaagctatgtttgtgcttctcttagtctcctaattactgtaataaaactgactttcgcctggctcagtggctcacgcctgtaatcccagcactttgggaggctgaagcgggcggatcacctgaggtcgggagtttgagaccaacctgaccaacatggagaaaccctgtctctactaaaaatacaaaattagccgagcatggtggtgcatgcctgtaatctcagctactcgggaggctgaggcaggagaaacgcttgaacccgggaggcggaggttggggtgagctaagatcgcgccattgtactccagcctgggcaacaagagcaaaactctgtcgcaaaaaaaaaaaaaaaaaagtgactttctggcagcagaatatggtttactgtttaaatttggctaaaagccactttttatcatctagattttactgattctttatattttacaaggagttagcatgtatttattaaacatttatgttttagtcacttttctaaatgagtagttctgaagacaaatatagagaaggaaaaaaattgggtgaagtggtttacagtttattttgacatgtcatcttaatttaatccttctgatacctgaaatagtccctgaaactcttaagcaatttgcccaaatttgttcaattatgggaaagtaaaatgaagacttgaacactgacaaattttctcccttggctctctcaagaaatgtttctgtaaagggtagagggaaaattctcatcctaaatattgtgcctgtctgaggtagtcatggcaaagcagacccagtcctcaaaatagaatgaaatgtttatggtttatggaatagacgtttatggtttggaatgtccatctgtcagcacttattgcttcttccttgtgtttaatattttctgtataggttttttcgatgattcattcagtgaggctcactccgagttcctaaaagcagccagcaacttgagggataactaccgatttgcacatacgaatgttgagtctctggtgaacgagtatgatgataatggagagtaagtgactgagttgaatctcctgaccaagtattattgtgtgaactggtgatactgattgactgggacaaggtttcactctgtcacccaggctggagtgcagtggtgcaatctctgctcactgcagcctccacctcccaggttcaaacgattctcgcgcctcaacctcctgcatagctgggagtacaggcacgcgccaccacaccctgctaatttttgtatttttagtagagacagggtttcaccatgttgcccaggctggtttcaaattcctggcctcaagtgttccacccacctcggcctcccaaagtgctgagattacaggcatgagccaccgcacccagctgaattggtcatttttatacctaatttttcccaagggtttattgagtactttcaaggcattatgctacatgcccagaaactattgctgccttcaaggaacatccctctatctagtagagggagattgtatgcatgaacatatataaaaatgaaagtgtaagtgtatgtagaactatatatggagtggttggaagtacaaaagagggagtgtttttttcttcttatggggtaggggggtaatatcagaaatattcatagagggggtgactcttgaaggatcagttttctctggaaggttatggcctttgaaataaaaattattccagatagagcaccaggagtgaaggccttgagatgtaagatagcctaggcatgttggggcccatagtactgctggagtattgtttgtgattgagatcataatgaaagataagattggagtattaagcagagaccaaattataaattttaagtgccatacaaaagagctttgattttatcttttagacatttgagagccattaaaagactttgggctggggagtaatgcctagtgttccattactggaatactaagcttgtgggagttatttatatcctcctgctcaaggtcattgccaaggtctgatctttcacaaaaacaatttgcaacctcccacgtaaatgggttaaatttgtgaagaagtcactggcagccacatgataatgatttgaagggggagtggtgcaaggcattctaaggattctaaggagaattctaaggactataaggagaatctaaactgaggatgacatgtgagagtctaaactcggtcaacagcattagtggcaatggataggaaggggtgagtataaaaaaatgtaaacaatagtcactaactatgagtgaaaagaagattcagagcaagtttgagtttatttttttatttttttcagacagagtctcgcccttgttgcccaggctggagtgcagtggtgcgatctcggctcactacaacctccgcctcctgggttcaagtgattctcctgcctcagcctcctgagtagctaggattacaggtgtgcaccaccacacctgggtagtttatgtgtttttagtagagacagggtttcatcatattagccagtctggtctcaaactcctgacctgaggtgatctgtctgcctcgggctcccaaagtgttgggattacaggtgtgagccaccacacccagcccgctattgtttctaaaggtttgaaaatctactctaacccccttttgagataatgaaaaagctgaagcccagaaggattaaattgagacctggtccaacgtgtttggaattagttggggaactatgattagaaccacgttctcttaattttctaacccaaaatttagtaaaccctatacccaattattgcacttaagattaaggtggttagcatcttagtgttaatgagaaggtcttgttgctgaatctgtggtactagaaaagagtccttatgtgcttagatgttgctagttaaaagtggcagcaaaagtacatagtctgagctttacatgaaacatgggagctccaccagtaatcccagcatttttggaggctgagatgggaggatcgcttgagcctgggagttcaagaccacccttggtaacatgatgagacccccatctctacaaaaatttaaaaaataaattagttgtgcatggtggtgcacacctgtgttctcagctatttgggcagctaaggtaggaggatcacttgagcctaggagttcaaggctacagtgagctataatcacaccattgcactccagcctgagcaacagagcgaaaccctatctcaaaaaaaaaaagatgggagacagttcttctgctatctgcctactgagacttttcttttttttttttaaggggtatcatcttatttcgtccttcacatctcactaacaagtttgaggacaagactgtggcatatacagagcaaaaaatgaccagtggcaaaattaaaaagtttatccaggaaaacatgtgagtacttctttgtatcttgtctgggatttatttgcttgattttagtttgtttacctcagttattaagccgagctatattttggcgtaaacagtctatttggggggattgtaatagtaatagtttgagtttatattaaagcagtaatgtgtgggtgttagaactcctgttgtcatcctgtaaggtatatattgctcagtacttgttctaaatgtttaaaatctctttccttcataaatgctatcaattattttgtggcaactttatgatatagctaaaaacttggcaagccagttgataatggattatttcatttcagttttggtatctgccctcacatgacagaagacaataaagatttgatacagggcaaggacttacttattgcttactatgatgtggactatgaaaagaacgctaaaggttccaactactggagaaacaggtaataagaattatgtttttccctcatgaacaagtttacccaatgtatagacagtcccttctaactatcttgttggttccttaagaatctgtaaaacaataaatggttccttaagaagaggtaaaaaaaaaaaaaaaaaaattaaagtaactatcctgttaccatgtgtggtataaaagcaggaaagaatgggaacatttggcttccaaattgtctacaattgacttcaaatggctacatttgaagccataaggacaaataaactgttttcacaatctgttgggcatgtatttcgtaggtgtttctttgctttgtgacacagtgactccaagtagaaggtggaaatttgatataaaatgcacttaaaacattgtgcttacttgcacattgagcctctcagtgcattttacccttacaaattttgttttcagatcagttattatgcctataatagatttcagttatatattacagcaagatttagcaggaatgcaccagttgattgggtatcaccaatttgccagtgaagttcagtaaggcattgaagtatatcataaccctgtgtcagtgcccaagagctcagactgttcagactgattccagaaggctagaactatagaacttagtctttgctttccaatcacttgcttcttagtttcaaaagtgcttgaccaccctgtatagtcttggcacaaatgtctcttgtttcccacagggtaatgatggtggcaaagaaattcctggatgctgggcacaaactcaactttgctgtagctagccgcaaaacctttagccatgaactttctgattttggcttggagagcactgctggagagattcctgttgttgctatcagaactgctaaaggagagaagtttgtcatgcaggaggagttctcgtgagttgctagttgggctttgattctccaaggcaattattaaagccttttatactacaaaggatttctaaagaacaataaccctggaatgtgaagataggtcttttaatcaagacctatgactgtcatttttctcaatttaaatataggtactttagaccaggcgtggtggctcacgcctgtaatcccagcactttgggaggccaaggcaggtggatcgcctaaggtcgggagttcgagaccagcctgaccaacatagagaaaccccgtctctactaaaaatgcaaaaaaattagccaggcacggtggtgcatgcctgcaatcccagctactcaggaggctgaggcaggagaatcgcttgaacctgggaggcggaggttgcggtgaaccaggatcgtgccattgcactctggcctgggcaacaagagcgaaactctgtctcaaaaaaagaaataaataaagaaaaataaatacatataggtactttaaggattatgatccttaatgaattctgaaaactaatgaaaggatggcaggttggaattcttacatgattccacttggtcattagaaatagcagataaagggtgagcacagtggctcacacctgtaatcccagcactttgggaggccgaggcatgtggatcacaggagttaaagaccagcctggcccacatagtgaaaccccgtctctactaaaaatacaaaaattagccgggtgtgacggtgcgcacctgtaattccagctactggggaggctgaggcaccagaatcacttgaacccgggaggaagaggttgcagtgagctgagatcatgccactgttctccagcctgggtgacagagcaagactctgtctcaaaaaaaaaaaaaaaaaaaaagaaagaaatagataagattggacagcctcctttgggccagatgtggtggctcacacctataatcccagcactttgggaggctgaggcaggaagatcacttgatcacttgagcccatgagtttgaggccagcctgggcaacatagcaagaccccgtctccaaaaaatttaaaaatctaaaaaaagattgaacagtctccttgatactgacgtaatttcaaaccaaaccattcccccccctcatccctacagaatgtattttctttttgaaatagcacatgggtctaaagtgaactcagaatcgggaagatctgaagaccccggaaacaatttttaccctcactttctgagattttgggagattgagacaagagaaaatcttccttgtgagccagtcaataaaacaaaatactgtaaatagtgtgctccagagcaataagaccttgttttcttacaaagatgaatctccagaagaccaatgattctcctttctctgaactttgtaatccacaaagaacacactagaaataaaaggaacggtttgtttcttcagtcggtagttctgcatattgagagatgagagtcccccttttttagccttgaaaagctaaaatacatagtaactattcaaagaaattgctgtaattttctcagcggtgggaatagattaacaagccttacccttgttttccaattgtaggcgtgatgggaaggctctggagaggttcctgcaggattactttgatggcaatctgaagagatacctgaagtctgaacctatcccagagagcaatgatgggcctgtgaaggtgaggtgctcacagcctcatcaagctatgagcaattgcctgtcctcatttctttgttccaaaactgtggggtctaaatgaagacttcgttggccatctctttttttttttgtccttactcccgagtcataaaataagcattggcaggccaagcggtggctcatgcctgtaatcccagcactttgggaggcaaaggcgggcacatcacaaggtcaagagtttgagaccagcctgcccaacatggtgaaaccccgtatctactaaaaacacaaaaaaatcagccgggcatggtggcgggcgcctgtaagcccagctactcgggaggctgaggcaggagaatcgcctgaacccaggaagcagaggttgcagtgagtcaagattatgccactgcactccagcctgggcgacaagagcgaaactccatctcaaaaaaaaaaaaagcattggcagggctcataatgcttggtaggggcaagcgtgtaaagcctgcgtagaattttctgatgaaatttatattgggctaagttactcttgaggatagagcaacccctaagaacagtgtgttgctttgaattttttatagggatgtggtcttactctgttgcctcagccttctgagtagcttggactgcaggcatgtgccaccaagcttggcttgaaattattttaaggaatggttgggtagcacttctatgtcctgtaacttcctgaacatagtttgacaggtgacagacataggaacgagttggtatctagtgaatgacaacatctttaatacaatctgtaaatgtgatttgggtttccatgacttattttctgtggtaacacatcaaattagagagggattgggtctaggaacaaatacagttgtgaatttatttttttatgttaccaactagagattcttctgtgttttccaggtagtggtagcagagaattttgatgaaatagtgaataatgaaaataaagatgtgctgattgaattttatgccccttggtgtggtcactgtaagaacctggagcccaagtataaagaacttggcgagaaggtaagtgtgaaccctattctgaggataacatttgagcgggagcagtaagtttatgtatgtattcagcattggctaatttggttggttcctaagtactgatagatttttttcccaattacttgctgtttactcactttctcgtgactgccccctagtgctccagcctgtgcagtgcctgagatacccacttttaacattccattcctcaggctcaatctagataatggttaaaaatatctaaggacttctgaattttggtaatggcttacatgaatccatatggtccttcatcttaaaacatttggcttagcccctgtaatgtcttattcagaccaggtaaatttgaaggtggcaatatgtagagtcttaatacaagagaaaaaagggaagcttgtggaaagtgaggtactaccatctgcaaaccactcttcccacatgaacagcagtttatctgctggaattacaggtgcgcaccaccacacccggctaatttttgtatttttagtgtttgaagaatgagattgttttaagtcttcaattgactaagtgtccctctgtcactgaaaacttgaaatgtaaacatttaacctgttttattaacagctcagcaaagacccaaatatcgtcatagccaagatggatgccacagccaatgatgtgccttctccatatgaagtcagagggtaagtggcttaaaacttaacaaaagtgtctaggcaatagataggaataaagcttgtaaccaccaggaaatcattactagacatagttttcatattcagttgaaggcagaaccactgattccttcttggcttaagagttctgcagtatgggcccacataactgcttgaaattaataaatgtttctttccccagttttcctaccatatacttctctccagccaacaagaagctaaatccaaagaaatatgaagtaagtgaattgtcccatatccccacaaatatatacacagacgtaaacacacaaccttaaacatagttctttaattgggtttatttatttatttaattattttttgagacggagtttcgctcttgttgcctgggctggagtgcaatggcgtgatctcggctcaccgttcaagcgattctcctgcctcagcctcccgagtagctgggattacaggcatgcgccaccaccccggctaattttgtatttttagtagagatggggtttctccatgttggttgggctggtcttgaactcctaacctcaggtgatcagcctgccttggcctcccaaagtgctgggattacaggcgtgagccaccgtgctaggctaattgggtttatttaactaaaatctctttaaactctcatgggcagtatatgtggctgctaatatgcttttacaaactcagaagtcttcctgtttgggtggggcagatcagggttctttaaaaagttacacttttaagctgatctttctgttttcagggtggccgtgaattaagtgattttattagctatctacaaagagaagctacaaacccccctgtaattcaagaagaaaaacccaagaagaagaagaaggcacaggaggatctctaaagcagtagccaaacaccactttgtaaaaggactcttccatcagagatgggaaaaccattggggaggactaggacccatatgggaattattacctctcagggccgagaggacagaatggatataatctgaatcctgttaaattttctctaaactgtttcttagctgcactgtttatggaaataccaggaccagtttatgtttgtggttttgggaaaaattatttgtgttgggggaaatgttgtgggggtggggttgagttgggggtattttctaattttttttgtacatttggaacagtgacaataaatgagacccctttaaactgtcttattttccaccagattgagaaccagatgttctctacacactatcactgttcaatagagctttcttcagtgatggaaatgctctgtaatctacactgttcagtacaggtagctacggagcatctgaaatatggctagaaactacatttttgttttgattaatttaaatagccatacagttgctaccatactggtcacggcagctgtagactgactgggtccatagttcatcacctcaaaattctttcaaaatttattatctctttctctccttacatgtttatttcccaggcctaccctggtgattagaacagctgaagggcctttcttgttaggctgtccatgccctaaggatgggttcctgtttatccttgccacgcagctgagcttactgcatgtttatatctcccaaggactgttctctgctcagaaatgccctgtcaagggtgtggcatcacgcagtttcatccaagttgtttcaggaattgctgacactgctgggtgcagttctatcccctaaagcctagggtgtggccctttaacttccccttcagtagaactgggaaaggcagtaccattcctagttatgagtgaagcatccactttcttttgtaacaatgaggaacagaaaggataagactgaagagtgatcttttgtccaactaaaccatttatctccttttgtaggtaaattcaaatcctgcccagttatagttttcagtcactggagaattccaggtaggagccctactttaggtgatcctaggaactcctatgttcagaaaagaattttcttcctactatataattacagtatttagctgtcaattttaagatgaatttggtagagccttatagtaaagtatgtatcttggtcacacacaaagcttggaaaaagtaaaagatgtctaaaccataatcttgtaactcataacatctgggctggggcccggggatctaattgtttagagagccccaaaagtggctcagatgtaaagccagggttaagaaccatctgccttggaagatttaagggaaacatataaacttgtacaaaggaca

SEQ ID NO: 36 - DNA, 33616 bp, Homo sapiens
aaaccaaagcaaaattctgcctccaaggtgagtaatggaggggcggattctagattctctaacctcctttagccttcctttgaggcagtgacagagcgattactaagcctacggttcccaaacgactcaggtgaacctgatttacaggaaaggcgggctgtagctagggatggagacagtacctatcagcaagcggctccacagctcggttctctatctattctgaagacatgcggggccactcactgctcctgatagtcctctacctcccacagaccccacccactacgacacggaaaactggattacccaaatacctgcctctgagtctggggacgcaggcaagcacaaagacaagggggatggagcttctacacagggccccagcgctgtcgctgtggctgctgctgccgctacggcttagtgcaccagacgctgcatttcaggtgctcctacaaaagaggccactcctggaacgccgggagctcagacgctgccctttgctcgcgagccaagtcagccaaggttaaccttcgcggaacccggcgaggagcgcaagcctggccttccccaaacacagatccgagcttttcaccctctaccctcccctcagcctggccttttcttccgccctcacagccaccgcgacccaacgctgaggaaagaccccgacttgtggtgtccttccccttgcccaaactggccacgaaaggacatatagcgagagagaaagaggtgcggggggacggggggggtcgattgaaaatactgggtgagggaatggaagacgaggagcgtggtatggcaggttaatgggactgagcacaggaagaggaagaaagaattgagggttgaatctgtagaacactcaggctttcagcaaggacacctcattgggtcctttctcactgctatagtacgcgggtggctggacctacatgcttcctgctgtggctgtctcggaacccgtggtcctccgcttcatgtgagtgacgtcgtggcgggtcactcactcggggatcgccgattgcgatcgtaggggtcttccttctctaacttgcctccaggagagaggacctggcctgcgctgctaatgggtagtccgttcgcagcaggaccagccctggcctaaggaaacaggaaagagtttgagacttccttctaaaggagccacgtttgagaaatgggatgcaggcctaagttaagaatgctacagaaaaatatcgatccctaagcgtatttactgttatgtgaatgtgtgtgtcaaaggacttaggtgctttgggggagaggagggtgaagacaggaatttattcattgagcgaatagttattaagcgcccactctattccagacaccgttctaggcattaggtgaacagcagtgaacaaaacagacggaaatctgtgtctacttgtagctcacattttagagaggaaggcacatactaagcaaagtaattagaaacatactgtattttaggtcgtgatagtcctgaagagaaacgtaaagcagggaagaagggtataaagtgacacaggaaggtcttgctgaaaagatgacttttaagtaaagggctgacagaagtgggagatttaaccacgcgaatatcttgggaaagtgcagtcagacagagggaccagccattgcagaggtcatgaagcagaaacgtgctagaatagcaaggaggcctgtagggcagagttgagtgaagggtttagtccttcactggagattaaatcaaggcgagcaggtcatgaagatcttgaggacatctaacttttattctaaatgaaataggactttggagcgttttgagcagtagagtgatgggctctgacttccttttaagagggtcactctttaaggaaaatacacagaggaggacgtggtaggagaaaggagaccaataagaagagttttgcaataatccagaggaagcataatggtggtttgactatgggtggtaagaaatggccagttatattcttgatgcacttaatttggatatgtaagagtattatagatgacagggttaattttatttaattaggctttggaggacacttgaaaaatgaattccagtgtgagtttcagagtggcaaacacaagttaaaatcatggctttgctatgtggtacttgaagggattcagataagtcatgtaattttcctggatctgtctataaaatggaaatcacatctgtcaagattgcaaaggttagggtatattataggtatttaatgacaaggtatgtaatgggtctagtctgcaaatcttaaccaggtaaaagatggccttattgtgaggtaagagggtcatgggaggccaaggcatactcctttttaaattttatggactctgtactggggaggaaagtttttgtgttaatgacgatggtatttagaaatgcatggactggcctctcatagctgtccaccctatagtcattccttatagccatcctttaaaccctccaggaccccctatgtcctcatcagtaaagggaaagcaggctgtctggtaagggaaataggaacttccataaaaaagcaattttagatattctttttataggttttggcaaaggttgataaaagacctagggaattactgctggttgctgcgcttacatattttgagtgtcttcagatgcattgttctcagtgtatttaattttcttctttaaattctgacttttgacacatatgatttaaatcctagcaggaattttcacctagtgctaaaaggtaccacattgctttacactataataaggacggtctttcagtgtggggtattttatgtatactataatatttttacatatccagtaattagattgtgtagcaaatcagggaaagaagttggaaggcaagaataggaatgaagggaggagaagaaaggaagaaaatgattaaaattactatattccatcaattctgagatacacatttttctcttacttaacatctctgaaatagggatgtatttttaagttgttgacatctttaaatcactgtagatgaattggcagttgtgagatatttgtcattgcccacacttacacccacttagtcataacttaatcttgtcattatttcagttgagttatatatgcactattggcatatagttgttgagtgtaatttcccttttaaagatcatttagaagattatgattagcattagaatgaaaagttactgtgtatgtggggaaacaaagggtgatacaagataaaaatccagggttaaatttaaaagaagtctgtcaataaataatataggatgtgtctaagtaataagaaagcattgggtcagttgattcaatagtgttttttttcataatgtacataaaataatagagcttcttgggattgaagccattttacaattgatggcattttagatttcttgtatagtatttaaagcttccaacaaaaatgtaaatttttacctactgtaattctgaaatagggaaattagaggttttgagtagagacactttcaaatttgtgtagcgttcctatatagcataagaattctaaaattaaaagtctgcctgtaaaactttgatttcaaagtagtaacttacttatgtttgattcccaatgttgtcatcgtggggcagagattttgctttttcaaaaagattgcaggcaatttagatggtgtgggtggggaggactactgaggaaattgctcagtaaacaaaaatgatagtgaagatctcagaatctcaaaaatcatcttttgtgtgtgtattttaatgattaagatgtactataaattcatgtacagtatttgggattctgcattagaggcatcgtatgattaatggctttttaggtttgatgaagtatgataattaacattgagaaggacaaaattaatgtgaagggacagaatgatttagataatatgtttcaaaagcttttgtcctaaaaaatgcattattaccattttaatttagtaaaggaaaaagaaaaggtcttgatcctcaccaaacacaattaacatacttggtctacagttttctgtgcttctctcttcataaatgttttatattttcaattactgtgcatgtcattcttatatctattttaatctcacagtcttaatttttttacattttagtccagagacttaaactagcatttcctaaactgttttagagaatactagttcaaataaatgttaatagctgttcctgtgttaggattctgtcattaaatatattggaaaatgcttcgtaattatatcctttagagaaattatagctagagcattaaaagagctaactgcagcatcagacagacctgagtttcaatcctcgtttactatgtattacatgaggcaaattaattttaattcaagttttcttctctgtataatggagattattacagtattcgaaattgacttgtgtaaagcatttagccagccatagcgcatgttctacaaatatatgtagttgttattatcatctatgagaaactttatacatattagaaactctgaggatttaaaattttgaaggttgacttatactcaatgtaaaattgaaaaatcacaggggagtaattagcatagagattaatgaaatgagcactgggttgaatggtaaaagatttgtttgagctttaagcagtattgttgttaaactatcactgtgccctaagcgtaacattattttaaaaatgtcttcaactgtgtttcccccatttgtctgaaagcttagttagttcaaagaacatgtttatttttgttctctactataaacccagcacatgacacaaaatcagggagtgtaaagttggggtcatgaacttattttaggagcctggtaggtaatataaatggcagacaacagggagtagtaaagtgtctgtctgtcttacttaaagacattcacatcagttatttccaacactgttagccctggaaaagaaagctatccctgaactttgtcaggctagtttgtgatccctagaaaagattagtgattaagaccaaaccctgaagaacagcatcattaatgggacagattaaaaaaaaaaggagccctgaaaggaggtgacaaggaagtaggaggtgaaatcaggtacaagtaattttttaaattaagaaaagtatagccctctccctctccctctccctctccgcaccgtctccctctgatgccgagccgaggctggactgtactgccaccatcttgactcactgcaacctccctgcctgattctcctgcctcagtctgccgagttcctgggattgcaggtgcgcgccgccactcctgactggtttttgtattttttggtggagacggggtttcaccgtgttggccgggctggtctccagctcctgaccgcgagtgatctgccagcctcggcgtcctgaggtgccgggattgcagacggagtctcgctcactcagtgctcaatgttgcccatgctggagtgcagtggcgtgatcttggctcgctacaacctccacctcccagccgcctgccttggcctcccaaagtgccgagattgcagcctctgcccggccgccaccccgtctaggaagtgaggagcgtctttgcctggccgcccatcgtcggggatgtgaggagcccctctgcccggccgcccagtctgggaagtgaggagcacctcttcccggccgtcatcctgtctaggaagtgaggagcgtctctgcccagccgcccatcatctgggatgtggggagcatctctgccccgtcgccccgtctgagatgtgaagagcgcctctgcccggccgcgaccctgtctgggaactgaggagtgtctctgccccgccgccaccccgtctgggaggtgaggagcgtctctgaccggctgcccggtctgagaagtgaggagcccctccgcccggcagccgccccgtctgggaagtgaggagcgtttccgctttccgcccggcagcggccccgtccgggaggtggggggcagcccccgcccggccggcgccccgtctgggaggtggagggcgcctctgcccggccgccccatctgggaagtgaggagcccctctgcccggccgccaccccgtctgggaggtgtacccaacagctcattgagaacgggccatgatgacgatggcagttttgtcgaatagaaaagggggaaatgtggggaaaagaaagagagatcagattgttactgtgtctgtgtggaaagaagtagacataggagactccattttgttctgtactaagaaaaattcttctgccttgggatgctgttaatctataaccttacccccaaccccgtgctctctgaaacatgtgctgtgtccactaagggttaaatggcccctgctctctgaaacatgtgctgtgtccgctaagggttaaatggcccgtgctctctgaaacgtgctgtgtccactaagggttaaatggattaagggcggtgcaagatgtgctttgttaaacagatgcttgaaggcagcatgctccttaagagttatcaccactccctaatctcaagtacccagggacaaacactgcagaaggcggcagggccctctgcctaggaaaaccagagacctttgttcatatgtttatctgctgaccttccctccactattgtcctatgaccctcccaaatccccctctccaagaaacacccaagaatgatcaataaatactaaaaaaaattaaaaaaaaaaagtatagaaaatttagataactttaccaaggtcacacagtctaagtatatataagcaagcccaagggtatatatacccatgttcctctgccagtgctagtgatcattatctgcatgttactagaaaacattaacataaacttatgcatccaacctatatttttaaaaaatttaaatgataattaatcaacaagtattagaaaacctgtttccagagcttctgttctaaagacagcaaatggcttttagcacttgagcacagttctgttaacacacagacgtaactagaagtgaaatatttttagatttcacaagatgagactttttaacattggcatcatgaataatatttccagatacccagttatctaggactggagaagaagtagagtctgggcgccagtgcaatggctcacacctgtaatcccagcaccttgggaagccgaggtgggcagatcagttgagggaggtcaggatttcgagaccagcctggccaacatggtgaaaccccatctctactaaaaattcaaaaattagtcaggtggcaggcacctgtaatcccggctatttgggaggctaaggcaggagaatcgcttgaacccaggagacggaggttgcagtgagccaagatcgtgccactgcaccccagcctgggtgaaaaaggaagactctgtctcaaaaaaaaaaaaaaaaagttttatcacttctttttatcacattgtttccttttagtagttgcatatgtgtatttagtgtttagttcatttgtatttctgtattttgaaacatgacattctctttcctaaacttatgcttgttcttcaatatgtattataaaagtcatattttatgtaactaactattccacttatattttgcaaatagttaacagatttatcaactcagtaaaattgtatttttttctcttaggctaggatttattatctctattttcaaaattactgttattcttagaagattttttatatgtttctgtatgagtcagaacatgagtttctttttttgatttttcagcaacttggtgggtatttatttttgaaggactgtctagaactgttggcttatttatgagcattattctttatggactattattttaacagtttagaaaaatacagaccaaaagagcacaaaaattcaaatgaagataccacctttaaactctgctatttttaccaaaatgaacacagaataccatgttgttacttaaacgtttgcaaagccagaattgtagagaaaatatcttaatagaaatggatatatgaagaaagttaaagtaaaaaaaaaaaaaaaactatgctcttctgaattttagtatcctgagtacagcatttctttagtttttgatgtctttttattttagtctaacataagtaatgatgaaatatactcaataggtaaaatgtagctatcacaaacaataatgagtatctgattaggcagaattggcaagttttacatctctagcaaagacatatttgatgaataatactaaaatgaatgaattggtgcattttagaaaaatacattttgaaaagatatggctcaaatcatcttattcaaatttcaaaattaagagaaaaactagaaaactagtatcagctaatatgaaacaagtagatttaagtatagactgatgctcaaaaatgagccaacagatctagacagtcacctcaaaaataaataccagccagtgtattgtggcttttcagaatattttttatataggattggtattatataataatttgaaattttcaaacaatctgttacgtgtctattatctagtttttattcaaaatttcaccattaatattgagtactgcttcatttatttaaagttagaattatttcagcaatacttgtatcattgttataccttgaattataaattcttgttaaatcaggtagaaaagaacagttcatagtattactaatgattaacctctccattgtcagtgtgattatttttcttagtatgtggcagtttaaattttaacatggtgaattaatctcagaatgtttgcttacatacatttttctgtaccttgatagtatttttttaaatttctctgaatttattataaaactaaaattctaatttttaaaataaagacaacggtatatactgacattatatctgaacaagcatatgattaatattttcttaattgttgattttttcttttaatatttatctttcctaattgacgttttcttcttgaaaattgtacctaagtgaatacacagtagaaggatccagtatacagaaatataaaaggaatgaaatcagcaactctttactttggaacacagatgtaatactcattagcatagttacggttattgttattcttatctcttagtgtacctgaagctttctttgaaagctttcaaccttaaatgtggctaaatagcctgttttctgcatttaagaacaaactatatttcctcttctaagtagattcaggaattagtctacttaacatttctgctatttgtttggcttgttgctctccataggaaaactatttttctaagatatttatctattacagtagaaaatgtttttcctttcagactgctttttcatagtggcctatagtataaatttattcctttcacagtgtaatttatcacttttatttttcctataggattttctgccgtctcttggcaaaaatggcaaataatgatgctgttctgaagagactggagcagaagggtgcagaggcagatcaaatcattgaatatcttaagcagcaagtttctctacttaaggagaaagcaagtaagaaaatttaaaattttttgaggagatacttaaaatgaattcatacattgatggagaaaaaataatgtttaccgctttaagttatttaagttttacttagaagtttctgttatatgtagaaaaatatcaaacctgaatttctaccttcaggacttcagttggctttggttttgtttgtttaaatgtattttattttcagtagtcaatgtcagaatagaaatttcaaaatcttttgctgtcactagtagaaataaatgctttcctacgttttgtaagctaatggcttacaaaaacctgtatttactctccagaaactttatcaatttttttctaattttaacataccactttgtttctttttttatagtgtttctcgagattttaaaattatttttcttaaaaattcttactctctttttattaaaaagatgaagagattggacatagtcattgctcatatgatataatatatgttgtaaaccaaattttgtcttctgtaggtggccatttcctagcctcttgataagcattttagttttgccagtttgaaaatctttctacttattcttcacctttatattattctttggtagcctatactggtagtttttagtcatattgctcccaatttaggatgaatgttttataaaatctctgttaatatcctgtaaggaaaatatttcctagaaaaataacctacctatatataattttaaaacatatcttaatcctatatataaaatagagaagagaaataaaaagaaaggtataagtagtagtaacaataatatgtatttcagtaagtaatacttcagcagaattataccactaaaggcagtgtaagagggtcacatgccccatgattcacatacatggaatcatcaagaatgcaataggtacaatgccaactagtataggtatatagtcagactgcctttgtgtaggtgtctcagataccagaagcagatagtgatatagatgatttattcaaactgatgagtgattgattagatagtattttgaataaaacaaggtacagtctactcttgatttatgtggtacttgattcatagaaaatttagggtataataagcatgcttaaaaacactttgtgtttatatataaagaatagttaaaaatctagactcaaataattattaataggatttttacttatacaaatttatgataggccactataaagttctgcaggatgtgaaacagttcttcattttgcaggagtatccagcatactgcaggacatctgacattcttggcttctgcccaataaatgccagtactaacaatcaaaaataatcctacagattttcaaaatcctacctacaaagcagtaccaaccccactgagaaccattatttttctcttatacttttgttaccccattgcacacttttaacacatacattatattttgagcaaatccttgagttatttcactcattgaatgtttgattagcttaactcagactttagcaatattcagcttcttttaaaaggtaatgactaaaaagaaagacatgagaatagtttttgcttgtgtggtaacatctcagaatttttttaaaaatatatatataatttaatataatgcttctcttttttttcagcatctgttattgacattttatcttttatttttaaaaatttttttgagacagggtcttgctctgttacccaggctggaatacagtggcactatctcaactcacactgcaggctcaatctccaagcctcgatcagtcctcccacctcagcctcctgagtagctgggaccacatgaatgtaccacaacccccagctactttttgtatttattgtagagatgggttttgccatgttgcccaggctggtctcaaactcctgggctcaagtgatcctcttgcctcagcctttgaaagtgctgggattatgggattacaggcatgagccactacacctggccacatattgacacttttgtgccagcttcttaagttatttgccattgccttttattatagccgcaatgctgaaaaggtggtaatttgatcttagttagcatcttaataggagctaggaaaatgattcataaacaaagtctttctgttttactcttatttcatatattttctccctctctctctctctctcttaaatagcatgttgttttaataaatattaaactggcataaaggcactggccaaacatttggttacactagagctagtattatcctagctgtagttatactggctgtcttcttttcaaatagtattcatacaaaacctcttttaaaaacatattttaactggatgttcttgatcctagttttgcaggcaactttgagggaagagaagaaacttcgagttgaaaatgctaaactgaagaaagaaattgaagaactgaaacaagagctaattcaggcagaaattcaaaatggaggtaattaaatatagaaaatttgagtaatccagaagttaagaagttggccagtcacaccaacagtgaggaaagaagtaagaatctgtatctaggcaacttggacaacttcataacttctaaatgactcagatttatcaataaaatgggggcatggatagaacctacttcttagagtatgagaattacatgagttaatttgtataaagcattttgaaaagtgtttggggcatagtaagttcataataaatgttagctgttcttatttgcaggtttctcggtttagtaattgattaaatgggaatcatgcctttattctttgatacctcaattatggctaaaatatgcctaattttttggcagccattttatagtctcagacagtggatatttgatagccatatacagtgaatttttcatttaaaaagagttcccatttgtggttcacaatttcatattttttgtcatatttattggtttaatatgaatgacattatttcattttctgtctcagtgaagcaaataccatttccatctggtactccactgcacgctaattctatggtttctgaaaatgtgatacagtctacagcagtaacaaccgtatcttctggtaccaaagaacagataaaaggaggaacaggagacgaaaagaaagcgaaagagaaaattgaaaagaaaggtatttttgacctttaagcatatttagctcttgactggattatcagaaaatgtcaagttttgataatgataataataatagtatcaaaagtaaagttcaactttcatgagctaggataaaattaggaacaatatgatattggaacataaaagctgggtcctaaatggtgtgtgaatattgaccagattaacggggtaaaaatgtggcattttaggcagagggactggcataagttaaaacagactgtaaaggttaagtgtagaaacccatatgtagtttggtatggctgaattttggtatctatttgtggtatagtttgagagaagtcacagataggaaactagcttaggaccagttgtgaagataggaaaagaacattccaccagtcaaaacagactgtctgaactaagatttcaagaatccatgagaactaaagtagatagaaatgtcaccatccacttaggcaacaacccttgaaatttagtcatcaaccttaacctgtccctattccctgttcttcatatctaattaaccaacaaattctattattcctgtccccaaaacatacatagaccccagctctgctctttcttttcattaggtcctacctcagttcaggttttcaacgatctttcatctgaattaatattaaagcctcatcttttctagtttatttttagccttgctgctaaagctatttattctaattgtaaatctgacttcctttccccagatatgtctaaaaagttgcctttataaataattatgaatatttctcattatacttaaacttatttactttttttttttttttttggaaaatataacatgcagagggatttatgaactaacccaagccaatttagcctctaaagcacttgccagttcctttggcaaacatcagtaacctctgttagttaaaagtaggtaggggctgtacagcctctgctatacaacttcaccactaggtggtatgattacaatgaaagcaagtcagactaactcttctagtttataaagtacgttaagaagtagacacaaaacaactatataacctgttcttgcaaatttggtggaatccatattctattctctaaggagggtgcactgttctgactcaggattaatcagtcttctagttagagaaggcaacaaggctctcctttgatggaagagggagcacacaggaccacaagaccaaatggagttataagattagaacacttctatccaatggaactttctatgataatggaagtactctatatctgcattatccaacatggtagtcaatggccacatgtggttattaaagatttgaaatgtgggtagtatgactaaactgaatttctaatttaaataattttaaatttaaatttaaataacctatgtggctggcagctaccatattagacagtgctggttatagagggctgttccataggtgtttagctgctagctaggactgccagattctgctcatgcaagggctgtggtgcccatatgatctttctagactgctacatatcttttttttttttttttttttttttttttttggagacggagtcttgctctgtcacccaggctggaatacagtggcataatctcggctcactgcaacctccacctcccgggttcaagcaattctatcttagcctcccaagtagctgggactacaggtgcatgccgccatgcctggctaatttttgtatttttagtagagacaggggttcaccatattggtcaggctggtctcgaactcctgatctcaggtgatccacctgcctcagcctcccaaagtgcggggattataggcatgagccaccatgcccagctagactgccacatatcttaattgagcgtcactcatttgtcagtgaaggatttctgaaattccttatgataattaacaaagatcttggtatagattttaatatttgcaatcatttctagaatggggattcctgataaaagtatttcaaatgcctaggaagtacattagagttttaaaatatatacaaatgtagatatattgttatactacagtatttttaaagtaaatgcatatactttatcacacaaaaatattaagatttttggcatattctggtaattttgttgtacatatttttctgtataatttggatttttaccttttgaaaaatttttgctaatttgtttatggaaaatggaatttttttaaagcttgctaatgagattaaaaattggccattattttaagttaattccatcccctctttgataaacttattgttgtatgaattatgaatacctttacacagaattctcctttcctgcttcatgcagaattattcttcactgagtttctatatttctttgtgtatgtcatgtttatcacatattcattatacatatacatgtctgtcttctttaaaagagattttgagtgccttgacaacatggactgcccatcttactgtttccagtgtcatagcactccgtatgttgaaagattaaataaatgtatagttgagaaagaatgcttccaagctacaatagcttatctctgttctttggattcaaaggtaaataaggttttattttgattttacttttttggggccagaaaagctaattgtaaacttaaagaatatgaatcctctttgcaggttacaattaactcagtagctaaaataatcatgtgttaataagagttacattttcagcaaataaataaaaatataattattaaaacataatcagaataaaatattcttatctgcttaaatagttactgtggataaccctaaaatcctaatatatcttcagagaaatctaagaaatggagaaattaattatgtacttactagtgtatataagtgaggaggaaaatatttaatgagtgaaattgcattctgctctagttcattctgtcatttgggtactggttgtggtgttctttctaaataaagtatttatcaccttccaaagagccatagtaaaagtttttagaggagtctctattatcctgtttcggggaaaggcaaactttttctgcctaaagcctttgtcacaactactcaactctgccctggtgcaaaagtatccatagatgatatgtaaatgaatgaatatggttgtcttccagtaaaactttatttatgaaaacaggcaacaggctggatttgtcccatgagccatagtttgccaacctcacacaatgtcttcaaatagaaatacaacagagaaatagctaaaataggattcaagattttatgacttggataatttttttctttgttattatttaagtgaaggtaggagataaacattctttttattttttccttttaagctcattggtatggataccatggagttttcatagtgtttttttgcttggttttatttctgatgtttacccattcataaatactttttaggagagaagaaggagaaaaaacagcaatcaatagctggaagtgccgactctaagccaatagatgtttcccgtctggatcttcgaattggttgcatcataactgctagaaaacaccctgatgcagattctttgtatgtggaagaagtagatgtcggagaaatagccccaaggacagttgtcagtggcctggtgaatcatgttcctcttgaacaggtaatctgtacaactgaaattcctgttgtgtacatacaacattttcattccctccttcttggtatctttccattataattttgtataccatacaacatgtgcccttgttaattagttcagtcgattagtttgaatgtggttaattacacaaaaaaagcataaaaccaccaaaaacctgtaaaacatctgtaaattaagatataatgcataaggataggaagaagaaaagatgtattattttatctatttttaaagtatttttacttttgtattttgcattaaaaaactattggtgtgtatatatatataaaatatatttgaaatctaagtaacaacaaaatacaaaacatcccatttttaacaaataaaggaatactattaaaaattacaagttcaatctccgtgatcccctctcctcatttttcctcaagtatgaaaatattttttgggttttagagaaataaaacttgctctcatgcttttagattggtgctttctgggtttattttacatgattttgaaaagcaaggaattataaaattccatgatgaagcagtgataaaaataatgattatgatgactattgtgttagaagtacttaatagataaatttttttcacatgctattttatttcttactatatacaactgtcagttaagtagtatcaccctcatttacagatgacgtttaggaaagttaaccaagttatgctatatatatacagagatacatatatatatatatatacatatatatataagttggttcacttttttatgtatctatagatatatactcattatacatctgtctatatagatatatatatatatactcatttatctcactctgaggctgattatctttaatccctatactgttcagctttactgtttaccattcaaggtggagttagtcatgaaacttctaactacaggtgctatgtagtttttagagccatgcatatgaccaaggtcataaattacaaactgctgggccaaggaaagaatgcaatcccaaaaagtttcagtttatctttcatagtatttcataaaatacttacacatggaattttacatgaaaatcctgatgtcttgtttcttaaaaattcagaactaagccccacccctacccttcccaaccccctgctattttcttaaggcagaaattggttaacacttagtaatggatagcccctttaggtggaagttagactctttaacacagtttcaaccattccatagttgaggtggaaggtcacttgtgattatttggtatttatctttacttttctgctagtgttatatttacggaaggttaagaagagactcgagtatctttttttaccatgtctcaaaaaaacaagggtgttacttgttttttctgtctaggattccttactcatttcctttacttatttggtagacagttgtatcataattgcatcaaattgcacttttgatccctagcctgggcttttgttttggctctctaatttcagcgttgctggaacacagtacgggtaatggatcaatattgacctatcatcaagagtacaaggaagtgatttcttctacttcctacttaacaagctcatttcttttaggtctccaatgattaattatccgagccagtgaagtttgggttttaagtgtttcataaaagaaattgataggaggttagagtatctccacttttcctttcttctggtgagtttagcaccagggactgtgctttgtgtagcttcagaaaacaaaccatggttacagtttatataatattattccctatttaaaatttaattctttctatagtgaaattagagctgggtatttggaatatgtgaaaagtattgatggtatattttatgaaggataaccttgcatgataaccgttttaaaagcaaattgatactccatgatgatacccttcagagcagtggtttctaactgttgctttttttcttataagctttcaaacctccttctcaacaaaagtttactttcttcctttttctttacttttgaataccatatttactttcttgaagaaatatggtttttaaaaaatctagtaacagtggaaagaatcgaagacagtagcagttttaaatgtcctctttctagatgtcttctatggtggtttgaatcatctacctatttcctctgtcccatggtgcttcagagatattgcaaagaatatggacttcaacattacgatagttctgcctttgtttattgctactctgctgcttgttggttttgtgaacttgaacaaatccctgtgttcattcaattatatttatagctgcaagtatttattaagcaccaagcacctaagtaaaggatacagcaacaaattaaaatacagagatagataaatttcttttttctttttttttttttttggagactcacccaggctggagtgcagtggggcagtctcggctcactgcaaccactgcctgcctcccggattcaagcaattctcctgcctcagcctgccgagtagccaggattacaggcaccaccaccaagcccagctaattttttgtatttttattagagacagggtttcactatgtgggccaggctggtctcaaactcctgacctcaggtgatccgcctgccttggcctcccaaaatgctgatattacaggtgtgagccaccacacacaagcaacaaacatatttttaaaaatagccctgcctttatgaagctcacatttgtataagggagtcagaaatattaccaaggtgtaagtaaatatttagtatgttaaatagtgataagtgccaagagaaaaatagggaaagaatctagtaagtattgaggccaggatgatattgacattttatataaagtgcccagggaagacctcaaaaagaaagtgacatttgagtaaaggtctaagaaaatgaaagcaagtcatgtgtttatctggctgaagagcatttcaggcagtcctgggagaaatggatggctgggatgttcaaggaacagcaggaggccgatatgaatagagcagggttaataactgagaaagtcatgggagatgaaatcagagataagggtgccaaatgtcttatagatcattgtaaagtttggcattttttctgagtaagatgaaagccattgtaggattttagagcaaaagaataacattggtcagcctgacattttaataggatcattctggctgctctgttgatgggaggaagatggaattaaggagatcagtgaagtttctcttatctaggaaaaaagaagtagacttggcatatgcatgtgctttttttactttttaatatttatgttatataggaccagaactgattcataactccttatgaagttaggagccctggagaaaagaaccaactgatcttcagccagcttaaattggaaaaactcctcatttgggcttcatcttttctgttcttataagttgtagactattttttctcttccagcagccatcattcacaaccataagcaaagctatttttataaacatctgtatctaacccatcaagatacaacctaaaataaaagttaaaaaaaaaaagatagtactagtaaacattctataaagtagggacacttagaattcaaaattatatactctgttttgtaggtggtacatttttctagggaaaagtttcatagctatcgtcagatccttaaaggattgcatcttactaatcctgttgctactcttaaacacttttgctgtaacttttaagttctcatatacgtgacattgtcaagttatttgaagcattcgaagagaaatattatttatgaagaccccctaattcatttcgaatttgactcttaggctcatttttttaaatcatagtatttcagagtaaatttgcatataacatttatttataaaaccatcttttatctagaatgcatctttttttctcctttgagcaatagttctcttgtatgattcattttaaacttgttgaaagaatttaaataactatatttcttacttttgctagttggagaaaaaaattaagacacttcaaatatgaagattaaagaaatttccgtttgcttccataaaaaatttgtagaactagccctacatgttagttgcatgatgcatgatgctgaaattgttaaatgatctttttttttttttttttttttttttttttgagacagggtctcactcttgcccaagctggagttcagtggcataatcaaggctcattgcagcctccaggctcaagcgatccttccacctcagcctcccaagtagctgggactatagccacatgccaccatgcccagcgaatttttttattttttgtagagactgggttttgccattttgcccatgctggtctcgaaaaaaaaaaaacactgggctcaagcagtctgcctgcctcagcttcccaaggagctgggattataggtgtgagccaccacacccagccaattttttttaaattaaaaaataaatctagcatagctctggaaatgatcaaatgtgtagggaagaaaatgcacatgtgtaaatgtgtccatttattttaattctaatgctaggctaaatgctttattatgcatgttatgatttaatccttatgacaactcttcaatattatttctctcattttttgaggaaacaggagtgtcaactttatgcattctcattgctagtacatggcagctgaaattcaaaaccaagtctgtttcactcatttattcattgagtaaatttttaactgaaattcctctgctctttcaaccataatgcgttatcaatttggaggaatttttttttcatgtttatgcaaagcttcgtaacaacaataagagactttgggcacacaaagacaaaggtacatccacaaaagtagaacatttgatacttagcatattaggtgtagcttaatgtagtctggatatgattaggcttaatctgtgtacatctttacttaccagtttatatttcacacagatgcaaaatcggatggtgattttactttgtaacctgaaacctgcaaagatgaggggagtattatctcaagcaatggtcatgtgtgctagttcaccagagaaaattgaaatcttggctcctccaaatgggtctgttcctggagacagaattacttttgatgctttcccaggtaggtatttattagtaattacttaatagtttcggaatcagttctcaaagtgatgtttgtaatgcttaaaggttaaaatcagtcctgtgtaagaatcatgagtcttacattaatgaccattattaactattattgagtttttcaagattggctcaagatgacacattgagtaaaccttgtaatcattctcctccccatgaatgtacatgttgtataaaacacctgatatggtttgactatgtccccaccaaaatctcatcttgaattgtagttcccataatccctacatgtcatgggagggacccggtgggaggtaactgaatcctgggggcaggttttacctgtgctgttctcatgatagtgaataagtctcatgagatctcatggttttataaaagggcagttcccctacgcatgctctcttgtctgctactatataagacatgcctttgctcctcctttgtcttctgccatgatcgtgaggcctctgcagccatgtggaactgttggtcaattaaacctctttcttttataaattacccagcctcgagtatatctttattagcagcgtgagaatagactaatacagtaaattgatactgggtagtagggacactgctgtaaagatatccgaaagtgtggaagcgactttggaactgggtaacaggcagagattggaacagtttggagggttcagaaaaagataggaaaatgtggaacagtttgggacttcctggatactttcagggctcaggagataggaaaatgtgggaaagtttggaactttctagagacttgttgaatggctttgaccaaaatgctgatagtgatacggacaatacagtccaggctgaggtggtctcagatagagatgaggagcttgttgggaactgaagcaaaagtgacttttgctatactttagcaaagagactggtggcattttgccctttccctagagatctatggaactttgaacttgagaaagatgagttagggtatctggcagaagaaatttctaagcagcaaagcatttaagaggtgacttgggtgctcttaagcattcagttgtattcattcacaaagacatggtttggaattggaacatgtttaaaagggaagcagagcataaaagtttgaaaaatgttcagactgaagatgcagtagaaaagaaaaacccatttctgccagctgcagaaatttgcataagcaatgaagagccaaatgttaattgccaagacaatggggaaaatgtctccagggcatttcaaagaccttcacagcagcccctcctatcacagaacctgaggcctaggaagaaaaaatggtttcctgggctgggcccagggcccccgtgctgtgtgcagcttagggacttggtgccctgcttcccagctgctgcagccatggctaaaaagggctaaggtacagctcaggcccttgcttcagagagtgcaagccctaagccttgacagcttccacatggtgttgagcctgcagaggcacagaactgaggttcgggaacctccgcctagatttcagaagatgtatggaagcccctggatgtcctggcagaaatttgctctaggggcagggccgtcatgaacctctactaagacagtgcagaaaggaactgtgggatgggacccccccacacacagaatccccactggggcactgcctagtggagctgtgagaagagggccactgtcctccagaccctagaatcataaatccactgacagcttccgcagtgtgcctggaaaagctgcagacattcaactccagcctgtgaaagcagctgggatggtggctgtgccctacaaagccacaggggtagagctgcccaaggctgtgggagcccacctgttgcatcagcatgacctgcgtgtgagacatggcgtcaaaggagatcattttggaactttgaggtttgatgactaccctgttggattccagacttgcatggggcctatgggccctttgttttggtccaatttctcccatttggaatggtgtatttacccaatgcctgtacccccaatgtattctggaagtaactaacttgcttttgattttatggctcataggcagaagggacttgtcttgtctcagatgagatgctggactgtgggcttttgagttaatactgaaatgagttaagactttggggaactgttgggaaggcatgattggttttgaaatgtgaggacatgagatttgggaggggccaggggcagaatgatatggtttggctgtgtccccacccaaatctcatcttgaattatagctcccacaattttcacctgtcgtgggagggacctggtaggaggtaattgaatcctgggggagggtttttcctgtgctgttctcatgatagtgaaaaagtctcatgagagctgatggttttataaaagggcaattcccctacacgtgctctcttgcctgctgccatgtaacacatgctcctctttaaccttctgccatgtggcggcctccactgccatgtggaactgtgagtcaattaaacctctttcctttagaaattacccaaccttggatgtatctttattagcagcatgagaacagactaacagaacaccacagagagattttgtcctaactaaagcaataatattaataccagcgtagcagaaaagtatgacgtggatagagaacagattaatgtgctgcaaaatctcttatgctgtagattgtctcatgctgcagcacagaaagacagagatgaaaagtttagatttataattataaattccatctaataatatacttgcatatgtttttactcaaattcaggatatagagaaaatatctaagttaaaatgtaatgattttaataatctaaaaggaagtttcattttgtattgcctgttttctctaataaaaatactcctgagacagatgaagcttcataatgtgtgagaaagtttcttcaaataggtctttgaagcagaagagaaaagattcttggcagatatagaataagtatttatctcatataagaggaaggacctgataaaaagaaaaacagttagaaattaagactgcatttaaaggatatttatttgactagagtaattgggaaaggcagatataaatgaagataaatagaattaggtaaaagaacaatttggagacatatttgtagaaatgactgaggatttgtgtgtgtgtgtgagcgaattattttgtaatggtgcaataaaattaaactaaggttttttgggtttttttttttccaacttgtattttaggctcaagggatacagatttcttatattggcaaattgtatgtccttgaagtttagtataggaatgatcccatcacccaggtagtgagcatagtacctaataggtaattttagaaccctcaccccactcccgacctccctcctagtagtactcagtgcattttgtttccatcttcatgtctgtgtatacgcaatgtttaggtttagctctcacttataagtgaagacatactgtatttgatttcctgttcctgtgttgggttacttaggacaatggcttccagctgcatccattttgctgcaaaggatattaatttctttttttaaggctgcatggtattccatagtacatgtgtaccacatttttttaatccaatccactgttgatggacactagagttgattgcatgtctttgctattgtgaatagtgctgcagtgaacttacaagtgtatttgtctttttggtagaatattctatttttctttgagtatatacccagtaatgggattgctaggtcaaatggtagttctgttttaagttctttgagaaactccaaactgcttttcacagtggctgaactaatttgcattcccttttctcttccacctcaccaacatcttatttttgttttttgtcttagtaatagccactgtgactggtatgagatggtatctcattgtggttttgatttgcacttctgtgatgttgagtgtttttgatatttgttggcgacatatatgtcttctgttgagaagtgtcttttcatgttctttgtccatgttttaatggagttatttgttttttgcttgttgaattaagttccttatggattctagatattagagttttgttggatgcatagtttgcgaatattttttcccattctttaggctgtctgtttactctgctgatagtttattttgcagtgcagaagctcttcagtttaatcagctcccacttgtcaacttttatttttgttgcaattgcttttggagacttcgtcataaattctttgccaagggtgatattgagaaggatatttcctagaatttttgccaagggtgatattgagaaagatatttcttagattttcttctaggatttttaagttttaggtcttatatttaattctttaatccatcttgagttaacttttgtatatggtgaaatgtaagggtcctatttcattcttctgcatatggctagccagttattccagcaccatttattgaatagagagtttttttcccattgcttgttttgttgacttgctgaaaatcagatggttgtaggcatgcagctttatttctatgtcctttatcttgttgcatttgtctgtgtgtctatttttgtaccagtacccttctgttttggttactgtagccttgtagtatagtttgaagttgggtagtgtgatgcctccagttatgttctttttgcttagaattattttggctatttgcactctttcctcattccacgcaaattttagaaaatttttttctaattctgttataaatgatgttgtatgtagtttgatagtaatagtattaactctgtagattactttgggcagtaaggcaattttaacaatactgatttttccaatccatgagtgtacaatgtttttccatgtgtttgtatcatctgtgatttctttcagcagtattttatagttctccttgtagagatctttcacctccttcattaggttcattcctagatatttcattttttgtgtgcctattgtaattgggattgtgttcttgatttgactctcagcttgaactttagtgtatagaaatgctgctgatttttgtgcattgattttgtatccagaaactttactaaagtcatttatcagctctgggagccttttggcagagtctgtagggttttttaggtacagaatcataaatcagtgaagacagataatttgacttcttcttttcctatttggatgccttttctttctcttgcctgattgctctgtgtaggactcccagttctatgttgaataggggtgatgaaagtgggcatccctgttttgttccagttttcaagggaaatggttccagcttttgcccattaggtattatgttggctatgggtttgccatagatagctcttattattttgaggtgtgttcctttgatgcctagtctattgagggttttatcataaagggaggtagattttatttaaagctttttctgtatctgttgagatgattatataatttttggtcttaattctatttatgtggtgaaccacatttattgatttgcatatgttgaaccagccttgcatcccagaaataaagcctacttgattgtggtatattgctttttgatgtgctgctgtatttgatttgccagtattttgttgatgacttttgtgttagtgttcatcagagatattggcctaaagttttcttttttccttgtggtctctgacagtttttggtgtcaggctgatgctggcttcacaaggaaggagctcctcttgctcagttttttggaatagtctcagtaggattggtaccagttctttgtacatctggtagaattcagctgcgaatctatccgatccagggctttttttttttttttttgagacggggtctggttctgtaacccaggttggagtgcagtggcgttatcttggcccactgcaatctctgccttttaggctcgagccaacctcccacctcagcctcctaagtagctaggactatgggcatgcgccaccacaccaggactttttttaattggtaggtttttattactggttcagtttgagaactcgttattggtctgttcatgtttttactgtcttcctagtacaatcttgggaggttgtgtgtttctaagaatttatcaattttctaatttgtgtgcaaagagatgtttttaatagtctctgaggttcttttgtatttctgtgggattggttttaatgtcacctttgtcatttctgattgcaagtagctgaattttattgaatagcaaggctgatgtgattatataggcatgttttaaaattctccgttaactgtgtttaatgaaatattacaatatgaagagttttaacatggaatagtaagacagaaaatatggatgaaagcatggaataatttccttggaactcatttctactctcctaatcaaaagtagactagtctaaaaaaagcacacaggggattttctttttttttacaagtacccatgactttgaatgaatctgtgtcttgaaccttggtagatgagaaatcatagtggtctatgctctaacaacatttttttggagattacatttcgagaaaatctcagtctccatgatttctcagagatgcctaatggctttagattcatggagcatatgctcaccactctactcccaccaagcaaaactaacttgaaaacagtactacagctaggaaacaaagacaatgccaggtctttgtgagaatgcactatttatgatcaaataataagtaggaatttacagtcagacttttaatttccaagatcatgcttatttctattgatatcgagtcgtattaatagtagaaattaatagataattatgaagcataggtttaacttaaaagtccatttattaaaaatccaaattgtctatacttgattcctcctcttgaaaacccattttaatcaggtttctttccccactgtgttttgccagaactgctttgggtaagatcaccagtcactccctgtagctatatgtctagttctcagtcttattattaattaacttggcttctggcaccacactctcctggtggtcctccttcttcactggctgcccctgtcatttcctttgatgattcttccttacctccttagattcttactgttatagggcctcagaccttggatttggacctcttttttttccatgcttattcctttggcaattttacccagtcacttagataagctagatagctgccaaatgaactctttgatgtacatgttccaagggggaaggacacatatcccattcttccccctagactttcatttttccatggtatttttcatcttatttgataggatttccatcctcctagttgcttaactgcttttctcaatctgtacatcttctcctcagaaaatcctagtggctctaccttctgaacataccgaaaataattattaactccaccactagcaccctaatcccaaagccaacatctcttttctgcatatttacagaagtcttctaacttatcatcctgcttttgccctccctgttcttccatttattttcaattagagcaggcagagtgatctagcagattatattactctgctcaaaactattcagaagcttttcatctcacctagagtacaagcccaggttcttacagtgatctcccattattttgttaatctcatgaactccagcttttccttgttcactccacttgagccactggctctttcccaagatagctgcatgattcgcttactcatcttattcatatctttctgaacctcagctttttcatctataagaaggggtttttagttggtatttttcttaactgggtttgtaagctttaacttttgaaacatttagccaactgcctggtattttaaattctttgctataacttttgtgcttcaatatcctcatctgtaagatgagagtaatgaatattacttacatatgtactgagaggattaaacaagttaatatatgtacagcactcagtacaatgaccagcacctagtaagcactatatacgtgttgtgtgttattatgaatgttatctagtttatatggcactttctttctagatctgagaaggttaattttgtgctgcatcacagctttttatacttagggcttatgtctgcttgcagcaagaatttacccacacaatctatattctttataagaagcctgtatgtcagtctgcttcttaactaactcattatcagtttggcaacatccttttgggccaaggttgcaaaggttgcaaatctgagtcagtgcttaggtctccctgaacagtatctctccctctagccttccagaatcctggagtgcctgctttgccacacaatatatgcacaagattatgattatagattaaggaatgatttacaaacaaaaaataaaaatcttatggatctaaggagcaatataattgaactttatttatggttattttttttccattctatttattagtttctctattgtcgaatcaaacgtccttaaaggagtaggagaaattcttattttttataccagtcactttcagtcttagtttcattacaagttctaatgtaggtgtatcattcaattaactactctgttatctctgaaagcctgcatgttagaaggcaatgttgtatgttcttgcagtttcatagtttctgaagagctaataaacaacaaaactacaatgaccaactaatttacacagttttgttattcttatatgtatatgactggaaaataaatactattttatataataagatgtcatcagaatataaaatataaatataaaatatattttatattcctaatataaaatataaatataaaatatattttatattcctaatctaaaatataaatacttccagtaattaagtaattccaagagatctcaacttaggagtcagtgaaaaaaagatctagaaggtttatatttctatcattacttaattatacttcagcaattttttttattacctccaggaaaataattgaatcatcgaagttctacagcttaagagatatgttacttttcttcattgtttcttgaactgactgattcttcattctaaatattgaacattctcagctattgaacttatattaaactttactctctacttttctgtcattaagtagaggagctgtttggtacattacttgtctttaagcctagaccagatatactctactactaatttttcttttattataaaatttatactatgagttactataaatagaggggttgtgggtattaaccacatgtaaaaaggttgtttactttctaaagtatggtttgtcagggggcagagtgctgtactagcagaacaggggctttgttgatcatgtgacattgagcaacttgtgttttctcagcctcagtttctttatacttaaaattagagtcagagttatgtgaattttaggcaacaatatatgttcctagtgcttagaaaatactagtccctgtctcattactcctttctgtttctttacatctcaccgagtagaatgggtaacaaatgaaatccaaagtagttatcatcattagctagagaaacccaaaatttaagccattctccagtattgataagaaatctttaagcactagagcagtgatctagctgctcattttgtattttgaaacatattaaagcataagctgcttctgccagttgtaaaaatataacatatcgaaatatattttcatttcttcacagttttcctttatatttaatgataaaatgagtatattaatccattcatgcactgctgtaaagaaataactgaggctaggtaatttataaggaaaagaggtttaattggctcatggttcagcgggctgtacaggaagcatggcagcatctgcttctggggagcctcagaaattttactcgtggcagtcaaagcaagtcaaagcaagagcgagcatcttacgtggcaggagcaggaccaagagagagagcggggaggtgccacacacttttaaacaaccagatctcaggataactcactatcatgaaaccagcaccaaggaggaaatctgcccctataatccaatcacctccaccaggccccacctccaacattggtgattataattgaacataatatttgggtggggacacagactcaaactatatcaatgagtaccttacattttattattttgataatttggatacaattcattaagctttattacttataaaatataagagtaaaatatgatatctttaatatacataaagaaacaacaacgattttattttaccaatcaagaatataaactgctgacataataaaaataaagtaaatgttaaaagtttgattaggtccaaaaatcagaaaatgttgccaaaacaattcactggaaatctctgtgaatagtctctttaatatttttgtatattagctgtgtaattttcttgtgctttttttctcctacacaggagagcctgacaaggagctgaatcctaagaagaagatttgggagcagatccagcctgatcttcacactaatgatgagtgtgtggctacatacaaaggagttccctttgaggtgaaagggaagggagtatgtagggctcaaaccatgagcaacagtggaatcaaataaaatgcttccactaccaaaagacattagagaaaaccttaaaagtaataaagagaaatatatttgtcacttatacctaaaatatgagtggctcatttttgcattactctcttctagacttgactagtcatttacttggtatatattgttttcattgattggggaaacactagatttttacctcggtttttgatcatttataatggagagaggaagttgcctatgttttgtaataatttattttttagcaggaatattgattagcagcttttttttctttatacacatagataactaactagattaatgtttagtttcttatttgtaggcacaggatgcatgaaatttcaagctctgggattttttgtatattgtgtatctgtatcaaaaatatcctctccttttcaaaaatgacaggttggaaaatgtttgtcagacttattaactggtcatattataataatactgataatgaccaactgctcattctgaaagccaaacataaaagctaggagaagtggcatctgaacatttttgctttgctgccagagtaaccctgactaataatacaataacagcaatttttttaaaaaactgagatttcctactggcttgaagtttttctatttagcaaaataattagtaataagttttgactaggtctaaagaatgaacacattgtaaacagttgccacagtagtttctaataaattgatcataaaagcagctatcctttttttttttaattctagcttctttttaaagattatttgggtacctaataaaggataatttatatcttattacagactgatattttgctttttcatgtgtcatcatactgtcagtatattaaaagaaattacagcctaaaacttaacatataccatacatatatattaaggtgtcaaatagctattctcactcatcttacaaatattgtaagagcaataaaaattaattgaggaattataagcctacaggtcatcagccttgaggtgattactgatgatttgggcttacacacatgtcagcaagatagggagtgtggataggggagggctggtagctaacaaggggcctcacagagaaatattagtgactttaaccaggtttcagaatctgggccttacctttacaggttcaacaaaagaatggcatcaatagaggcagaagtatagacattgttttaaaaatacacacatgcacacacacacaaaacattttagcattatagctgtctgaatccttcaataagaaggagaggcacacacaaatacacacactcacacaaaactcaacaaccataaaacaaccctgcatgttataaaaggcagaattaaattttatttatttaaatccatggaactctggtaggccaggatatattatagtaccattatcaatgtgatattctgaaaatatgaactgagcgtcattaacaattgttggtacctaaacacaaaatgaatttcaaaagttactttgttctcaagatatgtcattcttttgggaataaatacttctggtgacaaa

SEQ ID NO: 37 - DNA, 43356 bp, Homo sapiens
actttcagctccagctcccgccaccgccgcctgtatcgccgccgccgccaccacctcctcttcgttgtcctccttcctcctccgcctggcagcgttgttctctgcagcggaggagagaagtgctatgtcaggaaagttccgggagggactacatggagccatgctccctgggctcttccgcgggcgcccgcgcgctgcccttcgcttgaggtgaggtgaggctcgggatccccggcccgcgatccccggcccgcgggacaggtagccgctcggggcggggagcgcttgcatccgctgcgctgggcagggcgagcagtttggcggagtgcggggaggaatgaggctggagagaccgaagttgtgccggagaagcttgggttttcgggagggtttttgcagctggactggagttatttcggtcggcgccacacggtggggacccggcggggactcggtttctcccgggccgcccgcccccctcccctgcccgtctgagcggttaggccttctaggaaaacggtcggctgcagaggggcaccccatgccggctcctttcctgctgggctgttctggttgagaattcagtgctgggagtgagaggaaggagatgagctccacttgaacttttacacggtggtctcgctgcttgagggctgaaatttaccttgtttgcgagagcgaaaggtcctttcgcgctccaacagttaagagaggttccctcttccatgtggttcagcttgcggcgctgtgtgttgcatccttggccggttttcaacgtcgccctgatttcagtcttttctcctctgccccttttcggaaacattcttctttttaataataaaatatgttgtggaggctcagagtgcttaaaaaaaaaatccaacaacatatctttatgaaaatttcccccagggcttgcccaaattttcaaagagatcgtttagtcttggatgagactgagtctcgacacttagggaatacaggcatccctatagtagcatgcaggtttttagtgaggtaggatgaagtttaaaccatatgtttttaaaataggatttctctttgtttattgggtgagcttgtttttcattatgtcttagattaagaagccttcaaccagttctaggagtagtgtttctaagaatcatggataaaaacctcatgtttcttgcataagctgatactgcttcagacattctaatccattgacgaggtatgtaatacgtgtttcatttaatgaaacctaacataaaagtacatttattgcagacgtggataagttttttttcccacgtgtcccgtgggtaaaggaagccccattttctcacacccctaggtctctgccacacctctattcctgtttgccttattcactcacattgccaactacaaatctaaggtgctgatgaaaagtccctatattttgtaaaatgttgcatagccaaaattttagtgacataattgattacatcaattatgagcattcagatcattttgaacaataaaaacagaatgtgggagcttatttaaataaaagagtgccttgacgtatttctggtatatgcgttacgtacaattttgtgtgtgaaaagtatactaccaaggcagacgggatagtgtaggaaacatattgtttgtaatgggaagttttcgaagaaaatcatcccagaataaccagtaatactgtaaaattttgtttgggatatagatttttatctctaagtacagttttgtcactttgctgtaaagtataccagtaccgaaactcaaaaaaagaacccaccatctcaagcattttctgaaaatttcagcaagctgaacattcttggagaaaaatttgcttaggaaaaataaacataactaaaacccctatgtagttactgttttaccttaagtttgctggactgcaagcaagaaagtaagaatttagtgttcctaagtggatgtgacttagttcctagagttacttgagcaccttgagattttgtttatggtttatttaatttgggttgattgttttgtgaatgagtattttggaaatgatacacacagaggtggatttgtatatgtatatatccatatcacacatatatctatatttatgtatccatactatatatagtataactatatataccatatctgtatatgctattgagtatataaaaaacatgaaaaccatttagggacctaataatacatgtgcaccaggaacagtaggtctaaaatatcagctaaaaatagttattgctagggcttgtcatcttttcagcattttagtcaatatcagttaagttaaaaagcactggttttcagtatgttctcgaactcttaacaaggcttggatcagggaaccatatcctaaccacatttatctattcaaatggattgaattaccctgccaatggataattgaaccaggcatttcttaagcttcaataggcaaattctaggtaaaatttagtttgtcaatatagtgttttcttcttttaatacttcaaaaataacctttaggacattcttcatagatctgggatttagagagtagacctcaaaggcatgagaggcaaaccttggggaagttctggtactccaatttgtgaaatgatgtcttaagcacttgatttgagagagggacccattaatgcttggaaaaacaatatgtataaatacagtgctccagttactacaagcaaaactatttcattcacctttgttatgtttgttaccacatttcacagctgaagctgctatatttcagcttatgtatgaaaattagaaatgaaatgaagtaatctgttaggcggtttttttttctttaatttgctagctgtttaccagaaatgtgtttatatttgctgcaaatcacctttactttgttgcaggtggcactttttcctttttttttttgcaactatgacatatgtatatttaggatgagttcttagtgtttccttgaagacacatgaatgagtttcacagagtttatgttgcatttcttcaactttcaaaacacaacatttgagatgtttgactaccagcctgagatcatagatcttaagagctgatgtgatcctggtcagttatagtttcaatttccggggaattttctgtttaaggttagatgtgccctcaatttgaactagatgatccacaaaattggtacttttgcaaccacaaaacatgagaacattccaaatgatttgaagtgtgggcagcccaacatgctttaggatttggttggcttgaggcggtatgccatgcttgtaaaaatggtttctgaagctgacagcaagctgtttcaggctttaagtttgacacataggataaaatgcattctagcctctgcaccagtaaatatggacaagatttgtatccacttctgtttgtatgacagaagattcagaaaactcaagcgtgaaactctagcttaatacacaggaaagctcattcatgttcattataaacataatgaagagttagaaaagttggattttaacacagctctcgggtcttggggaatagatggtatatttgcaggtatgggggcaatctagtggtcacctattgaaattaataatagggttattattatcagcatttcctttgagtgatatgctaaagaattacatcttcccagatacaatttagaaaaacccccagccagatactgtaccaatcacctggcatatatattaattgattcttagatcattttcaaattcttaacatcattttcaatttaaacctttatgtgttattatagttataagctttacataccttttagggtttttgagcaaagcttcttggttaacttctttctctcaattgacttagctcagtctatgttattaaagcatttgaaaaatattttaggcaaattcttttctgtggaaacttctaaggatcttccttggggaggctggtgcagaagggacatgattctgtattctagctgttacctttctcctaaaatgaggcatctttacatcttcctactttatacaatataaaacaaaacaaaaacaaatgcgtaggtaactttagagagagaacatttgtaggcatttaaagaagcctgaagtttagatcagagtaagagtttcaactgaaaattatttgagaatcaattaaatctatcccatgtatttggtatggtatttggttgaggctgtctggtgcaggattttttgttcaagttgatcctgggaggatgtggatacaaagggagttggggtgtaggcataacatccattgtcttcaagagggaaaaatgttcaggtaagtgggcttttgtagtaagatccattcttttcatcattgtaacttactccatttcccctgtatttgaagcacacagtcttcctactccattttgattaaccctgcataaaccacgataccttctaaagtttcacactgtctatcactagcagaaagtctgttctctcagcttgttcctactcagcacttcttcagatgtttttccttcttttgcattattcatttcttgaatgataggagtttcgagtataagttgaatatcaggtttctccattttctataaattggataaatttgcacccacttacaggtttggtgatattgggaacttctcatttttgtttctatagttcatgtatagttactatttcaaggtttcaaatctgttttttttttaacttgtatttaagttcaggggtataagtgcaggtttgttacataggtaaacttgtgctgaggggctctgttgtacagattatttcatcacccaaatattaagccttgtacccattagttatttttcctgatcctgtccctactcctaccctccaccctcatgatataatagatttttttcttactttagaagtttttcttgttcattataggaaatttagaggccaggcatggccattcatgcctgtaatcccagaactttgggaggccgaggcgggaggattctttgatcccaggaattggagaccagcctgggaaatatgaggagaccccgtctctccaaaaagtaaaaaaaaaaaaaagttagtcaggtatggtggcacgtggttgtggtcccagctacttgcgaagctaaagtgggaggattgcttgagccctggaggttgaggctgcagtgagccgtgatcataccattgcactccagccaggacaacagagaaagaccctgtcttcaaaaagaaaaagaaagaaaagaaaatttagaaaatccagacaagcaaaaagaaaagaaaagaagaattatacccagatataactattattagcattttggtatctatttttatatacatatagaaaaatactatgatattttaatttctaaaaatggcccttagtgtagatatatagctttgtaatttcgtgtaaagatgaaccacttcccttgtcatggaatgatctgtaacatttttaattctgaataatattattctatggatgtatcatagtttattggggatataatttttttcttcagctgtacagtaatgactatcttacagtgcaatttttaaaaaatttttatttatttattttttattttttttttgtgacagagtctcaccgtgttgcccaggctggaatgcagtggcgcgatctcggctcacagcaacctccgcctcccgggttcaagcgattctcatgcttcagcctcctgagtacctgggattactggtgccgatcactgtgcctggctaatttttgtatttttcgtagatgggggtttcaccatgttggttaggctggtcttgaactcctgacctctagtgatctgcctacctcagcgtcccaaagtgctgggattacaggtgtgaaccaccgtgcctggctatagctcaatttttatacatacctatggttattccctttgggtaaaaccctagacatagaatttttggggaggaataaaagggcattgatatttttcattgccctcaaggcactttattattcccaatataaaatctgtagagctaatcattgtcttccctgtttatcttctacagttttttttttttttggtaagtgtaatatgaaagagtcaagtcagatagggtttgaacccagacctgattgtctagtgctttttccaaatgaaataaccccattttatagagatttagcctcaatccaaaaccattcatgagtgctcagttataactataaatgttacctccagctaaacaggtagagtagttgagtgtgccatgagaatgctgtccctttttcaatttcagtttactgtattgccatctgccctcttgcccacacatattgatacataattgtggaataatagagtgaatgaatgtcatttcctgtatagtcatctctaagatgtaaaaatattctgttttctgcactttgctgccaactcctggactcttaacatttaaaataaatttggaaggtttaaatttacaaaatttagccttgagctgtgtgtatatgtgtatgcacatgtgtttgtttacatctatattttatctatgtgtttgtatctttctttctttctgtcaataatatgaaacttcgtcttagccagaaattaccttttgaaatcagttgagtatcactctggctactacagaagcatgtggtcacttctagtaacaaaactagaactataaaatgagcaaaagtcaggaaaaggtagaaacttaaacactgatggctaaatttagagagaaattctcccttttatttttgaaactaaaattatctttagccattaaacatgttccaagtgaatgcagttatatttgcatttttcatttttagaatttggttctggatgtagaaggtaaacacgcatgtactcccaaatatgctttctgggacagttactgttttccagacattgttttcttcactgtggaatagtttcctttccttctttctctaagtcaggcttaggttatctgctcccttaatacctggtacttacctctgttttagcacttggataagtgctaaatatgctttttgtttaagtaagtatcattttcctttttactatctcaaataaaaggaactatattttcagtgtggaatgtaacaggcatggataggttaaacaggtaaattttttttcatgaggtcttgtggatgttcactgtttataggaaagttcagaatatcctttagaaactgattttgccatgttacttttaaagaatgtttattgtgatgtacattgtacatttaaaattgcatgaagcatacctttaagtttaaaaaattgaatactcatggacttactactaaagttaagaaatacacctagaattcctctgtctactcattcctcacatggaggcaactcttgctttatcaaccctctttgtgtggttatttttggccttttattacataaagggaattttactactgtaaatatttatacttttatgcttgcttcatttgctcactgttatattttttagattcatcagtgttgtttgtagctgtaatttgttttttgttaatttattgtatataatgtataatatatagtagagatgatcagcaaagccgaaagttgcttctttgaaaatatttatatatttgtttctaacatgttcatttttactcttttttttcaatgtttttaggtttatttctgcctttattctaattttttaggttgagtgcttagctcagttgtgagtcttgctttgttcagagtgtaaatctcgaatcatcactttagctgcttatgttttcatacaattctaagtattttctttgtttttaagacaggttctcattcctttgtcctggctggagtgcagtggtgtgatcatggctcactgtagccttgacctcctgggcttaaacgatctcctcacctcagccccctgaataactgggactacaggtgcatgccactatgcctgtctaattttttttatttttattttttgtagagatgaagtctcactgtgttgtccaggctggtcttgaactcatgggctcaagccatcttcccattttagcttctcaaagtgtggggattccaggcatcagccaccgtgcctgtcctaagtattttctatgatttgtttgatccatgagttaatgagaatcatgtttcctaatttctaagcatattttgttgtggttgtaggtgatctctaaactatttgtgatatggtcagaggatgtggtctgtatcttaccagttctttgatgcttgttaaggttagctccatggacaatggcaggtgttctctacaaataagtgttccacgtgtagctttaaaacgatgtgtattctctagctactggatgcagtttcatgtgtatctataagatgaaaattttaaatgtgctatttaaatctttatccttcttcatgtttttatctacttgatcatttaattactgagagattataattatggatttattattttcatctggttaattcaccttttactttatatgtttttgaggtttattattagatacatacaagtttagatttttaaatatttttgtgggaaattaacccttttgtcatatgtcataccttctgtatctctaatagtattgtttgaattaaagtctctttttctttgatagtaatacaacgatgaagggtcccctatagattatgatgggcttgacacacctttccctacttgttggctttaaagttggatctatatccttatgattttagatgtgtctcttgtaaatagcatatagctggatctttgcatttaactggagagtttagtctctttatatttagaatgaagactgacttggatttatttatcatattattatgtattttctattctgctttttctttgtcttctttcctttcttgccttcttttggatagactgaccctctgcccctaccattttttttttttttttactgtttttatttggggggtcaggagattacctataagttctacatctattattttagtggttacccagacaattttaatatatactctttctagtctaaagttaatatctttgccttctattacggaattgaattgtatcccccaaaattcatatgctgaagccctaatccccaatatgactatatttggagatagggcctataaggaggtaatgaagattaaataagactataagggtagggccctgatccaataagatctctgtggaggtacagagatctctctctccctctgcatacacagagggaaggccatgtaagatcatacgtgtctacaaaccaggaagagaggcctcaccagaaatgcatcccgatagtaccttgatcttggacttctagcccccagaactgtgagaaaataaatttctattgttcaagccacccagtctgtggcattttatttcttaggaattgtttaactcttatgataccttcctccaacttgcatgtcattgttgttgagtattttagttctagcctgttttttctctctcaagttagaaattacttttattgctttatacagtatctgttatatttagttctttattcattattatctttccacccagtttcttcttgtctatcagaccttctatctgggatcatttcttttttgcctgacatatatcctttaattttcctttactgagtgtgtgtgtgtatgtgtgaaagagagaagagggagagagagagatttttgtttgtgacaatccttttaatttaatttaatttgctgaaaggaagtatcaaaaatatcatttcattgtcttctgaattttattattatcattgagaataaagcagtcaagctcatttttttctttgtcagggaatctatctttccaaactctggttccttctaagatcttttgaagatactctctttctccttgaagatattatctctgtctattctgaatttttgatctgatgtttttgggtatgaattttaacatctcttatttggcattagataggctacattgaggactagcatttttcaggaattctggaaacttctatttacaatccttttgaatattttctcattaattttatgatcttctggaactccaattccatgtctggtagactttctatgtttttcttccttagttcatctcttttatctttcattgttttcgcttgattgtatttggaaaaatttcttatgttctaacttgcagtttattcacttcaactatgtctaatacgccactttgtcgatttagtttttaatatcagttatatttttcatatatggaactttattttcaaatctgcttgtcttctggtcataattctaaccatttattatttttatattctttgtctaataattttcataactgaagtcttttgtgagtttgtctttttttccccttgcccttaatcactcatgttgctttattttgctttattttgaggtttttgtggtttttttttttttttagactgtgttcacttgccttggaactttgtggtaattatttcaggcctatgatgaaggtgagttcctccagaggggaaatacatttgctgttgcctgctagcttgggtgctgtactgacttcggcacattttaaatcagatttctgtttgatgatgctttatttcttaaaatgtaccttgtggttacagatcttttgggagagattattttcttttttccatgatgtattttcttcatgcaataaaatataatttttatttccgttttcttttgacatggtagagtttattttttgttcacttttaccctagcaaatattggccccatgaagtccctggttgccattgaggtcttctgacaaatattctaattctgtaatcgcaactcaaatgcttttaatttgactatactaaagacactattttatttctgggatcataaacatgtataaaatagaatatgtttgttattcaggttaataagcagaccttaactaatcttactgtagagtgtttgcttttgaaaagaaaaagcagacattaatgtattacaatatgatagcaaaatacctttctctttttaatttcaatttttaatttgacatttttctttgttaataaattagaaatttctgtatatgatgttgttgtcagcactttctgttcttgagtctcaaatttcattttgtttacagtcatttagtatttagttttgtattttattttttagaaagttattaccagctccttgttttaagtttggtttcatcttccagctggaaagacactgccagtcacatttagctttctgttccttcatatatctaggctttgcctttaaaatggtagtaggtaaagttaaaaagccacccatggttcacagattccttatttatattctcaaaagcaagttaaagatggcagactgcagggttcttctgggtacttcacttttaaaaatgaatagttattttatgcttatttgaaatggtacatcttggtaaacattttaaagaaatgtttgtttttattctttttattttttatattttagtttttataacatcctcaaatttttacttttaatcctacatgatatggtgatgtggatgcagccttggttatgatgaacagttagttactagaaagagttgaagaacttcagcattatatctctcaatactcagttgctgtaggttaacaataaaagcaagtatagtagtaaatgaagctgaataaataaaaaaaaagactaaggtaattagcttgattatttttggggaatgattccattcatcaggtgattatggactaaaattaagcttccatgtcataaaattaagcttttactattttctgtgctctttttacattttcagttttaaagtctttttgtccttttacttttcctcaccttgagtaaacaggcaccaaaatggaaataatctttgaagcatacataaaagaatctcactttggtaagatctttgctcatatctagattctaggttggaataaagttcctgaaaacagtccctctagtagctattttttttaagtaggtagaagacactccatatcaaaagccacattttataaagaatccattcagtttgtggcccttgtaggagggagaattttcttttttatcttatacaaacttgagagttgatcatttcactgaatgttgtttctcccagaccctatgttcaagtctgatttttttcctgctcaattccagtgtaataaatattctgcatatgagaattttcacatttgtttcattacctattatacaaactcagcatttgggctacattgttgcagtggttcccgccctaattgaatatatattgagtatacacatacatacacatatacacatcactttctggtgttagtcaatctctcatgggccctatttgctagaagaaataaaatgaggattgagcatgagtgaggtataatacaaatggaaaaactttacataagtttaagcagtgatatttataaacaatatttcatacttttgtttctgcacctttggtttgagagaaaatccaggaattgtgtttctgactattgtgtgcacggtgagccattgaatttcctatgggcctttggtcttaccagtcttaatatcagttgcgtcagctctttgtaatcttgcaaagcttttagtgttgctttaatctttgagcagagaactagaagactagtggcaggtgtcttactatgtggggacaataactcacgacactatcagtgggaaacccagtaacaaccaaacaccacaacctcccactggaccctttctcccttgtgactgtggtgcatgatgataaattgttctttggtgttaagaacacagccattttatcattttttttttttttcatttttttaaaagttcaaaatgaatagtgcaggttttaagacttttttttttttttgctaaggcgtatttttggtggggagtgagcagggtttatgttggtaggtgacatgcagtactttgaatttagaatgataattatgtagcccttttacttggagtagtcctttccatttgttggttgcacaggaaacttgactgaatattaaaatttagaaatagtagaaatgggattgttttagaggagttagattttgtttagatgaattctgctttatagcaggattcagtagagtctttctgctagtgaggtttcaagaaacattaaatattcttgaatttaaaatggtttgccagcaatttgattttagaagactttttttcaggaccacatgcatattgtaaaaatttatctattatagtgaaagacatctgtttttggtctttatttattttctttctgctcttattccccaggacctattctttcccactctttgcctaccaaactataacaaataaactataacttccaagactaaaatacactagtctttagcctactacttagagattcatcttagtggataataccatactatcatagagcatgagatttagagagtgttataagaaaacatgtacacataaatgttctgagaagtgagtcatgaggcaatttcttcattgtgttaacgtcatagtgtgcacttacacaagcctagatggtaagcctgctctacacctaggctatattatggtgtaggctattgtctctgggctacaaacctgtaaagcatgttactgtattgaatactgtaggcaattgtagcacaactgtaagcatttatatatctaaacgtaggtacagtaaaaatatggtgtaaaagagaaaaaatggtaccccatatagagcacttaccatgaatggagcttgcaggatggaagattactctgtcaatgagtgagtggtaagtgaacgtgaaagtctgggatattaatgtacaccactgtagactttataaacacaatatacctaggtaacactaaatttatttttaaaatttcttcaataccttactgtaaattttttactttatacacttttaaatttcttaaaactttttcattttttgtaataacatcttaaaacatgaatgcattgtacatttgtatgcaaatgttttcattatatctttagtctatatgcctttttctattaaaattttgttaacttttaagcttttttgttaactaagacacaaacacacacaataacttaggcctacacagggccaatatgactgtcttccacttctatagcttgtcccaccggaaggtcttcaggggcaataacacatggagccgtcatctcctgtgataacaatgccttcttctggaatacttcctgaaggatgtgcttgaggctgttttatgttaacttttagaaatcttaataagtagtactctaaaataaaaattaaaaatatagagtagtaaatacataaagcagtaacatcctttattatgtttgttcagtattatgtgctgtatgtgctagacttttatacaactggcagcacagaaggttcatttatgccagcatcactgcaaacacatgaatattgtgttgtactacaaagccatgatggctacgatgtcattaggtgataggaatttttcagctccattataatcttatgaaaggaatttttcagctccattataatcttatatagtggtctgcccttagctaaaatgtcattaaacagtacatgactgtaaatgaggaattatgttttcactgtttttcactcttgtagcatcctgagtttttcttcacagaacatacatcatggcataacccagtagttaccatgtatttagtgtgagtctccctgataaacttgtaagttacataagatcaggagatatatccagtttgtttcccattgtaagcagtgcttagtcagaagctggcttagagcaggtgcttagcaactgtttgttaagggaaggatggaaatgtatttaaagaagtgtgtaagtcaagttgaaaagtatatgccaaagatttatatagtatacatggatagcgtggtggaagactgagtatcagggaaagatggcaagtgaaggtaatttcagttggcacatgatgacgctgtcaacatttcttttgtctttatctggtggccactttgaatactaaaactgaagtcttatttcatagattttaaaattctaagtatttttagtatgacctttagaacctttttttcggaaccttcccaagttaaccataattattttgatcatagcagtgaatcaaggtcaaaacagatttgccgttttttttgaggatgagtcaacattgctcttcaccaatcctattttgaaatggtgtacgttagagcagaatgatctttatttcagtgatgtttcccttgtgttattttctggtttcccactcatgacaaaatttcatagttctatatttttctttgtgttcattattggaatttgctatggtaatgcattacatttacatagtgcaagaccaaaggactgaggatccatcctttgatttttttttttaagtgtgtgtgtgtatggttgactgttgtatatacaatcatgaggttatttgaggtatctgatggtgttgtgaaggtcttctgattctacgttctatgaaatttctattatatccttggaaacgaggtacctggttgatgggggagaggtagggtggtagggtagggagtctaacagatgtgtctgttacgccaagagattatgcttgaaccatctcagatagtcatgttatctgatgtgggaagaaagaggagaccgtggtatatatatgtatgtctttcacttgtttttagtagacatcatgtcatatatggtcttggtacatgattgttgcctgagacctatttgttgaattgacttggctggagctctcagggataatcacagtcagcaacaaaaagtgttattatgaaaaacaagtaagtcagattacagttgcatctggggatagaggaataatctgggcatagttgtagtagactattcctagaaagttgagtaagaattatatagaattctgccactgtttaaagtagtgaaaagacaaaagaagctgtaccttttttttgttctgaaaagagatatttgaaagtcacttttctgaaataaaagggtgagttagaggaagagaaacgaaggcatctgatcaaaatcacagcgcagaatcttaaagtgagaaagaggtttaaactcagtttgaggtgaggtatggaaaaatagtcatttgcaaggatgaaggagtagaatcctaaatgtcactgaaaggttggtgttgtagaggatgtgattttcttttctgacttaagtgaaactgctagtgcgtatgtattgagcactatgtgtcaatacttgacatttgctatctcgcttaatctttgctatagcttcatgagctaaactgcactatgatcatctccatttttctgatgaaaaacctgaggttcagtaacctgcccagtgacacacagtttgtaaatagcaaccaggccctctgaccactgccaaggtgggcacaatgagcttctggaggaagagtgtgggagtgctcaatagatagactattgtttccccgactgactttttattccctccaaagaacacgccaaaatcatttgtagtgagaggcagtgaagagagtaccagcatttttagaagaaataccactgatatgatggtataaacatttagttttgattagataaactaattctaagtccttggaaatttgtggtagattaaggaaaaattaaatgtctaattgtgaagataggcatatggggtcagatgagtacagagttgctaagggaacaggttaaaaaagtgagtggcatgctgagctctacccagaaattcagttcaatgctaaagctggatgaaaaaaaaattctcgtggaatagcatgaaaataacaaaataagcatgcttttttggctcattttgctttttttaaaaaaattacactgattctgaggtaatatttgtggaaaccagaaaggtgacctagagattaatataaaaagataaagactgtttttttagattactaggtaagtaattgcaggaaatatggggtacacttaaaagtagtgactaggtaaagcaccatatttaaattttattctttaggggataacaaaatcctattttcataagaaacatgtgccctttaccgatgagaatacatttcttgcataataatagtaacacttacttaacaattgccatttgagtagttcctcctgtcactagtttctaaatgtctaaataccttattttgttttacccatggacagcaggcatgatgagataggccggagaatgcttattttgctgtcttaacgtatttcctaaggaacagagttttttttaaggaatatgttttatgatcattgaaagcaaatattaacatatatttataatatgaaatgttcaagaagattttattttctgactataagaaaactactcattttacaagatttggaaagtaagggaaagaaaagctggaggagaatgtaccacagactgtcctactggtcgaattttttttgttgttgtttgttttttttttttttttttgagacagagtctcgctgtgttgcccaggctggagtgcagtgagcgatatcagctcactgcaagctccgcctcccgggtcgacgccattctcccgcctcagcctccagagcagctgggactacaggcgcccgccaccacgcctagctaattttgtctttgtatttttagtagagaagggtttcaccatgttagccagccatccctgacctcgtgatctacccgtttttttttgtttttttgttttttttttggcaatttagttgggtttttctttttctttctttttattttattttactttaagttctgggatacatgtgcagaacatgcaggtttattacatggatatacatgtaccatggtggtttgctgctcctatcaacccccatttaggttttaagccctgcatgcattaggtatttgtcctaaagctctccctcccctgtccccctgcaccccgacaggccccagtgtgtgatgttcccctccctgtctccatgtgttctcattgttcagctgccacttaagagtgagaacatgctgtgtttggttttctgttcccgttagtttgctgagaatgatggtttccagcttcattcatgtccctgcaaaggacataaactcattcatttttatggctgcatagtattccatggtgtatatataccacattttctttatctagtctatcattgatgggcatttggtttggttccaagtctttgctattgtaaatagtgctgcagtaaacatatgtgtacatgtgtctttatagcagaataatttataatcctttgggtatatacccagtagtgggattgctgggtcaaatggtatttctggttctagatccttgaggaatcaccacattgtcttccacaatagttgaactaatttacactgccaccaactgtaaaagcgttcctatttctccacaacctctccagcatccatctgttgtttcctgactttttaatgatcaccattctaactggtgtgagatggtatcttgtggttttgatttgcatttctctaatcaccagtgataatgagctttttttcctatgtttgttggctgcataaatgtcttcttttgacaattgtctgttcacatcctttacccactttttgatttgttttctttttgtaaatttgtttaagttccttgtagattctggatattagacttttgtcagatgggtagattgcaaaaattttctcccattcttgggttgcctgttcaccctgatgtgtgttaatattttgatatgttctcttctaattctttgaaaaaaatttcaaaacatagtgggaacatattatgtatacagcttttcttcactcaatatgctagcataatattttcatgtgtcattaaatactcttcaaaaacagttttagttgctgtacagcattctattttataaatcacataattctgttttttaaatgtaaaccttaggattgcttcaaatttcttactatgacgtacatgaaaattttttttttttgaatgggagttttattcttgttgcccaggctggagtacagtgctgcgatcttagctcattgcaacatctgcctcctgggttcaggcgattctcttgcctcagcctcccaagtagctgggattacagacacgaactaccacacttggctaatttttgtattttttagtaaagaggggttttcaccatgttggccaggctggtcttgaactcctgacctcaggtgatccacccgccttggcctcctaaagtgctgggattacaggcctgagccaccacgcctggccatgaaatttttttaactttttgctcaggattactctggctataagggatcttctgtggctccatagaaattttagcattttaaaaaatatttctatgaagaatatcattggcattttgagagattgctgtgaatctatagattgctttgggtagtataaaattatttcttaagtatggatcctgagaagtaaaatttctagaaagttttaatatttttcataaactttttgaagttttacataacaagcagaaagacgcaccaatcatacgggcacagttcagtgaaatttgaaaaaaaaaatgaatatatgaacctcccagaaaccctttcccagtcataactcctactcttccccaaaggtaaccaataaactactaacatagatgaattttgcctgtgtttgaattttatataaattgaataatattgtatatacatatttgtgtctgtcttttgttcaatgttatatttgtgagattcatccatgtgttgcgttatagtagttttgcccattttcgtggctgtgtagtatttgattatatgaatataatgacgttgatttatcagttctattgatggacatttttgctgttctaatatttcaaataatgcttctaggaatatacttgtatttaacttttggtgtacaaatctaagtatttctgttcattactcaggagtgggattactgggtaacagagcaggcataactacaaatttaccatagacagcatactgttatctagttacccatttccactcccaatgaatgaaagtttcatgtgtaccacatcctggtcagtatttggtatattttatatatatatatattttcaactttagtcattctgttggatttttattttattgtgatttttatttgcatctccctgatgagtgttgaggaagaacatgtttacatatgttgtggattttgttttgtactgttttgttttggccgtttggatatgtttgtgaagtttttgttcaaatcctttgcctatctttcagcctgggttgtttatctttttcttatcaatttgttgccatttaaatatatatattcaaaggatgagtcctttgtctttagtgattgcaaatgtcttctgccttttggcttgcctttctgttcttataatttcaccttttgctgagtttatcactctttatagccagtgcttttgacatcctgtttgtgccttaaaaatatatttgatttggaaacttaataaatattaagaaacttaaacgagctaattagaggctgatatttggttgttatattggagggctattcaatttttttcttcatgcctattccaagagtgacatctttcagatgttgtttcccccaacctttccatgaacccagaacgccagcttccagcccactgagactgtgctctgcttagcttcccagcatttcagctgcctcttttaccagactttcaagcttttcagcagcttttaatcctttcagctgccactttgcaggctctcggtttctcagctgccttgagaaaacctctgagctagcatttcagaattagctcatgccttcaggtgaaaaataacacgaattgcagagtgcctcacttttctatacttcatttctctcagatcgtagcctctcaggttctccctgctttggtggctctcagatgtcttcaaagagatttaaaaatgttatccagcttttttggttgtttttggtgggagtgttggtctgctacaggcttgactttatttgctagaagcggaagtctctaggaatgtttttaaggctctctaggaatgtttttaaggctgttgaaatagcttcctgaattgctgtaagtttacattcccattggtggagtatcaacttgctagaattattttcatcttgtttaaacctttgaaaagctaggcacaaaattaacattccattatgtttgaattctcatttttacttgaatgagactgaacactgtttcgaacaatggtttttttgcgtcttctatttatgatttacttgctaatatacattattattcattgatttttaagaatttttaatgtgtaatattgcctgtattaacaaataagaatccatgcatttgaagatattatattaatagaccagaataattagttttttcattaatctttataatgttttaatatttttgaaggcaagggttgtatccccttttcttttgtattctgtcttggtatctggtatgtggtacaggtcatattaacatgaagcggatcgcatttcaaaaataatgtagagagaagagcaggaaacccttcaggaatgttttcttatgtcacgctgtgttcagtgatttatctgtatgaaagtttgtctagttattgatttatataatttcatttaggagcatcacctcaagtctaagttcatgaggcatctcattttttagctttattgatatatatgatatacaaaaatttgtacacatttaacatatacatcctgaagagtttggacatacgtgtacacctgcgatatcttcaccacagccaaggcactgaatatattcatcacctccaaaattttcctcatgttgttttgtatgtgtgtgttcttgtaagaacacaatatcagatctgtcctcttaatgtatattaaagtacacaatactctgttgttaatacaggtactgtgttgtacagaagatttttagaacttattcatcctgcataaaaaactttataaccactgaagaacacttccccatttctccctctccccagtccctggcaactaccattttattctctgcttctatgagtttgactattttggatacttcctataagtagaatcagagccattccaattttgagttatcttctttctcacatccatgcaaatcattaacttaagatcaaattctcctttgtgatgtatcagaaagtgcctgttttataaatcgccacaaatttaaaaggagaattatatgtcttggcttcctcacatgaagttaaattatctcgctcctggaagcattcatataaatggtgagtgtcaaccttaccagttgcattttgaaggagttgaagtgttagaccactttaaactgatttcagagttctaaagcatgcacataaaaatttagaaaatctaaaacattcttcattcccatagtttatccatagtgtttggatttcaagaaatcatctaaacagtttaattttttagtcagcagtatgaaaattgtgtctgagattaagggataatggaattttccttatccacattttggctctattaattgtgaaagtatgatataactcacagaaatgtccttgttttagtcactgccctacatttttttttggtcattttgtaaaacacattattggctctcatgctgcctcaggccctcagggaatggtgttctgcagaaaacttgaagcctttagggaaggctagtctaaaaataaaaccctcaaggtattagaccagggatgagggacagcatttttaacattgcaaattgctatattaagtggaatgaaagtaccgttctcttctgtaggttatgtgagaagcagcaaaacattttgtaaagagcagaaactttggagccggacgccctgggttctaatcacggtcctcccaccagctgtgtgattggcagcacattgccctctgagccttggtttaattctcttgaaaatggggaacataacttctgtctttggggtggtttgtcaggattagcaataatatatgttaaggtctggtacatggtagacatttaagaattggtagctataataattgcacatctgaaattttttttctttttctgggataaggctttttttctgcccctaatataatgatggctcaaagacgagaggcaattttacctgagttccaatcctcgctctactgtttaccagctatgtgaccttgggcaagttacatagtttccttgtggctcagcttcctcatctataatttacatttcctcctttgcttgaaaacttaaggttttatacatatataatattgtatgtattagatataaagttggagattgaacaagtctgtgggttattttctgagtaccattgaatgtcatttacaaaaagtatttttttcttttgctttgaagtaacaatactacaattgttttcttttttgttgcatttttatagtaatttttttatatcctacatttcaaatataccactttttacataaggttttgttttactccagtttagtatcatcaggtagtcttatgcagatgttcatatgatgccatctttatggctcacccttatgttaataaaccatagttattcctcagagacagagaatatataatcatagccactgctcagagataaagatcaaataatcgaagacatctcaaaagtaaaacaaacttgtaggggagactaaagactatgtaggggacttcaacaacccattctcagcgttagataatctagacagaaaattaacaaagaaaccttggattggacctaacagacattttcagggtatttcacccaacagctacagaatacacattcttctcatcagcacatggaacatttttctaggataaaccatgtgttgggatgcaaagcaaatctcaatagaattgaaagcatatcaagtatctttgcagatgacaatggaataaaagtagaaatcaataacaagaggaactttggaaactttacaaatatatggaaattaaacatgctcctgaatgaccactgggtcagtatggagttttctctaaaaacaaagaggagaactaccatacaatccagcaatttcagtgctgggtatatattcaaagcaaaaggaatttatatatccaaggatacctgtggttgcatgtttatcatagcagtattcacaatagcaaagatgtggaatcaacctaaatgtccatcaacagacaaagggataaagaacatgtatatgtacacagtggagttctatttagccataaaaaatgaaagcatgttatttgcagcaatatggatggaactggaggtcattatggtaaattaaataggctaggaacagaaagacaagtaccacatgtcttattcatgtgggagctaaagaagctatgtcatggaggtagagaatagaatgatagatatcaggagctaggaagataacagaagaggaagaggggatgaagagaggttgtttaatggatacaaacatacagttagatagaaggtagaagttctcatgttcaatagcagagtaggatgactatagttagcaacaatgttctttatatttcaaactaattagaagagagaacttgaaatgttcccaacacatagaaatgttaaatactctagatgatggatactccagataccccgacttgattattacacattctatacatgtaacaaatgctcacatgtaccccatgaataggcaaaatattatgcatcaataaaataaaaaaataaaaagaaatagaagtaggagacaaagggaatataaacaaaacctatcaccgataggacttatcacttcttttgctttttgcatttctaaaaggttaatctattagccacttaaaaatacatttttaaagtcttcaattataattaatttgcacttctattaaatgctgacctttcatgccacttgagtttcagttttgattgtcatcagaagtcacttagcatattctctgaaccagagcccttcctgacatttaatttctttttagtatttatggggaaaagtaacaggaaggcaaataaatccttgtgcttaataatctcattttttaaatgtctatggaaaaactaagtgttcctttgaacattagtgagaaaattcttcttttttgtggtgaatattgtggttagaattagaaatatgttaggaatggaacatcattataaatagaacactacttgtggttcatacttaaaatgtacacacagcattttttcctttagctttattgcatataggttttaggttagatatgccttgcaaataaggtaattttgatgccatgatgatgtgccctatataaaaaataactttaaataagctcttccctaccctgtctcactttgtgtgattattgtatattcctttttggtttgttttcaaagcttcctttgactctacttacagttaaaccagagaataagagaattaacgacaaaaaaagtagacattgttataatgatctaaatttatagagtattcattttaattgcaaagtaggttgcccaatgaaggtgattgccttttattttatttatttatttatttatttatttatttatttatttatttatttatttatttttaatgaaataaagttctgaagtgaaatggttgattctttatttctggttccacctttttcaaaacagaactcaggagtatacttccatccttgtgtgtccttcgactcccattcccccagttttaattagaatctctggatatgttgcaagggcctaatataggaaggaatataaatttatatgtgatacacttttttctttcctctcttagtttgcaattttatttctttcttagatgagaggaaagataggaatgaaggtaggaccaagtgaaattcttgttggctaagagtgtggcaaatagcagaagaacatgatgtgacatcttttctcttcaagcacaggctgtggcccagaatgagagagagatgctccataatgtcacaagagctctcctttctcttaggcattgttctttcctttagactttcattttgttcaagacaaaagcagacacccttgagtaacgccagtatttcacattcctacctgttttattctgctgtcagtaatgagttggctggaacgcgtgggttattcccagcagccagtttctgtttatccgttaggggatagaatagttttagaacagcaattttttcatagtggtgccactcgtttcttcccagcatcctgggatcagtggaatcaaggccaacctttagagcatatgcaatgagtacagcattttagaagattggactgagaccggggctggtgggatgtctctgctgggagccctgggaagcttgaacccaggtcctgcagaatctgcagactgtggtttgcttcttaccctcttttccatagagagtggcatacatggttattgttatcttaagcaactttaggatacacagctttgtgttaggtcagatatgttacaaataagataggttgcagcttgcatcctcaaggaattttatacaggaaacaggaagaaaagtgtgatagaatagtacaagatcaatattgatttaatgtggaaaaaaattatacaaaactgtaagtgtatggggaaaataatattttactcccttaatttcataccagaaaagaaatcccttttgtccgtttggtctgtttgtctatacctatgtacatatgcacaaacacatacatgtatatgcatatacacacacatctacatacatacataacaatgggactatgttgtacgtcattctgcatgttaattttttcttttttttttagtatatgatgaacattctctgctgtcactattctagattgacctattgtttgtgatagctgcatggtattcctagtatgtatgtatcacactttatttaactgttatcttttttttttttttttcctgggacggagtctcgcactgtcgcctgcgctggagtgcagtggcatgatctcagctaactgcaacctctgcctcctggattcaagtgattcttgtgcctcagctactgagtagctgggattagaggcacacgccaccacacccagctaatttttgtatttttaatagagacagagtttcaccatgttggccagactggtctcgagctcttaacctcaagctatccacctgcctcagccttccaaactgctgggattacaggtgtgagccaccgcgccccagtttatttaactgttatcttattgatgagtattaaaaagatgttgagtttttcactgtgaagtaatgctacaatgaacattcttatctgcatgtttatgctagtgtttttatcacgtagaattctagacaatatttaaattgtttaatattaagaaatactgcctactcttactcccaaaatgctgtaccagttcatactcccaccaataggctataatagagatattgattgcataacatagtggaagtctgtagaagattatggttataatatgttataatttgatagcactttgtagtttataattcactttcatctatcttatttaattcaccaacctatggtgtggttttatatctgcatctttgagataaggacatttgagagtcaggaaagttcactgacttgcctgaacatcttagttaatgaatgcaagggccaagactattacccagatattttttctctactttcgacatccttatagtaagataatttaggaaaagcttgaggttggccatatttagatgacattttcttagcatttgtgaaagttgataggttttatgtagtactgggttactatggatttgaaggaagagaaaaatgcagaaaatgattcagatcaaattgcatataaagagaacatacttagtgaaccatgaaagaattttttggttatatatacacatggtatctatatctatctgtagatatagatacatgcatatatctatatctaatctgtatatctttatatctatctaggcagcccagtgaattttaacatcaaggcagaattttgtataatgagtttctttctaagttgtaatgtggtgctcctatctcttttgcaagatttgtagtctgagtcatggtagagataacaggcagttagacacattagttaacatgcactctgaatacagggtcatttgaaggcctaactggggaggcaaagatagcaggattctcctagaggggttagagatggaagttgtagaagagaggctatgattctaatgggctggtaaagccagtgtactccagcttgtatgtggatccaaggatggtcttttattggagattagaaagggaggttggttttgaaaattttcagtgtagagatacagtcaaaataatataaaggaagagaaaaaggaaaggagcagaaaggaaagagaataaaaccatcttgaagaattagagatggcaggacgagataaagaaagaagctggtacaggaaggggaacatcacgctctggggactgttgtggggtggggggacgggggagggatagctttaggagatatacctaatgctaaatgatgagttaatgggtgcagcacaccagcatggcacatgtatacataggtaactaacctgcacattgtgcacatgtaccctaaaacttaaagtatcataataataaaataaaataaaaaaaagaagctggccctgtttagttgactggagttcagtgtaggtgtcccacttttttgctccttttctctgcagtcccagttttgatgaggactgctttgcagagttttatggaagccctcagcacttcagcctgtgaaactcttctgaaaaacagccaacatttatattactgcagcatcagaaaatccttttgggcactgaaagaattggcctgaagaaatctttccttttacttactaaatattcagttctattgggattgtagaattttcactttgtttcatgtgaaattgtgattaaaaggtggtcactccagttttagcaaccccatgggaaaactaatctcgttgctttggagctttattgtatttttaccagatatttgtaccatctgcattgggaaacactgagcaaattcagcactgttaagattctttttactgagtctcatttttttaaagaaaaaaagtatttgtatttttcatgcatatttagattccatatgtcatatatttttggcagacctagacttctgtaatcacggtatagagccctacatttacatgaatattctggtaaaaaaatatagatataatcctgattcatttccacatcatttctaaatttattgtaattgctttttaaatttagcaatatgtttttgaaaacatacatgtgatatgtaaaagaaaacaaagtattatgtttttctagtactagtggcatttctgtatgttgtattctctgttttacagcatagcgtagtggctaagaacacacttcctgggtttaactcccagctttgcccattattagtcatgtgaccttggacatgttacttgaccattctgtgcaatcgttccatcatccttaaaatggatattatagcagtagtaatgtcatagttgccgtggaatttttaaagctaacatattcaaagagcttaagacagttctttgatattatacttcctaacaaaactcaggagataaaaggttattcttaagaatgcagattgcccctttgaatactgaatatcttgatatgtctattcctttatgcttctggatacttaaaaaacaaaattttaagagttttgtttttgagttcctactgtttttatttgaaatgtgtaaccacagtggaggtgattattagctttctgattacttttctctgatatgtgtaggatattgtgtgaaaggaaggaggcacaggatactaaacatattgatattatgcttgatggcctaatttggtaaaattatccagcatatggatatattctaagaaaaacaaagtcaccaatcatggaagtagtccatgtaatccactcgtcaccaagtagctggctagtgtctccaggagattatgtcattttcaataggtttagttttggtccctgtgttgccacagtgagtatccagtggctatagccagattgatctgggtgagtggaagtccatgttgctgagcacatgtataatctctgtcccttctgccatggctatgttgttcatgaatcctttagggaaggacaggagtgactagagagagaggttgattgatctcaatagaataggtcatcttgtctgcctgattatcaagctcttcttttgaaagttgctatttggtgagcatttacatgactagccagtcaaaccattagctactgtctatgaatgaatgtagtttttcatctctggcatgaatttgtcaaaatgaacaaccaagtatactattcaaaatgttgcccactgggaggttttctctgctgtgcccttacgggcttccaagtggggctgtaatgctacaactcttcacccctgtgtggcaccaatttattgtgcagaaccatctgcacaataaatcaggccttaatttttttcttctttagttaactggtcataagaaactcctctcagtgaggtcacaggtgaagtttaaagagagggtcattacagcaaacataggagctgtgggaatctcagccacttgctcatgtaactgaactgtgccctgagcacctgccaggtctgatttcatacatacccttctgtataaggctaaaatgctccatgcaaacccaactgtatggcttcagaaagtcagacaacaccaagtttatgtggagcactcatgttccatagctttgttccaaaattctaaagatctggtctgacctttaaggggcctgccaaatgctatacagaatccctatgtgccacagacacctaaaacaccagtaaatctttcggctcagtggcagagcagctttcatagcagcccggacctgttgtggagccttctcttattattactgattactcaaatatggcagcttttcaagctacttgataaataggtcagaataacatacccaaatgaggtgcatgttgcctccagagtccagaaaagccagctagatgctgtgtctctgtattagtggtaggcaagagagctatcactttggaagggatatcttgaaatactactaagacccctagaaaatttaaaagatggcaggcctctgaatttttttaggactctttcttcactctgtcgcacatgtgtcttaccatgcatagggtatttgccacttactgtatagtcagcatgtaatagacagcataacattctatggactagaagtacaaccaaggtccctgtgaacgagattatgatagcgtgctggagacttgacagagccctgaggtaggatagtagggtaggcaaatgcttcaagtagtctttgctaacacatatagagaaaaccagaatttgacagatcaatagccatgtaccagatgccaggaaatatgttgattcgctccatcagtaaaaccacatctggtacagcatctgcactcttcaaaatccatctgttttgtacaaagccaaagagacaacttgaatagagatatggcagaaatgatcaccttcttcttgcaagtccttgatggtgactctaatctttgcaatctctgcaggaatgaaatgttgcttttggtttactttcataggtagaaatagatagttctaagggtttgcagttaacctttcctaccattatacccttgctccacagattagagaaccagtgagagaatctgctgagtttgtctgttctaactcagcatttcaaaactggtagaataaccatggcatgagttctgggatgagtgggagttgtaatgagcccaaacttcattaatcatgtgatttccataaactcctgctctgaatagaatcagtactgtagaatatgatactgacatggttgggctgtttgtcccctccagatctcatgttgaaatggaatccccagtgttggaggtttgggcctggttagaggtatttgagtcatggggtggatccctcatgaatgccttgatgctgtcctccccgtagtgagtgagtttttgcactgagttcacacaagatctggttttttaaaagggtatggcaccaacccctctcgctctcttgttcctgctctcacccttcaccttccaccatgattgtaagcctcctgaaacctctccaggagcagatgctggcaccatgcttctcatacagcctgcagaattgtgagacaaaataaacctctgttccttataaattgcacagcctcatcctttgggaaaaaagaatgtatgtgtgtgtgtgtatgtatatttaaatgccaacaaatttataagaaaaagataacccagctgaaagatgagcaaaggacttgaacaaaaacttcaacaaaaaatatccaaacagccaaaacaaaacaaacaaaaaaatggagaataaatatgtaagttatttattaattttaggatttctaaaagttaaacaagaacggaaaatattctactgttggcttatcagtaaatatactatttacataactacattaatacactactgtaattcagaagtttcaaataaagattttgatagtacaaagggaagagaaattagttggaaatgctgtgacagctaaatctacatctatacttacaggaaatcaggagttaatatatttaagtgataaaccaaaaagtaatttcttcatgttatttagatatataaagaataaatatatgaaaaaacctttaaaataattaagaatgagtacctctaaaaacaggaatggggtggtgaagattgggacagggtttgatgatcaccttaaaacttatctaattatttttaaaattatgtgcatattttatgaatattaaaatgagtaaacaaaaaattgatcccacaaaacagtgcaaatgaatttagttatctaaatatttatcagaatgtgtgcaaagcatagtggtcgtagggaacaatgggattaataaaatcaatggctgccttctaggagaatatagccttttcagagaataaaacaagtacttaaagcactccaaagatcacttgagcttgggaggtcaaggctacagtgagctgtgattgtgccaccacactccagcctgggtgatagagtgagatcctgtctcaaaaaaataaaataaagcactccagtggcaggtaagactaaggaaagaggaccaagagaatactacaaccgctactgaccattctagccactgaagcccaataaatatgacattctggcacactccaaatataaaacactccacttatatcattaacctgatagcccagcattgtttctgtagatggaataagagagaatcataaatccagtcacttctaccatacgcgagttttacaagtacacatacatgtggtgtgtttgtataaacatgtgtattatgtatgcatatatcatgtgcacacattcacacataatttaaaatttttctcacttggaagatttgttaaacatttccaacaaatggcaaataaagactagtcgagattggatttaacattaagactcctgtgtaaatgttaccaacctacgctgtctgttgctctcatgctgttactgtcctatttcatttggaaatacaaattgtaagtgtgaaactttttaacctattcttacataaaattcaaagaaacttcaggtgacaatgatatttgatgagaaatgcttagaggaaagaatcttttaatgtagttactgtgagcattcaagagcactgctttggttattatacttcataagaaaaggaagaaggccagggaatatttacattccaatgagccaggagtgaagtgaatgacgaccactgtacagatactgaggcaaaggcattattaagtctgttcatgctatgttccttagtattttaaattgaagttattttccttaatgtttaactacaaaaatgcttttgtttaatttctttgttaaactctttatttcttagagaaattgacaatttatatctaataggcactgaaaagttgattagaatctctgtgttcatgggctggtttgacagtgggtaggcttccatatacaggtgactggtcaccaagctggcattgttcttgggctaccatcagatgttagtatctagaggtttttcctctgtggcagtttagttacagcctttgagtcttctgcatgggcaatatgtgcctggcttctggcagtctgagagcaggatggcaaaaggagctaggttctcaaattgaatatgcattcactcagtccccctgttttcagccttgcactaatattttcgagtgtggtgcttgtcaggttcagttgtgccacagagttgggctactgaaatggagatacgtgctttcatgtgattgttcagagaggagaactaggtgtggagtggggttccagtgtctgattttcagtcagttttccagttttcagctctgcctatatactctgtggtaattggcatccagagattctctgggcatctacaggattgtttcagtttcttcaaagcatatttccctggaagtattgagaataaattgttctctgttctggtttcttaagtcagttactacaacaccatttgctttttttgccttaaaacattaaaaaacatcctggcaaaccaggtgaaaccccgtctttactaaaaatacaaaaaaaaaaaaaattagctgggcatggtggcaggtgcttgtagtcccagatactcgtgaggctgaggcagaagaatgacgtgaacccaggaggtggagcttgtagtgagccaagactgtgccactgcactccagcctgggtgacagagcgagactctgtctcaaaaaaaaaaaaaaaaattagaaaaaattttttatctactgatgtgtttttcatttatacctcttgtccttttggtttatatactttgtttaaaaaatccctttactgtcatttcagtgtaattttcgggatgtggactgtggtcagtcttcattttttacgagaaatttagaaaccatttatttgctcaccattttccttttagtacctggcatgtagtaggttcttaaatagatatttgatgaaatattgaatgaattgttagaagtttttatagttgtgggaagcttttatggtagaaagatacaatgactatgcaaatataacaagttaaaagtcatcttttaaattatggttttactttggcttcatcccattttttgtttttgttccttaacatggtcaaggaaatgaaatattttaaacagtgtggtagtacaggatggatatatgttagtttactttgtcaaacacaattttagctgtcacattaggcttaagatacacatttgtctatttataatttttctagagaaattacctctacctctatggaggtagacttgtattgaggttaatttacaattaagcacagcctttagtcttaattatatgtatatttagggtacttctatagaggctgatggtgattatggtgtaaaatcttccaactaccactgctctcttcccactggcccctttgtggttaataaagttcaagagcagctggcttagtgtggcatcttatccaggtatgttttgtattacaaagtgaatatgtgaggatagataaaatctagtaagggcaaagaaattaaaccgtagaagtgaacgcaagtagtaaagttgatattttgaatgaatagatcaggattcttctttttataaaggcagccctggacaaaaaaagatgggattgtagagctataggtatgtagagagtccctgatttggctacattgctggatcttgggtcttagaaatgtgatatccctacccatcatgcattagtaaatgaatgaatgaaattttgacagtgacccttaaaatcaatgactaggctgggtgcagtggctcacgcctgtaatcccaacactttgggaagctgaggcgggtggatcacctgaggtcaggagttcgagaccagcctgaccaacatggagaaaccccgtctctactaaaaatacaaaattagccgggcttggtggtgcatacctgtaatcccagctactcgggaggctgaggtaggagaaccgcttgaacccaggaggcggaggttgcggtgagctgagatcgcaccatctgggcaacaagagtgagactctgtctggaaaaaaaaaaaaaaaatcaatgactgattctaagtcgaaataatgagtaaactgcagtttgttttaaactgctgtacatgtatgttttcccagtctcttaagagcttattaaaggaatctagccagaaattcagagacttctttctaactataaagaggttacctctccagtaaagacctacggaaggaaaaacccataccacaaaatgtgtaagacagcagataaagaaagtcccttacagaaaactctggagttacagaaatctgggtaagaaattgggggttaggataagagaaaggtgataagaaactttttggagcaagctaactaaatatgtttgtaagttttctggaatagattcttcatacctgaatatttttctagtcatctctcctttaacatctctatctttgttatttggttgacatattctgatcaagttgctaacacaaaataagattggttttttagggagaagagaatagaggagatagatgtatacatatcagaaaagaaaggatgaaagtcagtggacttgggagagaagagagactatgagaagcaaagagagctttagtaaaataaaacttttgaaaatattaccaagacatcttagaatttttcttctcctcttgagtaagttctccagtatggttggtggtggaacttctggaaagaaattaaaaatgaatgaatttttaattcaaaaactaaaaatgaaaaaaattgatgaattaattggataaataaataaatagcaagccaagaaaatgtttcagatcttcattgacaattacttagtgcctacttataaggatgttagaactaaagtgtgtaattgttatgtgtgaaataggaaacctgctttaggtttctttgtcatctggttttgtgctaatgtaaaattagagtaagaacttgtaccaaagaactattaattaaaaaaaaatagtgctcaagagaaccaggtaataaaaatctgtattaatagtgactatagcaaagcatgaaaattaaaattaacatttaattaaaattaaaggcactggaaatattttaaaaattaacagtaagattataatttttgtctttggggcagtaacacattttgagattcctcgcacttttgctttatatatgaatgtcatgaaatttccaccatggttgactaaagataaaataacagaacgatattttagtgttgactacactggagactaaaatatttttaaacggtcaaaaagagcaaaactgatccttcatgatgaaaggcagccctggagttaaatgttatttgcaaatctcatttctcatttactttttgtgttttggttttattttcaggcaaaaggactcttgtggaagatggaactcattgtccattttccagaatgtatttccaagcccatcaatgggacctgatactgctgttctgtgttgaaatgcttgaagaactcctgcatctctgcttgcatcttccatcctactgaaaccatggtcttctcggcagtgttgactgcgttccataccgggacatccaacacaacatttgtcgtgtatgaaaacacctacatgaatattacactccctccaccattccagcatcctgacctcagtccattgcttagatatagttttgaaaccatggctcccactggtttgagttccttgaccgtgaatagtacagctgtgcccacaacaccagcagcatttaagagcctaaacttgcctcttcagatcaccctttctgctataatgatattcattctgtttgtgtcttttcttgggaacttggttgtttgcctcatggtttaccaaaaagctgccatgaggtctgcaattaacatcctccttgccagcctagcttttgcagacatgttgcttgcagtgctgaacatgccctttgccctggtaactattcttactacccgatggatttttgggaaattcttctgtagggtatctgctatgtttttctggttatttgtgatagaaggagtagccatcctgctcatcattagcatagataggttccttattatagtccagaggcaggataagctaaacccatatagagctaaggttctgattgcagtttcttgggcaacttccttttgtgtagcttttcctttagccgtaggaaaccccgacctgcagataccttcccgagctccccagtgtgtgtttgggtacacaaccaatccaggctaccaggcttatgtgattttgatttctctcatttctttcttcatacccttcctggtaatactgtactcatttatgggcatactcaacacccttcggcacaatgccttgaggatccatagctaccctgaaggtatatgcctcagccaggccagcaaactgggtctcatgagtctgcagagacctttccagatgagcattgacatgggctttaaaacacgtgccttcaccactattttgattctctttgctgtcttcattgtctgctgggccccattcaccacttacagccttgtggcaacattcagtaagcacttttactatcagcacaacttttttgagattagcacctggctactgtggctctgctacctcaagtctgcattgaatccgctgatctactactggaggattaagaaattccatgatgcttgcctggacatgatgcctaagtccttcaagtttttgccgcagctccctggtcacacaaagcgacggatacgtcctagtgctgtctatgtgtgtggggaacatcggacggtggtgtgaatattggaactggctgacattttgggtgatgcttgttctttattgacattgaattctctttctcatagcctctccactttatttttttttatagggtttgtgtatgtatgtgtgtgagcagtgtaaagaaagaatggtaattatagttctgttaccaagaataaataataggaaagtgattacaaatattacctccagggttcaatagaaatcctcaatttagggtgaggagacttttttttggttttggggtttttccttgattgattttgttttcatagtgggaatcaggattgtgctttattgagcctgcagttacattgaattgtaggtgtttcgtgtgctgctaaggtatgcttatttgagtttatcaagactttttttttctggaagacactgctgcttttaccatcacattggagccaaacatctcaatcaatatatatttagttttattttaaaaactaacccaggaaggttagcgacattttaagggtcattactatttactttggtgcactttaagagataatgtacaaattaattcagtcttatttttcagaattgtttttatacatgatatgtgctttaggaaatgtgcattatcatttatgggaagatagttttaagaaatgttttatctgcatgtacagttgtaaaagagaacataaaatgtagatacttttctaagcacaatagcaactcttcaagcaatagcgcaaaatctaggagacaggatccttgcaaatttaaaaggtgaatgtagtgagggggatggcaagtggctggtacaggctgtggtgattccttttactcaagggtttttgtggagtatagggagaaggggttgatatttatggacacctatgtgtcaggcactgtgcatcattttatccttacaggatgttgtgaggtaggtattattgttttcatttttacaggtgaagaaagcaggtctcagagggactaaaatcctgcccaaggttagtggtagagctgggatccaaaaatctgtcagaatcctgagactgcgctgttccactgtgccacgcagacagttcattcagtttagatgtcacatagtcaagagggaactctatgcatcctttaattttttagactatgatattctttttaaaaattagcctttattttctaactaccaaaagaaatatgaaagcattacagaaacactggaaaatagaaaagaaaaaataaaatcacttacaaccactttttgttttttggagtctcgctttgccacccaggctggagtgcagtggtgtgatcatggctcattgtagcctcaacctcccaggctcaggtaatcctcctgtctcagcctcctgaatagctggaaccacacacacacacgcacacacaggtgtgtgccaccacacccagctatttttttgtattttcttttgtaaagacaaggtttcaccatgttgcccaggctggtctcagagtcctgagctcaaacgatctgcctgccttggcctcccaaaatgttgggattacaggcatgagccaccacatctgacctacaaccactttttaatgtgagacttaaaaatcttagataaataaggctgtgaagcaaaaccagtgatttttttttttgtttttgatttgcaaaacaagtgactgacaattattgagaaattaaagatagctatgtgtaggtcttgcccctgcgggtttggaggtttccagttgtccatctgtgttagttgtaagtgttctgggcagaatagtattgttgccccaatgcttgccctagcagagctggagtttgtgaacgtgctcagatgtgtgtctcctacaaagaagggaaaatgaaccctcgtctgagcctagaacaagttttaatagggcatgtctgacatttcaaattgtttttctcttgctgacagtctgcccccaggtgcatctagggccttggtcagcttctctgttaccagtggctcactttataaaacagcccacagggataagggctgaaaatatagccacttggctacatcattgactaattaagtaagttaactgtggatttatagcatcttttcaggatgttagtgttttgtgagccagtggaaaaaataagcttctatttcttcatttgtaaaaccagagagttggattagatgaatctctaacgtcctgtccagctcaaatgtgctttcctctatactagggtatagatttttgaagagcctagctgacttcagcatcacctcaccctttggtctccagtattacttctttacattttacttcattagctatttcttaatattaaatgtctgaagagtgtggcactgtatcaggagttggggcattgaaaggttgaagacatcatgaaatatctgggaaactctgctcttaaggaaattgcaccgatgttggaactcattgtccagttaaagagctctttggggactcaagcatattattcaacatgttgttttgggattatcttcaaatgatagtcacctacctctttcatttctaatttttattcacaggtaaaattgtttttgtccatagggattttataggacataagcactgtagtagatactagtagcattttgaagtgtattatgctctccattttccatataaactagatttcaagcagatattgataaggacattttttattagacttttctctgaggaaagtcagcatgatctgtattcatcttacatattgataggtcatgaagactcctttttggctggaggtgaaactgagctttgttttctttgttcctgttttatgggcagtctttaggtactttcatgctgcttaataggcagtgcctcatttggtgagagctctggagtgcctgccgagacgctccctgtttgtgaacaaagattatgaaggggtctttgtgagaattcagcagcaacactgaacagcagttctttttacactggattatcttgatctgatgagagtttacaaatcattttgaacatttttattatgtatacattgtgaaagctttaaaaataagtactatggagcacctttgagaaacgtaggtgcaaaatcatatgttgcctattcccccatattttcttgaggcagggaaagataccactactaattctcactgcttacaggcataatcagaaatggttttttgtttgcctgtttttccttctggctagtaagaagcgtaaaagagataatgaaatatttgtggtcaaaagaaagatgcaagggaaattccaaatagtatggagtaacattatttaaactttaatacatgtttaagcatccccaagggagcttgttaacagtacagattcctgggcctccagagggtctgtggttgagcccaggaatgtgcatttttattttattgagcactctgcctgactctggctcaggtagtccctgggaaactcttcaggaaacattcctgtagaaaatatatctatttaaatatcatctgttttatcccacaatgtttgtttcgtgttgcaagccattatcttctaggcatgggtaatccacattgagaggaaaatccacacaacattgtgcctgatttgctgccacctgtgtttgtgctggatcttgccagtgttagctttattttctttcaactggcaaaattctgataaagcatatagcttcacagtagagcaaaatgggtgacttaattgaaagtcatgactttcagcagtctaattatgctcatattttattttcttatagagagctgtctttattgtgtgtaattcccggaagaatgtaaagatttatctaattcctattgctctgccagttgtgttcaatgcaagcattgaagtaaaataaaaataacctttttaatatgtgtatttctgttgcccacaaagatatttaatttttttcttgatctttgtttttgtttatgtgaaaatatttacatatgtatcatttctgtatatatcacagaaaagttttcacttgcttgacattttattctacaatgatttttagtttaagtttaaagaatggctacattcagatttattttcacaactatagtcctgctaaactgccttcattgaaaactcagtttttatgataaaaaatatcaaagcacaagtttgttattggaggtaaattatacatttcttagatatctattggtactagacctttgtaattaaaattaatttattttacaatagtaactgacctgtatggaaaaaaaaacaaccttgaattatgggttctaatatttaaatatcgaaaaatatggttatttgtgcatattcttattacaaccaagaaaagaactcctgataagaaaataaataaatatttaacatttctaa

SEQ ID NO: 38 - DNA, 11716 bp, Homo sapiens
cacttcctccccagacaggggtagtgcgaggccgggcacagccttcctgtgtggttttaccgcccagagagcgtcatggacctgggtgagtgagcctcttcatgtgagaaggaacagtaccagggtcttggacacccagactgaccctgtggaatgggggtggaggatgcgggtggagcgcataggggtgcttcctggagaaatcagttctgatttggtgggcattggaagctacttccagagaatgccccctgctgtcccaggaggggtgcacctgccctttcagacctggagaaggggtcagcctttggtgccagtggggacaagggaggggccgagatcatgtctttctaaaacagcagggacataagagagtggcggggctgggcttggtggtctggcagaacctgttctcatcatgagggtgataggttaggccctctgggacctctggggacaggtttcaacagagaaattctccctagagagcttaggaccttttacccactctctgattcccacctttctcccctgccaaatattcatatacctgtccacttggggtcatgaggagatgcaaatgaaacgtgactgggttgtgagaatggtgcggtgcattgcaaatgcaagctctggttgctttctctctgctgcacatcccacctgctttgatctggctttgctgttgcctcttgcaagttaaggaacgggcaggcaacatggaatgggatggcaaggggcactcagcttggagaaatcatagccaggccttcagcacagcccctgcccctgagcaaacctcacgcactctgccccggcagataactctactctttagaaagccctttctcaggtctaacctagaaggggtcaaggggaagcactgagggtgttctgagtggttcatccagctccagacgccccctttataaatctcagctgtggagtcagaccaggctgaggctaagaagaccaggttcctagatggcttgtctcaccagcaaacaatgcaccacggcggcctcaaagccgcaaagggttggctttaaaaagtgaaggttccctggtgctgtcctcacacccctcctcgccacaccacagcctccttgatttcatctcttactttcccgcctgccctgaacgctggatctggacccagcaaacagctgtgaaagggttaaagtggtcaccccacccactgactgtgaactcctgaaaggcaggttcaggtgctttgaggatgtgaggagaaaatgtctgcggaatgaatgaatacaccgtatcaagaactccgtagagtttagtttttgaaaatctcttccaaatgcctcatttcccagccaatctacccttaaatcccactcccctgcaccccctccaccaccccccatcacaatcccacagtacagacgtcacccacagaagaccctgctccagcctttcatactggcctccaggaaggaaaccaagcagtgcccagtggtgtgctactgggcatttgaaaagcagctccccggggtggagcactggtagctgactccagggtggagggaaagtcctgaatttgtagtgcttgccaatttccatggtgtaaattctcccaccctggctgattgatttcaagccatctacatgactgaacagggggttgggaagatgtgcagagtgtcttaccccagactaggtttaggggtgctagactcctaggctttgatgcagggagagagggtaatctctggtccaggaagaagggatattcttgccacttcactcaacttgagagagccccaacggtcaaacccgaaatactggtaggaggggaagccgctgacaagctttactcaaaacgggctctctgggccgttgatggggtgggtgggccttggaggatctgttgttctgctcttcatctgcccagcaaggagcaagaggtgggtgaggagggagggtttctgttacacaaaatgaaaactcccaagcagggctgagctggcctttttcacggtttgaatgagcagctctgaggcaccctccccaccttcgagcaatgagaccgaagatctttcataattctcaaaagcaaagcaaggaaaaaatgaacccatgagagatgtgtgcctcacagctcggacataaatggtggcaaagggggatgctgaagctaattcagggccagtttcttgcctgccagaaacttggctggggaggagaggaacgctgcagcctggggtcgctgttggaaaaaatctctcctctttgcttcggacattcaggcaactctcattgtttgagggattcagggatgaccagtctggtggggagagtgacacatatgtcacaaagccactgcaacagaataagatacagcattgaccagggcaagggcaagacaagaagggaatagtgaacctgggtcagagaggtatttaaggtgggttttcaagggtgtgtaggagttgtcaagcccaacaaggagctgcaatgggcccaggatgtggcaggaatggcaaactccattgccatcagaggccgacaaggtaatagagggaatgggcataaggtgcaggaagtggaggggagtagagtgacccagagggtgcatgccccacctaaaggcattcaaatctattatttcaaaaactccatgctgacaagcagagtgtcctggggactaaggctgcagccgtgtagatggtcagctgagacaacagtaacagagacaagaaagaagcaagcggaggggagggtggagtagctggccatgccaaggaggaagatgaggaggaaggacgcaggcacaggagacccaatccttaaaacgtggtacggcatccctaaggaatttgaactttatcctgaaaacaatggggacccatcaaagatttttatttttcaagtaggtgaattaaaggatgagatttgtgttttggaaggagttctgtggcagcaaagaggcagcaaagcccgtgtcagaacagaggtggggccggctcttttgggggccgggatgttgggggatggaagcaggaagcactggtggccagtggggcatggggagcaaagattcccctcatgctccgtggagcgtcctagatgcagcaggctcatcagaaacacagcctgatgcagtagccagagcccaaaccttgctatcctgttcaaatctcaggtccctctcttagcagctgtgtggccccaggcatttggcttaatctctctgggcctctattttctggaatctaagatgaggatcaccagggtagctcatgagatgttatgagggagagacacatacagacccagtggccgcacagaaggatggttaggagtgtggttgctggagttggagggtttcaaagcctgctcccctgctggccattgtgtgactctgagaaagttacttgctgtgtttcagtttctcattggtaaatggggataatagtagcgcctacctcatggggcttttgagaggatgaaatgagaccatacatgcagacagtgtggcacgcagtgagagctcagtgaatatgaattatctcattggatacagcagttgataacatagaaaatgcaaggtctaccaggctctcacccatccctgcctactgtctgaaagtggattccccagatctctagacctctcaccacctccctgcttctcctctgcctcccttatccaaaaaaaaagagagagagagaaaagttgtgttggcaggtgaggaagttcaaagaggaaaaagcttggggtcgctcttggggcgagctgattgggcaactgtgatttcctgggcagtctggaggacctggaaaaatgtggggatggaagttcatggtttggagatgggggcagccagccaataattttctttcctggatgggcagtctctcatgttgggggctccggttggagttctagggaattttcatgatgatcattactgaaaactcaagaactcagaaaacacccaacatctaggtcaaccactccttagccccagagattcccaacttcattggtctcactgaagctgctgcccaagaccagtttctttatgactttgtaacagacagggatgatctgactcaaggccactgaccaggctcccttttgccacatacaagagttcccctaagtttccctgtgatgtttcttgaaagccacctgttttggacctacaagacccttgctcatccacctcctccaaaacacctggaatgagaaatcacaggcacacacgccagcactcccccaactcccctcccctgacgggaacagcaggagtgggacagcgtccgggagaaggggttatcaacagagttcaacagaaacacagttcttgctcctcagatctcacccgttgtgacttatcaaaactttgaggtttctcatttctccctgacagtcagagcgggctttctctagagtaaccgaaagacacttacgtgttttaaagaaacctcgagactcgacctctagatgagtcagtggagggcgggtggagcgttgaaccgtgaagagtgtggttgggcgtaaacgtggacttaaactcaggagctaaggggtaattcagtgaaaaaggggaatgagcggtggggagctctgttgcaacagggtccaatcgcagcaggactacaaatgcccgagcgcaggctgggaacgaggggacagcggctgcctgtccccagaatagaaaatgcagctaggaagccctctttgagtggacagcggaggactggactgccaggccaagcatcaggggcttcatcctcagggccggttagagcccctgaggatttaggaggaaggtgaggtggggactgccatcagagctaagctttaggcagatgtgtctagcagtagtgtgcaggactatttgctcaaggcgggagaaatacctatttatttatgtagcccgatgcagtctctccttcccggaggaactcccaagcccagaatccctggctttacacaatttccggggaacacattaaccaactgcaacctgggtgccatgcagggaggcttccagcaggtggtgctgtggccaaggacacggaagcgctgggctctcactgcttccccagcctccaggagaaggtgccttaaacaggttcccacgcatttcctggcgctattgagcttggagctgccaagggcctgccttcacttgtggcatcgcagttactgactctccagtgggccaggccctacctagctgggacctgagggtcaggatacgggaagagggctactgccgccctgacttgtaggtaagctaaaacatctaggcaaattactctgtcaactgtcctccctgctcagcctcaggaagaaataagttcctgctgggccccaggctcagccacaaaaccagactgagcacatctgggccttgtgctacaccggggtccccatcagctgctcagaccccaggaagcctcctgacttccagaacacgtcgcttcccaaagctgaccctgttccccctttcacctgccccccaagcctaagttagaaaacaagttaaaggagagaaagtgtgtgcaggcacttcagttaagcaaaaaaataaagaagtcgtgacatcaggaaagagcgtccttcccccacactgcaacaggacagcatcccttctgtgtcctctcgggccatcttgatgccctctcccttggaaaaaggacaggcattcgtttacttgtcattcatgtatttattcatcattcatgtatttatcattcatatattcatcagcacacaattgtggggcacctcctcaattctgggcctgcacaagataaaagggaagggatctctgtcccaaaggcaggccaagggtgtgcgcccagtggaccaacagtcagtgctgaatgaatgtcatttcagtgagggggtgttgtggagctggtggagccctgaggcagtctccatcgctgtggaccagtaaggaacctcatccctctacccagcctgtgaggtcatcctccttcctcagcccacctccctcaggagacactcaggcttggcttcatgcacgtgtggctgcgcactcacctggatgccaggaaaatgctcctgggccagtggctaccagcaccaaagcagggctggaaacgtgtgcacctaccccacgacctcatagctttgccgcctcatcccacatcaggtggagtgggagggggcactcagacccaccaaccaagctcagtcttgaggggtggtctgggctagagaagacttcccagctccaagaagcagcccagatgggccaagacagggggtgggaggggctgccctgcattctgatgctgcttctttccaggacctgggagtggaggaggacaagaaggaggtgaggacagtgatgccgggcagcaggccaggtgttcaaaggcacaatctggttctgatgttctctttcagcaaacacagtgcctggagcttgggaggaaagttcccaacagcgtctccccctccactgctttctttaataacaaagacttgtccctgccaagcaataactttctcgccttgtctcctacagggaaaccaatgaaaagcgtgctggtggtggctctccttgtcattttccaggtgaggttctctgccaaggaaagctctgttcccttctccacacggcctcccaagtcaggggtttagtggaggagctgggcatttgctagaagatacaagacccagacataagcccgcctgccactcattaagctaatggctgccccctcaccatctgctgagtgaccctggagagccacagatgttctctggacttcctttactccatttaggttaaaacatgggggaaaataacttaccaccttccctatcccacctccaatctccctgcccaggagacagaaatatggactctgagttcttagagagagaagagctgcaaaaagcaaaaaatgttactgggttttgtgcacgtgtgctgagaaaatcaccctggatctggcgatcttgttactatcctatcgccccaaagttgtctctttccaaccttcacccaaaggcttccctcgcagcccccgttttctttggtgaaatagagacccatccggcctccctggcaggggagggaagagaggatggggccctagggatggggagaggggtggatgagcacacactttatagcaggcctgaactcggcaggaacaaagaccctcactttacaaagttctgtttctccatccagaaacagacagaaagtgtgcctcaccaagtgccaaagttagaagaaactgtaactcgcagagtcaactttctcccatttgttagaggtgggagctcagagtaggggtaggggagtccaactgaggccagagctagagaggcagtgcttcagaattcggctcatccccaggtctggaggccagaggggcagctttccagaagctcaggccagaggcaggccccaagctgggcactgttcccaaaaccccatcccagaggccccccggagcctgggctgcagcccatagcctggcccccttccccatcaccactccctcctctctctcccctgtctccaggactctggggggctgtattgctggcagtggaggctggaagggtgggaaggggaggaggacagctgaggctcattcttccctttcacttggggagggggtgctcagatagggcaggatgtggtggggctgtgggctgcagaggcagtgaggctaggggagggagaattataaaacaggaacaaggttcaaggggagaagggaaggcaggactggatgatgcagagtgcacttcatagaggccgggagtactgccctccaggaaggctgagaccccctcatgtccagggaccccgggtctaaggccttgggccgtaaccatggctgggccaaaggcagcagcctccttcagggctcccaggctgcagccatgcccaggaaagggaagaggggttgccactgacttttcgtctcaggctagcaatggccaaagaaaaggctcctggacatcattttgtcctcaccatgttcccaagcaggacagtgatgaatccagaacctgggtgtgaaaaagagatagagacaagatgcggtgaatccctccagcataaatggatagaaacccaccgtcgctgagctgctgaatctggttcctggtgatagaaccatgagcctcgtgaggcaggtcctccagcccagctccctgccctgcacaaacccgtccatcgctgtgcgcagaggcaggggcaggcatggaccccctccttcattgataaaatcacagcaggctgctgaaccttcacccgaccctgcagacggctaaaaaaagctccagcagctgagtcctgctgattgggatctgccggaagagatgcgaggaagagagaggcagagaggtggggggagagggcgggagcacagagggagagtgggagatgagagctgcgcttccttccagggacacagctgctgaggagtcctcgcccccacccccatggcccatcatccattcacggagtttatggcacttgggctcacgttgcctgagctcctgctgggtgctaagaggggacccaggatctagagtctctccaggtcacccaccacccatgatcacagcagtttgccccaaacccaaggcttcatggcctcaaaatgggagcatttgccttcctctcttcttactccaggccctcctcaaccttgacccccaggtggattttccccctaaagctgaggtcttttgtaagccccctggaaaactccaccaagttctaaaggagggtcaagaagaaagacacatgttccctctctcacggagcttccagggggcaaaattaaagctccatggagaggaaatggtgctggagcctgggctaggtacctcacagcaaccatgggaagcaaataggattcatctccatttcacagaagagaaaactgaggctctgagagagagagagagagacagaaagagtttaaccagctcaaggctcatctggccccagagcccagctgatttccagtcccctgtcagcacatgtagagtctctcagacttggcaaaatcagccacttgctacttactagcagaactgtagaatctcaggccccaccttagcctactgattcaggatagacatgttcacaggattaatcaggtgatgcgtattggagttaaaatttgagaagcactgatttaaaaccaaagaatcacctggagactttaggaaaacacagattcctagacccatcacttgagattctggttcagaattctcaggtggggcctgagaatttgcattcctaacaagttcccaggtgatgctatgatactgatgatgcggacctcacgatgaaaccactattcctcccgcctgggcaacatggcagaatcccatctctactaaaaatacaaaaattcgctgggtgtggtggcataaggctgtggtcccagctactcaggaggctgaagtggaaggatcacctgagcctggagaggccgaggctgcagggagccatgattgcaccactgcactccagcctgggcaacagagtgagaccatgtctcaagaaaaaaaaaaaagaaagaaaccactgctctaggctaaatcccagccagagttggagccacccagctaaactggcctgttttccctcatttccttccccgaaggtatgcctgtgtcaagatgaggtcacggacgattacatcggagacaacaccacagtggactacactttgttcgagtctttgtgctccaagaaggacgtgcggaactttaaagcctggttcctccctatcatgtactccatcatttgtttcgtgggcctactgggcaatgggctggtcgtgttgacctatatctatttcaagaggctcaagaccatgaccgatacctacctgctcaacctggcggtggcagacatcctcttcctcctgacccttcccttctgggcctacagcgcggccaagtcctgggtcttcggtgtccacttttgcaagctcatctttgccatctacaagatgagcttcttcagtggcatgctcctacttctttgcatcagcattgaccgctacgtggccatcgtccaggctgtctcagctcaccgccaccgtgcccgcgtccttctcatcagcaagctgtcctgtgtgggcatctggatactagccacagtgctctccatcccagagctcctgtacagtgacctccagaggagcagcagtgagcaagcgatgcgatgctctctcatcacagagcatgtggaggcctttatcaccatccaggtggcccagatggtgatcggctttctggtccccctgctggccatgagcttctgttaccttgtcatcatccgcaccctgctccaggcacgcaactttgagcgcaacaaggccatcaaggtgatcatcgctgtggtcgtggtcttcatagtcttccagctgccctacaatggggtggtcctggcccagacggtggccaacttcaacatcaccagtagcacctgtgagctcagtaagcaactcaacatcgcctacgacgtcacctacagcctggcctgcgtccgctgctgcgtcaaccctttcttgtacgccttcatcggcgtcaagttccgcaacgatctcttcaagctcttcaaggacctgggctgcctcagccaggagcagctccggcagtggtcttcctgtcggcacatccggcgctcctccatgagtgtggaggccgagaccaccaccaccttctccccataggcgactcttctgcctggactagagggacctctcccagggtccctggggtggggatagggagcagatgcaatgactcaggacatccccccgccaaaagctgctcagggaaaagcagctctcccctcagagtgcaagcccctgctccagaagatagcttcaccccaatcccagctacctcaaccaatgccaaaaaaagacagggctgataagctaacaccagacagacaacactgggaaacagaggctattgtcccctaaaccaaaaactgaaagtgaaagtccagaaactgttcccacctgctggagtgaaggggccaaggagggtgagtgcaaggggcgtgggagtggcctgaagagtcctctgaatgaaccttctggcctcccacagactcaaatgctcagaccagctcttccgaaaaccaggccttatctccaagaccagagatagtggggagacttcttggcttggtgaggaaaagcggacatcagctggtcaaacaaactctctgaacccctccctccatcgttttcttcactgtcctccaagccagcgggaatggcagctgccacgccgccctaaaagcacactcatcccctcacttgccgcgtcgccctcccaggctctcaacaggggagagtgtggtgtttcctgcaggccaggccagctgcctccgcgtgatcaaagccacactctgggctccagagtggggatgacatgcactcagctcttggctccactgggatgggaggagaggacaagggaaatgtcaggggcggggagggtgacagtggccgcccaaggcccacgagcttgttctttgttctttgtcacagggactgaaaacctctcctcatgttctgctttcgattcgttaagagagcaacattttacccacacacagataaagttttcccttgaggaaacaacagctttaaaagaaaaagaaaaaaaaagtctttggtaaatggcaaa

SEQ ID NO: 39 - DNA, 16059 bp, Homo sapiens
gtgggcctggcttttgccaggtgctcctgtgggctccgggtgacgtccaaagggtgtggcccgactggccctccaagctatggagtatccatagtaacgcgtcagccgccgacctcgggccattttcccaaggctccaggatctctagatgtcccgtcgtctcaagggcgtgtagaacgcgggttttgggggaggaatgaacaaaaatcgactgggagttttttcaaaacacgtacatatgccctgccacccaccccgctctcctaggtgcgtcagaactgctgggacatctgtcacgtgaaggggtgggttgcccctccacacctgtgggcgtttctcattaggtggaaggagagacttggaaaagaaagagacagagagacaaagtatagagaaagaaaaatgggcccaggagaccggagttcagtttacggaagatccacgccggcaccagcctctgagttcccttagtatttattgatcattatcgggtatggcaggataataggataatagtggagagaaggtcagaaggtaaacacgtgaacaaacgtctctgcatcgtaaacaaggtaaaaaaaaaaatgctgtgcttttgatgtgcatacacataaacatcacaatgccttaagaagcagtattgctgccagcctgtcccacctccagccctaaggcggttttcccctatctcagtagagataggctttacaccgagacatttccattgcccagggacgagcaggagacagaagcctttcttttatctcaactgcaaagaggcattccttcctcttttactaatcctcctcagtacagaccctttatgggtgtcgggctgggggacggtcaggtctttcccttcccacgaggccatatttcatcacatggggagaaaccttggacaatacctagctttcctaggcagaggtccctgcagccttcctcagtgttttgtgtctgggtacttgagattagggagtggtttgagattagggagtggtgatgactcttaagaagcatgctgccttcaagaatttgtttaacaaagcacaccgtgcacagcccttaatccatttaaccctgagttgacacagcacatgtttcagggagcacagggttgggggtagggttacagatcaacagcatctcaaggcagaagaatttttcttagtacagaacaaaatggagtctcctatgtctacttctttctacacagacacaggaacaatctgatctctctttcttttccccacagtcacgtgtacttggggaagaactcccccggtgattctgacactcttgccctacgcctcagccattgagaactattggtatggagggcctgtaatttatcaaggcgcggcctcagatctgtctgcctcgcagataccttcctcacccgggtcagaatgacttgcctcaggctcctgccaaagagtttgcaccactcgtttcttccctgtaattacttgtttgcgtatttgtctccccactgggctgcagcttcttgggtagtggctctgttttattcatctgtcctcttcccttccaaatgcttggcaaggaaaagtgccctttaaaataaatcgacttgaattgggagtggtggtagggaggctgtcaatgagaatgaattcagggtgaaactaggtaggacaatgtcccaggattagtttggggttgagctggggagctcttggtgtatgggggggtcctattgtgactatggtggaatagccacgatactgagtgacattgggcgagtgaggtgggggagagactagacaacaccccacataacccatcttgacagatgtctcagaaagattatgggaatttcctggcccctctgcaatgtgggattccattttgctacctctagaaggacagggtcttgttttcatagctctgcctcctactctgagataaaggcatgcaagacctgagctactactacaataccccacacagaaggagaaaatcaggcacatctggattcaagttttgtgggtgattccatgattgcctccagtgaacaatctgggaagcacagtgtccatatcgccatttcaggggtactggccccaacatcagcccttaggcctaagccctagagaccttgacacctggtggctgagtcagtatctcagtaatgggctttagaaggaaacctggtgattcagggcctcaagaatggcgttgggcaagccaccagaccagctgcctgggtctcctcctccttgttgaggtgacaacaaggaactcagttcagctcctccctgggtatccaaattatccttccaagtcccagactcacagctgtcctcccttctgattcagccctgatgcttttcagggggtcccagaagtgggatccggacttgagagaatgtcacagttgaaaatgataaggatgcaaacggaatggaactttcagagaaccccaattttctactctaagttctccaaaccaactctcaaatccaagatagctgcctttcctttcttcacctcctcttcttagttttccccaacttggctgcaaagtcagcctcccctcttctcttccttagcacctcagaccaataaaacatgcaaccttttcttattctttttaaaaaatttatttttgaccaggcgcagtggctcacgcctgtaatgccagcactttgggaggccaaggcgggtggatcacgaggtcaggagttcaagaccagcctggccaacatggtgaaaccccatctctactaaaaatacaaaaaattagctgggtgtggtggcacacacctgtagtctcagctactcaggaggctgaagcagaagaatcacttgaacttgggaggcggaggttgcagtgagccgagattgtgccactatactccagtctgggtgacagagtgagactgcctcaaaaagaaaaaaaattattttgtttgttttttagattttgtagagatggtgtttccctaagttgctcaggctggtctcgaactcctggcctcaagtgatcctctcgcccgggcctcccaaagtcctgggattacgggtgtaagccaacatgcctggcccctttacttcttcttttctgttttggtcacaaaacatttctctgttgatcactgtagtgtgtgtgtggagggaagtgggggaggtacactcttaagaaatgaaatagttaacatcttggtcctaagatttgttgtagagatggagtcttctcattctgttccccaggctggtcttgaactcctggcctcaagcaatcctctttcctcggcttcccaaagtgctgagattgattacaagtgtgaggtactgcgccctgctacaatcctttaataggatgtttttggggggggtggcagggggcaggatctagctcactgtaacctatactgttccagtgtaacctgcaccaagccatcctcccacctcagtctcttgagtagctaggaacacaagcacacatcaccacacctggctctaacacgattttgctttttgcttttgtcattttggctgctgttctttttatctttcattcattcaaggtctgaagatggagataataggaatcttctcatctcaatgtgctctttggcccctcctcttaaactgatgcccctctcaggccctgagggatttggcctcaggttgccctggaaggggtgtgagtgatcagacaggtgactgagagctgggacgcctgaggcctgcctaggctgagtcacctagtaatgttgttgtcattgttcctgttgaagtcccagctcagtgtcacagacctttgtggaagcaacaacagctcccatccttccaacctttctggagaagccgtggcctgatggtgagccgaatgggctggggggggagaagaaggcggctggggcggtggggagatctggggcccggatcggtgcccctcctccccatgccactgccacctcctcctcctccttcatgccggggacctgggggagggaggatctccatcttctctctgtcccctgcccctcatacaagaagctccccctcctcattttcccctcccaccgcagggcccccttgctcagtgctacaggggacaggggcttctcagtcttgccacagtgctctccctatcccagccacccccccaacacaggctcaacctgcaatgacacctgcctctgcatctccctcctggggatcccactccaccccacccctggccccggcaacccccactccctcacagcagtgcccccaggactctcctgggctgcgggtaggccctttgatccctgaacaggattatgagcggctggaggactgtgaccctgaggggtcccaagactcacccatccacggggaggagcagcaacccctgcttcatgtccctgaagggctccgaggtatgtgtgtgggtgtgggtgggagagggttagtggtgcctgggagctccagtacttatcccaggctgggcctctggcagcgggttgagaacgtggagaattgatcacatgccaggggctgacactctcccctctgtgcccaggctcctggcatcacatccagaacctggacagtttcttcaccaagatatcctttgcgctaggcctgcagaggtggcatgggaaggtcctcttggagctggcactgttcttggcagggagactccgtgagggcgtcatgggtgggagacttgttggggctgaggggaggtgtcctcaggagaggccccccgtgcctcaggcttgttccttgacacgcagccacatctacagctaccaccagcggaatggctttgcctgcatcttgctggaggatgtcttccagctggggtgagacgcttagcccgggcccggaactcggtcccctgggcccatggcttccttctgtcattttgcttccttaattgtgccagctgcttccatcccatgctttcccgagcagcccaagggctcagcaggggcagggtcagggaggataaccatgggctgctctgggggctggggcaggagcccacctggctgtccctgatcactgcagcatcccggcacccccccttcctcccggcagacaatttattttcattgtcaccttcacaaccttcctccttcgatgcgtggattacaatgttctctttgccaaccaaccaagtaaccataccagacctgggccgttccacagcaaagtgaccctgtcagatgccatcctaccctcagcccagtgtgctgagaggttagtgacaacctggtggggccctgggggtgaagcatgggcagtgggtagaggagtagacgggagccccactttgtcccgtcatctagatcagcagttctcaaagcttttggtcttaggaccaaaaatacacttaatatactttaagttgtacttaagtgtattaagttgtacttaaagtgtattaagtatatctttttttttttttaagacagagtttcactcttgttgctcaggctggagtgcaatggtgaggtcttggctcactgcaacctccacctcccaggttcaagcaattctcctgcctcagcctccccagtagctgggattataggcgtgcaccaccacgtgtatttttagtagagacagggtttcaccatgttggccaggctggtctggaactcctggcctcaggtgatccacccactttggcctcccaaagtgctgggattacaggtgtgagccactgtgcccggccttttaagtgtatcttaattacagtgcattaagtgtatcttaatacacttaaaattggttgagaatcctgaaaagcttttgtttatgggagtcgtatctatccacattttaccttataaaaaattaaaattaggccgggcatagtggttcacacctgtaatcccagcactttgggaggctgaggcaggaggattgcttgaagccagaagtttgagatcagcctgagcaacaaagtgagaccacatctctataaaaaataaaaattagctgggcttggtggtgcgtacctgcagtcctagctaagcctagtcaggaggctaagacagtgactgtctctgatcactgcagcatccctacaccctcctccctcccagcagacgattcattttcattgttgccttcacaaccttcctccctgaagcatggattgcaatgttctctttgccaaccaaccaaataactgttccagacctgggccgttatttggcagggagataggagctatgtttctactgctgcactacagcctgggtaacagagagagaccttgtttcaataaaaaggaaaaaaaaaaaagaaggaaattgtagctgagaacaactttaaaatgtaagagtgcggctgggcgtggtggctcacacctgtaatctcagcactttgggaggccgaggcgggcggatcacaaggtcaggagatcaaaaccattctggccaacatggtgaaaccctgtctctactaaaatatacaaaaattagccaggtgtggtggcgggcgcctgtagtcccagctaccctggaggctgagacaggagaatcatttgaacccgggaggtggaggttgcagtgagccaagattgcgccactgcactccagcctgggcgacacagcaagactccatctcaaaaaaaaaaaaaaagagtgtacaagcacacatttcatcagctgtcagtgtgatgtgacatgttcacgtgtcttgtagcctctggaaaactccactgtactctcagagtacaagaatgaaaacatcagaaagcattagtattatttggaaaaagtttgactttgcacatttgtgaaggccacttcagcacccaccccctgccccgggctctaccttgagagctgctggtctagctagatccccctcctcatgatggtttttcctcactcccgaagtctggtctgcctctttctcaggcgcccacctttctcccccactgcccgcccaaccccatacaggatccgctccagcccgctgctggtcctcctcctggtcctggctgccggcttctggctggtccaactgcttcgctcagtctgcaacctcttcagctactgggacatccaggtgttttacagggaggccctgcacatccccccggtgagctgggtggctgtgtctgtgcagagggtgccgtgagagggtgggcagaggagaggggaagaagtgggactgtacaggtggaagggccaactggaaagagggcagaaagagcgaggtcttattgacacctgccctaggcccagaataatgtcaggagggggctaccaccacctagagagcatggcccttaccctaagggagtttagtttatttagatggctcatataagatgacatatagttacatgtttgtgctaaaaacattgattagagaaaagagaaagggcagttatctggcttttcagagctggaggaatttgggttgggcttcggaagggcaggacaggaggggaggggagcacattctaagccccagtgcaggaaggtggggaaaagccatgagcttttggaagctgcagtgaggagatggacccatcagcctaaaacagagccttcaaagccatcccccgcattgcaggaagccactgcattggcctgtcactgtccactgcttatgctctgccctttgtttcctcaccatcttgagtctgctcctccctcctctgtatctaagttctttctttgaggcacagcttgaaagtagccttctgcagcttgcttcccttgctcccctgggaggtccggagccctctgcacagcctttatgtgcagcaaggggagaggtcttagaaggcccctgagcagaggagagggaggaggccggggaagcagaggtggtgagagcggaagctggacctcggattggctctggcgggagactgctcacccgtctcgttctcctcctcccttctttcccctcctcccctgttccttccaggggaagggaagggaagacactgggatgtactggagaggccagcctgggggacttgactaacctggactgggaaagctgagtgaaactgggctgaagtgaggtttgcagccttcaaatgagatctgacagtgccccactgccagatgtggacatagcccaggtcctgggaaggcttctggtgacagagccgaagatggcctggagtcgggtggggctgggagtgtaaagcatgcccaggcagaaggtggggaggattctgttccagagttggtgggtgcactagaaatgggaaggagagattctcccacgaactgccagacattctggttttttgtttttttgtttgttttgtttcttttgagacagggtctgggtctttcacccaggctggagtgcagtgctgtgatattggctcactgcagcctctgctccccagtagctgcaaccacaggtgcacaccaccacgccctgctattttttgtatttttagtagagacagtgtctcaccatgttgcccaggctggtctcgagctcctaagctcagacgatctgcctgcctcagcctcccaaagtgctgggattacaggtgtgagccaccgcccctggccagccagtctgttttgtgtgtacaactgagggggcctcaggcccttaaggagctgagaagccaggtccagcacctggaggcgtccccaggaagtgcatgactactggccacatgaatggcagggatgatgaacagggcagtttagaagaggatgaaggaagtagggcgcgcccttgttagtgacagggttaagggagggcagaaagagaaaggtgggagagggggacgatgtagcttggtcatggcgagtttgtgatcgcaaactcagtttgcgggttttcaggccgcacacttaggggtgtggagcttgagcatcactgtggagaggaatggggggtcgctggctctcatcagtgcccctttcaggaggagctgagctcggttccctgggcagaggtgcagtcccgcctcttggcactgcagcggagcgggggcctgtgcgtgcagccgcggcccctgacggagctggacatccaccaccgcatcctgcgctacaccaactaccaggtggcgctggccaacaaaggcctgctgccggcccgctgcccgctgccctggggaggcagtgcggctttcctcagccgcggcctggcgctcaatgtcgacctgctgctcttccgcggtcccttctcgctcttccgcgggggctgggagctgccgcacgcctacaagcgcagcgaccagcggggcgccctagcagcgcgctgggggcgcacagtgctgctgctggccgccctgaacctggcgctgagcccgctggtgctggcctggcaggttctgcacgtcttctatagccacgtggagctgctgcggcgcgagcctggcgcgctgggggcgcgcggctggtcccgcctggcgcgcttgcagctgcgccacttcaacgagctgccgcacgagctgcgcgcgcgcctggcccgcgcctaccgccccgccgccgccttcctgcgcaccgctgcgccccccgcgcccctgcgcacgctgctggcccgccagctcgttttcttcgcgggtgcactcttcgccgcgctgcttgtgctcaccgtctacgacgaggacgtgctagccgtggagcacgtgctcaccgccatgaccgcgctcggggtcaccgccaccgtcgccaggtgcgacggcagatgcccggggtggtggtgtgtgttggtttctctgatctggggccatgtgaggttccccccgaatccttacctctcccaccactggggccctctagccctacatcccaccgcgcgtcctcctaatcgcaggccccttccccccacggatcccgcctttcaggtctttcattccggaagagcagtgccagggtcgtgcgccgcagctcctgctgcagacagccctggcccacatgcactacctcccggaggagcccggccccggcggcagggaccgcgcctaccggcagatggcgcagctgctgcagtaccgagcggtgagggtgggcgcgacggcgggctgaggaggaagttgtggggtctgtctgcgcggagggtctgtctgcgcggagggtctgtctgggagagggcatgagacaaacggactataccaggagtctagggagtgactgggtggggaggcttcttgccctggcgagggtcgctggggactgcttggtcctgataacgcgcgtgggcccctcagcgacccctgctcagcctcaccgctgcttccccaggtctccctcctggaggagctcctgtccccgctcctcaccccgctgtttctgcttttctggttccgccctcgtgccctggagattatcgacttttttcatcacttcactgtggatgtggctggggttggggacatctgttcctttgcccttatggatgtgaagcgccacggacaccctcaggtcagagccgttccctggccctgggggtttgggctgggtgggagttcgcttgcctctcgggagcagacctgagttccagccctggctccattgcttgctacctgtgccgttgagcgggtcacttcccttcctgtgctctcgtgccctcgtctgtcagatggcaacaatggcaatgtgctctccagagcacagccaaggccaggcttgtgaacacacagattatgtctgtatagcctatgatggagttgctggcacatagtaacgtcagtaaatgggagcaaagaccacctgggggtgaggaatgggcttggccggtgggtggggctgagtaaggactggtgcctggaccaaggctgtcaggatcaccctgggcaaagcactgaggctcagccctatccccgagctggcaatcagtccaggggtgacgaatagatgacaggcccaggttctgcactgctgctgtatttttgggtgatggtgaacaagtccccattgtggtctgtttccttcacgtggaagatggggcagtgtttcctgtcccacctgttcccataaggctcagtgttcttagcacctgaaagactgtccttgctcacagtggctctcggcgggacagactgaggcctcgctgtctcagcgtgcggaggacggcaagactgagctttctttgatgcggttctccctggcgcatccactctggcgccccccagggcacagctctaagtttcttgggcacctctggggccgagtacaacaagatgcagctgcctggggtgccacctcggctcgcggcccctccaccccgggggtgctcagcaactgcacctcgcccctggtgagtcccaagcctggcctccccttctgccttcacccccacaactcctctccaaacccttcccctctaggctcaccttaggtagtaacctgcctcaccagcccccgcccccagcctgctctcctgccttctttaggcctctgcttcctccctactccgtttctgtcctctcttctgactccctctttggctttccctctcctcttgcacccagcctgaggccttcctggccaacctcttcgtgcaccctctcctgcctccgagagatctgagcccgacagccccctgtccagctgcggccacagccagcctccttgcctccatttcccgaattgcccaggaccccaggtgaggagtggaggctgagatgcaggggcatgtggaggggggtgggctgatcctgtaggagtggggagctggggcgctgaggggggattcagaaggggagtcctctggggtgtggcgggaggagggcatgacttttgacctgcttcatgttatgttccagctctgtgtccccaggaggcactgggggccagaagctggcccagctcccagaacttgcttctgccgagatgagtctccatgtcatctacctgcaccaggtgagtagaggggtgcccaaaggagaaatgtggagagaaggcaggtgaacaacatggagactgaggtggggtggagtctacggaagggtctagcagagtggcaggaggaggctgaaaagccctctgcctctagcccaggtgcttggccctgccctccttggggtgcagccctcattcctcctcctttccatgcagcttcaccagcagcagcagcagcaggagccgtggggtgaggctgcagcctccatcctgtccaggccctgctccagcccctcacagccaccctcgcctgatgaggagaagccatcctggtcaagtgacggtgaggagggtggggcctgcaggggacagagcctggtggacactgggcatcatggaactgcccagctgatggcctttttcaccaggctccagtcctgcctctagccccagacaacagtggggaacccagaaggcccggaatctgttccccggagggtttcaggtgaccacagacacccagaaggagcctgaccgggcctcttgcactgactgagacgactcctcagggtcagtattgcctcctgtgaggggagggagaaaggacggcataggtagttggtttggagtccgacttgaagcgatgggagcagtggtgggaatttggggtgatgggaggtggtcatctctggaatctagacccctggactgcttgccaagagccgtctcctcccacaggtaccctggcttcggcagccacaggagattggagggtggagtagaaaaacacaaggagtcattgttagaggccccatagatgacaggcccaggtgctttagttgggcaggacctgggagtcagtgaggaactcgccccgagaacagagaaaaggtaggcaaggagaggagatgctgatggcatctggaaacaagtcttagagatggtctgcacccagagggaataaggggagacatccccaactggaatgtgtcctggagcagctgcctgggaagaagtcctcgagtttcctcaaggtgggggacagaggtcaaggatgaggccgagctaaatggaagggcgacagtgaggcaggtgggctttaaggctgtggattcgtcatgctggcggctgccagcagcactttcaggttccttggggcttgtaggggatggggacttgtcagtggaaagacgggagggatgatgtttttggacttcagtacgggtgtgatgtcccaggaagtgggtgtggctccccatcctgtatgaaataagcagtaaagcttgctcatggctgttgcacatctctgtgactcttgtttctggcaggccccactcctggcagctgagtgctgcacctgccttctcgatcacgagcctgagaactgcacgggggagcagcccagactggctggaaaccatgttttcagagtgcagggtcaagtggcgtgtaggactctgtcaaaagaatgacccctttccccaccacatacccacaactgcacaggttaaaacagaaatcttgtcattttataattgtaatccacgccgggtgcagtagctcacacctgtaatcccagcactttgggaggctgaggcggttggatcacgaggtcaggagttcaagaccagcctggccaagatggtgaaaccccgtctttactaaaaatacaaaacctagccgggcgcggtggcaggcacctgtaatcccaactacttgggaggctgaggcaggagaatcacttgaacttgtggggtggaggttgcagtgagctgagatcacgccactgcactccagcccgggcggcagagggagactccgtttcaaaaaaaaaaaaacaaaaaaaaaaaactgtaatccacatgagctggggtaggcactttagtagttctcctaacatctggcacagtcccttatggtaaatcttcaataataaatacttgatttagagattagactttacaggtaagatactcctgagagaggcaagaggaatctaacattcgactaagaaacaggaagcgggtggcagtaggccctggggtaccgctgctgggaggggccttccagattaaggcggacccaggcccgaggcaacaggcctagagagggaaaagaggcgttttgctccttcctggaggaataatgctgaatccttgcagcctctggacagatgtgagaaggcaccacctcaagaggggaggagcggggctgatcctggtcgggcggacctgagtcgggcagccgctctcccggaactggaagggaaagccaggcggctctcaggggctgttggtgtctgagccgggagggtcgaacgcccagggcactgcgccccgcaactgacgctcctgcaaggaaaagctctgggtgcgtatgcggcttgtcacctcctgggtgcgcagcgtgagcccgaaaatgtcttcgtggtagcgttgctgatcctgtcggaaaagagcacagtggatcagaacccgactcggagaccttagcaggaaccccgcacgctcaggcccggcccgcccctccgcacccgcagcacgccgatgacgtcgccggcctcgtccagctccatgtcgccctccgtcgccaggatgcgctgcacggtctgcaggacgttggttgccatggtaacatcgccgcagacaaacatgtggccccgctcgaggcacagcacgcggtgcacctccgcagccagctccgtcctcaggatgtcctgcacgtaggtctgcggggcggcggggttagggcgggccctggtgggggtgggcgcgggggcgcagcccggggctgctggctggccctggacgtgaaagtctccggagcgggcctggtggggcctgcgtgccctggggcggtgtcaacaggggcagagccaaaggggcggggcaggggcgggaggaggcgggcctagaggggccggggcacaagggtgggccagagtgtgcaggggtggctgagtggtcgtgggaggccacgggagggccgtggttggtgtgccccgctggagagcgcgagtcctcccctctctccctatcttcaggttaccattgcgccctcagggtctcacaccttggggttgtcaggttcccgggagaaggcggtgaggactcggccaaacaccccgcgctgctgggcgttctgcacctcgtcgcggtagagatggtcaagttgggagcatcggcagccgaacaccaaagtcatgggagtgggctgcagccctgcaagcaaccccgcgcttgggaaggctcttctccggggcacagtgctagtggggcctccccacaggccaccgtcgcccagcctggcagcccagcgttttgggctgaaaccaccattactttggctgtttcatctctaagagagtgtagaatgctttcacagagaccctgcacagccctgatttacagagggaagggaagcgcgggtgaggtggtggcccctggtggagctgcgctagaatgcgcggcttcggactcagaattccatgccctttgcattgtgtgacatcgcagtccccttccccgctcccacttcatattctcccatacttataactctcctcccagtcacagccctcttcttttgattgacagaccaccctgggcaccccatgctcaatatgaacaccttgtagcatccttaggtcttggacagacctcggtcagctctggcacagtcaagaatccaccttgggcagttcttctttgagtcttagccctaatccctttgaaaattctattttcctttgtcctcaatccagtcaacacctactatgtaccaggcaccaggaagccagaagctcagggcccagcccttgcctttggtacctgccctccccttggtctcatgagcgtcttttcagctttgtggactttgtttcctgccctctctttcctatttcctgccttccagccccacccctctgtccctagattgtgtgactcccttcaggcagtcctttagtccccagcctcacctttgctctcaatgtcatgcagccgctcctgccagaatccccggaagggggcaatgccagtgcctggacccaccaggatgcagggcaagctgggatcgggtggcagccggaaggagggagccctggcaggagagacactccatcaggtcccctttgcctttcctgctccaccattctcaccatgcagggtgggtggagcaaggaggacccaagttcttcccatctcaaaaaaaaattaaaaaaaaaacaaaaaacaaaaaacaa

SEQ ID NO: 40 - DNA, 134692 bp, Homo sapiens
gccccgccccgcccctgcgcggaagtctatccgggctttcgcgtcaccaccctgcccacctgggtggcgcgtggcttacgcaacggtcactgggctcctgggccgctcccgggccagcgagggctgcgaaagaagttgtaggtacggcccatttttcttaacgccgcccttccaagccctttggcgctagtcccgggtctgccgcgatcgtttccttgcggtaggccgcaggagggcctttcctccccctcagttcaatgggattcttgggctcttctcccagacgctgagggaacagccacagacattgtctctcctctccgtgactcctttccttactccgtcatcccacatctctcttgtttgttctcttttcctcctgtttttcttattttacaaatactcgccagtaagaaagaagagatctgtcagttaagattgacctcaaaattaattttattaagcgtgtactattttacaaacggtggatccctgcaaataaaccttcacatacatgctcctgcgactggagattctgggattggttgccgatcctgagaaagctctcttcccccacccacccacatccacgccccttaatcctgtttactcctcttggctttaacccaggggacaagcacttccagcagtccccaacctttttggcaccagggatcagtttcatggaagacagtttggggtggggggcaagatgggatgacactcttctatctcagatcatcaggcattagattctcttgagaaggcgcaatttagatccctcacatgcgcagttcataatcaggtctgtgctcctatgagaatctaatgcctttgctcatctgacaggagctggagctcaggcataatcctctagccctgctcacctgctgtgtggcctgttcctaataggccacaaacctgtacctgtctgctgcccaggggttggggatccctgctttagaccagtgcttttgaaggaaaaaggaaagttgcacacatactgtgtctgtcacatcaatcagtagtgttacaagagctcttcacgggaccataccaggtccctcactccccctctatgggtgtcctagagcctgtgaaataacagatttggtgatgtggggagacaactggcccaggtggcactgagggaggccacaccccactctctgattttccttagagataaatataattatgtgtgcaacagaagcatgaaaaatgacacttattattgtcacccctagagaattcatgccccaaatattttagtcactgtgtgcctatgaaaagggcattcataggtattgtcccctgtgagtaccagaattttttttaacttactttttaaaattctatacagatttagttagtacaagttcagttttgttgtgtggatatattgcacagtggtgaagtctgggcttttagagtaccagaatttatactgctgtttttcagttggctcttgtcataaggtcctgccaattactagacacaaggaaataggtgggtgctatagttgtaacatataaagtatcgtttttatagtacttctcattttgtacttatttttgtactcatcctgtttaaacacttctgttggttaaccaaatcccatgttactgtggtgtttactaaacactgagattgaatagtacctggaacatagtgtaatatatgttcaataaatattttttgagggaatgaatggatgagcttctgaagaagccataccttagccacttttgtttttcctggatccagagcttagtctagcagtagtaaactcaccagtgtgagttaagtagagaagtcaagtgacttgcttagggaaaggcattcattaagtattttttaaagaatatcctactttgtcaggcgttgttttaggcattgtgaatacaatggtaagaaagactagcaagatcgctgttcttatgaagtttaaattctagtgagtgtaagatagaaaataggtaaactatatgagcaaggaattttggataatagtaagcacagtgaagaagtaaaactgtaaaggtcttccttaagactgggggaggggttagtttagattgattgcttagtgatatttttaaaaaccaaccatggaaatatttgggatcagcgcactacaggtaaaggcaactccaattgcaagagccctaaggaaggaaagaacttggctccttccaggaacatcatcaagaccactgaagctaaaatgtagagaaagtggtacaggatgagcttggagggataggtaggggccaaatcatgtaaggctttgaataggccatggaaatctacccatggaataagtttggaatttatttaaagtgtaaagagaaaccagtagtgagttggagggagtgataggatctgatttacattgtaaaaaggtttgttctgcctattatgtgatgactgaatcatactgggtggggagcaagatctatagcagaagataattgcagaaatccaaagaggaatgacaagtttgggataaaatagcagagaagtagatgtatgtgagctctattttgggggcagagcctacagattttgtgatgttttgaatatagaggtgatgaaaaaggagtcacctctagcccctaaatttttgtcttgagcttgtgtggatgattgtgccatttaccaaatggaaaagactaaggaagaaaaaggagcagccagggcggtgggaggggggagttttattttgcttaccttaatttttacattcttattagaaatcaaaggtaatttgaggcttcagctctgtgcagagtgcaaggaaccaaagatgcaaagttgggagtcaccagcatatggaaaactacctagggcaagtgtgctcaccgataacattgcagtgactagtgtaaagcagaggaaaagaagccaacaaaagagatggaagaatagccaatgaagtaggaagaaaatctgaagagtgcagtgacataaaagccgagactggccgggcatggtggctcatgcctgtaatcccagtactttgggaggctaaggtgggtggatcacctgaggacgggagttccagaccagcctgaccaacatggagaaaccccatctcaattaaaaaaaaaaaaaaaaaaagccaagactacaaaacatggccaacagtactgaatcatgcttagaagtcaaataaaataaagagatctgtgcattgggttttggaaacattaagtagttatatgccttgactagtacaataaagagaaaatgtggtgtcaagaaattgacatagtactgctggctgggcagaaattgacgtagtactatagacatctcaagatgttttactatgaaagagagccaagaaatggaggtaatagagaaatatgtatggtcaaagaagggttcttaaagataaggacacttaagcatatttagactgagaataatccaatagaggggggtggaaatgatggtataagagagagtgtgtatattttaggagtgaagtctttgagaaaatgagagggtatggaatccagggaatatatagaagtattggccttaggtaggaacatgaacatataaacatatactttcctttttttttttttttttttgagacagagtttggctcttgttgtccaggctacagtgcaatggagcaatctcagctcactgcaacctctgcctcccgggttcaagcgattctcctgcctcagcttcctgagtagctgggattacaggcgcacaccaacacaccatgcctggctaattttttgtatttttggtagagatagggttttaccatggccaggctggtcttgaactcctgacctcaggtgattcacctgcctcggcctcccacagtgctgggattacaggtgtgagccaccgcacccaaccacatgaacgtataatttctggtaagaagaaagacagcaagtatgggtagagatgcagatagatgggtagattcagtggtcagaggtgagaccttcggcctgatactgatactttttctcaatgaagataaggtatgacgcaagattagtaaagagtgaggaggaatatttgggtaggaggtttaaggggagaagataagatacaaaatagtcatttggaggatggaaagcaatcagaataatagcacagctgggcaaagttgagtggccatttgagatttgtggccctgtgagtgagtggctgagatacagtgaaagaaaaagacaataggagctaaggagatcaaggaactgaaagactagagtgttgggtgggtagaccacctgggtattagtggttgaattagtagctaaattagtatttgagcccagatatcttgactttctaggtcaatgggttaccattttactgtgaaacagttcacagcattactcttttgtgccacctacctacccttctggtcaacattaaaaaaaattgtggcctgatttttttttttttttttttggtccatacattcaaattataaactgtcataggctggtacttttgtcttgtccctttcatacattaatgtatacttattcaattttgggcttgtttttctttgtgatttttaaccatttccatcaatatgtgtttattaaagtacaaaagattatctcttggatggtaaagggaagatgaagaatgaactttgaaaatcttgtagccttacagagctgggataaccagtcataaggagacttgatctgcattgactttaataacaataataataatagacatcattttggataacctcttacattttatgcttttattttctctttatctcatttcattctcctaatggcctttttcagatgaggaaattgagactcagagaggttaagggtcttgacgaaggacatatacctagtaagtggcagaattattaatcacagtgttctgactctaagtcccatattttccactatattagtttgtctctttgctttttacactctattgtatgcaaagtgatatcaaagaaaaagttgctgggtagaaagtattggctggctggtggcctcttacaatgcaaagaatatttagtatgtatttaaaatccaataattgatggtataaaatatttatctactatatactatgttaggcaattcaaataactcagaaatgattatgaaactgtctctggtttaatttagtagggaaatagatgggaacacaagtcactaaaaagcatttcttggacttctctcacatcctaaacgtgcttctacaatactctatatttaccacattctgtatacagaggagaatacagtatctgtaatataatgggctctcaatgaatatttgtcaaatttaaaaatgatgacagttaaacaaggattaaaatagtggggtggatgctgtgataagcattggatgccatgataaggatgcatgttgaaggtagcgtcaggaaatcttctggaagaaatgacttctaaattgatgaagcgttagctggatgaaaagcaagagtgttggtgttggaaggcagcgtacagaatgcataaagttttggagatgtgagacatggcaagtttgaagaacaaaaatttagtatggctaaagtttagagtgtcaagtgatgaatgagaaggtaggcagggtcaaggttagagccttattcaaaggaccctataagctgaatgtaaggagttttaacatttttcttctatgggaagtcattgaggaatattaagaaggttgttgccataatcaagcttacatttaagaatattgttctgcattgtgaaaattacattgaggaggaacaagactggatgtggggaaaagttggaaagccattacggtgtttaggtggggaaatgcttatggcctggactggactagtgacaatttatctggaaagaaatgaataaaatttttaaacattcagtaacttgtcttaacatgatttagtaattcacttgattttagcagataaagaaaagcagcgagaaagaatgacttctcagtttctgttttgagcaactaggtcgatggtggcttcattctctgagataggaaattatccagagaaggaataactttggtggggaaagatcttgagtttgtgcatatactaacttaagatgcttgtaagacaagtagagatattcaataagtaattagatatactaaatagaatcttgagagcttttctagttcaaattcctcagcatattagttagaattgtagccataatagtagaatagatgttgagaaatgtatatagagtgagaagagaatagggcatagagaagaattctgaggaagcccaatatttaaaggatgaataggggaaagaaaccactaacaaagacaaagaaaggacaccagagaggtaaggatggtagagcaaataacaaaatgatgtgagaattcaaaaggggaaaaacacatccagtttatgtagtgtgcattgcaggaagctttatttagaataatcaatggatatttacaaagaggttcagtgggaagatgttccaaccaaataaaggcatggagtgcagttaacagtttgactgaaatgttgggtcaaaagaaagaaccagaaagaaagctggtgagacagtttgattccatgtatagcaaaccttggattctgggtaagtttttggtagctttgtctatagttgagaaaaaccattgtgtttggtgctaagagaaagaaaagaatataaaacatgcctggaatggtttatgctatggtttgactgtttatgtctcttccaaaattcatgctgaaacttaatctccaatgcaacaatattaagaggtgaggcctttaggaaatggttaggtcatgagggatctgccctcatgaatgtattataaaagtccttacaagaggcctggggacagctagctaggacttttttgcctttacatgccttccaccatgtgaggacacaatgttcattcccttcagagaatacaatgttcaaggcacccttttggaagcagagacctcaccagacactgaacctgactgaaccttaatcttggatttcccagcctccagaattgtgagaaagtaggtttctgttatttatagattactcagtctcaagtattttggcatagcagcaggaatgggctaagaaattgttactaagaagtggagtgttcctataacaaatgcctattattgtaaaagcagctttgtagctagtagtgaataaaagctagaacagttgtgaagtgcctcctagaaaaagtctagattaccatgaacagagcattaagggcaattctgatgaaggttcagaagacgaggagagctgtataaagagccttcatgttcttagagattatctaagttaatcatgatcagaaggctggtagaaatgtggagagtaaagaccattctgatgagttcttcagtggaaataaagaatgtcttactagaaactggaggaaaggtcatccttgttataaagtagcaaagaacttggctgaattccacctgtgtcctaatgctttgtgaaaggcagaacctgtgagcaatgaaataggatatttaggggaagaaatacctaaacaaaatgctgagggtgctacatgcttctcttgactgtttatgatactggacaaaaagagaaaaattaattcaagatggaatttataatcaaaaaggaagcagaacttaaagaattggaaatttttcagcctaaccaggttgtaaagactgagttcaggagagaataccaagaatatggccaagtgcatgtttgataagcagattagtatggatggaaggaagccagatgttattcatcaagtcagtggaggagtggccctgaaggtatttcagagatctttgaggctaccactcttatcacaggctcagagtgccagggccttcagggcagaacagtttcaagggaggggcccagggtgtccatgggaactcagggcttgctgcctagggccacgtcaactttctgctccacacatgtggctcagcattccttagccacaccagctgtggctcaagcaggcccaggtgcagtgtcagagagtataaacagtaaaccttggtggtgcccatgtggtgctaagtctgtagtcatggctatctccgcatagatttcaaaggaggtcacagagaaccttggggcccaggcacagaactgccagaggtgtgaggtcagcacagagagtcaccactagggcagtgcctacaagagctgtggagtcagggataccgcagagagcccccataagagcaatgcctagtggagctatgggggcagagccaccaccaagactgtaggccactagagataccagtgtgcaattcctgcctgggagagcgacaggcatgtgatgccaacatgtgagaactggtgcatggtctgctccccctaaagccatgcaggcaaggctcccaggagacatgggggctcaaccccttccccattgtatgcagaaggcaggacatggagtcaaagaagattattctcaagtctcaagatttaatgttgtttgccttgctgggtttgggacttacttggaacttattacccctttctccttttctatttcctcccttttgaaaagggaatatctatctttcctctgtctgtcccactattgtattttagaatgatataacttgcttgatatcataggcttacagctggagagcaatttgcctcaggatgaatcaaaccttgagtctcacccatatctgatttagatgagactctggactctggacttttgagttggtatcggaaacagttaagacttttggagctactgggatggaacaagtgtgttttatatgtgagaaagacatgaatttgttgtgggggaaggggcaaaatgctatggtttgaatgtttgtgtccctccaatttcatgttgaaacttaatccccaatgcaacagtattaagagctggggcctttaggaggtgactaggtcatgagggctctgccctcataaatggattaatgcccttataaaataagtggagggagctagctagccccttttcgcccttctgtctcttccaacatgtaaagatacagcatttatttcctccagaagatgcagcattcaaggcaccattttggaagcagagatctgagcttttaccagatgccaaatctgtcagcactttgatcttggattttccagcctccagaactgtgacaaaataaatttttgttatttataaattacccaatcttgaggattttgttaaagcaacacaaatagactaagacactactatggtttgaatgtttgtcccctccaaaactcatgttgattgtaacagtatcaagaggtgggacctttaagaggttattaggccttgagggctgtgcccacatgggtgaggttaatttcattataaaaggacaagttctgccacccatttgcgtcccttacccttataccttctgccatgtgaggaggacatagactccctcccctccagagaatggaacaagaaggccctctcaagatgctggggtgccttgatcttgaacttctcagcctccagaactatgagaaagaaatttttttcattataaattatccaatctgtggtattctgttacagcatacaaaatgacctaagacagacaccgtgtcactttattgtggcaacaagatctaggcacccgaaaacggtttaaaatcaaggtactatctgactaatgagatcaaatcctaaatactattaggaattttaacaatgacagtcaatttgaattatagtagtagaagtttagcccagatttgtattgtcctgattaaataataatactaggtagtcattatcttaaaaaaaatactgacctagtttgaatgccttttataaagagtattctgttatgcatgcatgtaggtctcaaattcatttgttcagaaagatgtatactgtggttgtttataattgtgttaatcttttatctgacctcaagaagagttctttgtttgaaaggcagcaatagttccaaagattccaaagcaatacatactcacaactgttgatgcatatgttttacctaacattaattgaataagtatgtgttaaatgcctactacatgtcagcaatgcatagtagataagagaatagactatatttaaacacactggaattgaaaatcccagctttgccactctcagtggaaggaaaagagctgcagtctcatttagaataatttatactgaattccatatacattatgatttttaaaggaaatttcagttcttatttagccaattattaatgctgttgtcaaatttaattggcatacctttctttagaggagagaggtgaggaattatttaaaagtatttagctgggctacaaagtaaatcatccacatttagaagagtacaagttggccataaagttttgctgaatgatctgtgatatgtagtcactagatgtcactgttgcacaacattgctccaaaagcataaacccatagtattgtgtatggacacaccaaggaaagacaagttgtttatattaagtgatacatatgcacatacatggtatttaagaaatgaagttcccaagaagtacgtattgctattctttcagcctatttcttggtatgcccctcagataatagaatcatagacttaaaactgttaaagcctggccaggcgcagtggctcacacctgtaatcccagtactttgggaggccaaggtgggcggatcacgaggtcaggagatcaaaaccatcctggctaacacggtgaaacccgtctctactaaaaatacaaaaaattagccagacgtggtggcacgcgcccgtagtcccagctgctcgggagactgaggcaggagaatcgcttgaacccgggaggcggaggttgccgtgagtcgagattgcgccactgcactcccgcctgggctacagagcgagactccgtctcaaaaaaaaaaaaaaaaaaaagaaactgttaaagcccttagatcatctaagatcctcactccctacgtcactttataggtttggaatcgagcagagagatgaaatgacaagaaatttactcaatatgatgtatcagggtcaggtgcgatgtctcatgcctgtaatcccagcactttggaaggctgaggctggcggaccacttgagatcaggagttttagaccattctggccaccatggtgaaaccccatctcttccaaaaaataaaaaaactagacggacacagtgactcacgtcggtagtcccagctactcgggaggcggaggttgcagtgaacccagatcgcaccactgcactccatcctgggcggtgagattctgtcaaaaaaaaaaaaaaaagtagcaaatgaaaaacagagaacttagattgcccagttctttttacaataccacactgtgtccattattaatatataatcaaacagacattctaaaaaaccaaggtgaaaatggaacttctaaatccatcaaaatttttcactattttgaaagcaaagcctagcaatataacagcagtacagacttctaataagttttaaataccatagcttttgctataagttgtacaaacatctcacttaattcccataatagcaagatatgtatatatgtgtgtttatgtatgtacttatatctacctcattccgaaaaggattttaagaagcttattgaaataagtaaagcataaaaattttttaaactgagctgatcatttatatgtaagacactggaatataaaccagtaagaagtcttatttttgttagtacaaaaagcaggccataatttctaataaacttatccagtcaactcatatttgggtgtctgtcctcaaatgtgattctgctttccctagctgtgaatatgaagaaaaacagatagtactatgcccaataaaagctgatgagatttgggaggccaaggcaggaggatcacttgagcccaggagttcaagaccagcctgggcaacatagggagaccccgtccctacaaaaaattaaccagacatgacatgtctgtagtcccagctacttgggaggctgaggtgggaggatcacttgagctggggagttggagactgcagtgagccatgatcacaccaccgcactccagcctgggtgacagacagagtgagaacccatctctccagaaaaaaaaaaaaaaaaaaaaaagatgacaagagattgtaaattacccaagatcatacaaccagtatatttctgatttcaaggctgttatgcatttatagtgatgccaagatactgtagcatgaaatgtttttccctttgtgtcatatctgatttctttcagcagtgttttgtaattctcattgtagagatccttcacttccctggttagctgtattcctagggtattttctttttgtggctgttgtatatggaatcttgttcttgatttggctcacagcttggacttgttggtgtatagaaatgctactgattttggtacattgattttgtatcctgaaaattttctgtagttttttatatctaggagcttttgggcagagactatggggttttctaggtgtagaatcatatcatctacagacagagattgtttgacttcctctcttcctacttggatgccttttctttctttctcctgcctgattgttctggctagaacttccagtattatgttgaataggagtgttgaaagagggcatcctcgacttgctctggttttcaagggtaatacttccagcttttgcctgttcagtgtgatgttggctatgggtttgtcataaacgacattattttaagatatattccttcatgcctatttgttgaaggcttttaacatgaagttatgctgaattttattaaaagccatttctgtatcgagattattatatggttttggggtttagttctaattatgtgatgaatcacaattattggtacatatgttgaaccaactttgcatgccagggataaagtctacttgatcgtgatggattagctttttcatgtgctgctgaattccatttgctagtattttgctgaggatttttgcatcagtgttcatcaaggatattggcctttttcttttttattgtgtctctgccaggtttgggtatcaggatgatgctatcctcatagaatgacttggggagttcttcctcttcaattttttggaatattttcagtaggaatgctaccaggtcttcgttatatatctggcagaatttggctgtgaatcattctggtcctgggctttttctagttggtaacctttttattactgattcaatttcagaattcattatttgtctgttcaggattttaatttcttcctggttcaatcttgggaggttgtacgtttccagaaatttacccatttcttgtagttattctaatttgtttgcatagaggtgttcataatagtctgaggattttttgtatttctctggggtaatgtccctttgtcatttccaattgtgtttattgggatgttctctctttttttctttgttagtctagctgtggtcttatttattctttcaaataatcttatttgttcttatttataatcttatttattctttaaataatcttatttattctttcaaaaaaccaactcctggattccttgatctttttgtattgcttgtcatgtcccaatttcattcagttcaggtgtaattttggttatttcttttcttctgctaaccttggggttggtttgctcttgtttttctatttcttctagccgtaaggataggttgttaatttgagatctttctaacttttatatgggggcatttagtgctataaacttttctcttagcatgctttagccctgtctcagagattctgttatattgtatctttgttctcaatagtttcaaagaatttcttaatttctgacttaattttattgtttacccaaaagtcattcaggaaacaggttgcttaatttctatgtaactctatggttttgagagttctttttagtatttatttctattgttactgcactgtggtctaagagtgtggttcagtttttttaaatttgctgagaattgttttatggctgatcatgtggccaatttacagtatgtgccatgtgcagatgagaataatgtatattctattgttttggggtggcaagttgtgtaaaagtctgttaggttcattgatcaagtgttgagtgcaggtcccaaatatctttgtcagttttctgcctcagtgatctgtctagtactgtcaatgggatgtttaaacttcccactgcttgtatgtggttatctaagtttcttcataggtctttaagaacttattttatgaatctgtttgcttctgtggtgggttcatatatatatttagggtagttaggtcttcttgttgaactgaaccctttaccattatgtaatgtccttctttgtcatcttttttcatcactgtttgtttaaagtctgttttgtctgaaattagaacagtaacccctgcttttttctggttttttttttttttttaatttgcttggtagatttttctctattcctttactttgagcttatagttatcattgcatgtgagatgagtcttttgaagacagtatattgttgggtcttgcttctttatccaacttgccattctgtgccttttaattggggcatttggctcatttacattcaaagttgatactttgatatatgcaaatttaattctgtcatcatgttgctagctgtttattatgaagatttgattgtgtagtttctactttatagtgtcaatggtctatgtatttaagtgtgtttttgtggtggctggtaacagtctttaatttctatgtttagcactcccttcaggacctcttgtaaggcacatctggtggtaacaaattcccttagcatttgtttgtctgaaaggatcttatttctcctctgcttatgaagcctcttttaactagataagaaattcttggttgaaatttcttttctttaagaatgctgaatataggcccctcaatcttttctggcttgtagagtttctgctgaaaggtccactcttagcctaatggggttccatttgtagatgacctgcctcttttctctagctgcctttaatgcttttttctttcatttcgaccttggagaatctgattgctttgtgttttggggatggtcattgtgtatagtatctcacaagggttctctgcatttcttgaatttgaatattggcatctctagcaagattggggaaattttcatggatgatatcctcaaatatgttttccacattacttactctttctccctctctttctgggacatagatgagttgtagatttgttctctttacataatcccatatttctcagaggtgtttattctttttgttcttttttctttatttttgtctgacagttgtttcaaagaaatggtcttcaagctctgagattatttcctgagcttggtctattctgctgttaatacttgtggttgtattatgaaattcttgtagtgagtttcttagttctatcagatcagtttggttctctcttaaatggccatttcatttttaagttcctatatcattttattgtattccttagaatccttgcattggggttcaactttctcctgaatgtcaatgttcatttctatccatattctgaattatatgtctgtcatttcagcctggttaagaatcattgctgaggaacaactacattcatatggaggtaagaagatactcgggcatcttgagttgccagagttcttgtgctggttatttctcatctgtgtgggctcatgttccttcaacatttaagttgttgtcctatagatggggctttttgcttttatcttctttgatgcccttgggggtttggttgtggtataaggtgggttcagttggctggcttcatttctggaagattttaaggggtcaaggctcagctgagctctcctcagctgtgtgctgtagctctggggggctgaaaccaggcccctagctctgttctctggcccctcaaggttaggaacctgctgtgctgcaggagccaaggtattcctagtccactgccacagtactccaatggggaattacccccattggagtgcttcactggggtagtggcaagaggatctttgcatgctcacacatgccagctgcctcagcagtgcaaaagggtgcatgtgtgtcagctggggaggggcatcagtggaagtagggcagcagcatccctagattgaggtgtttctacaaatgtgcaacaatgaagcaacaaagatatttcaagatagtttaagatatttatagcagtattttgaggatgatggatcacaggtattgaatacaaaaacaggtaaagaaggaagagggcaaaagtttgagttacagggttcattacactgcacatcctgatgaaagtgaagaataattggaggggatgaagtgaatacaactgaacaagagaactgaaagaagatgaagtagtattcagagatgtagatgcttgaaatcatgattatcgataatagagcatttcagatgatagaaggttttagtgtggtctttcctttattagaaaggaagtaaagaactgaagaaacaagatagtagatgaattatccaagtgtgtaagatgaaaagattacaaatatgggggtcaagcaccaacatctttggtgaataatggaaagggatcaaaataaggtgagtaagtaacagtgagtagaaggggaggaaggtgatattgtcaaattatacaagctttaaaaaagcaaggattttgtttcttttttatataagaagttttagaaatagcagtagggtgtcagaaggaatgttagtgaataaactgctgttatgtgagaggactataggggaagcagtgtcctccttaaaggaagggcttggtttcatatagggcacagaatttgagagaatgctttgaaaagaggttgagaatataatacagtttgataatcatctggcagaagttccagagtgttcagtgaaagcactcgagagttaaggaccatggatagggctgctcagaggcaatggaatagcattattggcataatccccaagggtctgaacagctttgtaattgatttccaatgggctatttctaaaccattttagccttctgtgacttattcatcctttattttctatttttaagtttttcttaagactcttttttacttcctaaagaagttactcgtactagttcattttctaaaatggaaaagtcaaaaaatcatatagttgttggatttttttctcttttcttggtagatcatttaatcttttatagatttaagttattacagcattttctaaatgttagcctataaattcttatgagagctttagtctgtgtcttgcacagaatacttgtcacattataagcagtttagttttaagagtatgggctctggagtcagactgcctgatgggctccaactcctttatttatagttatgtaacattgaagatgttaattcagctcttccaatataggaaagtatggacagtagaaataaaccaagttaggaaatggtaaggtatgcctgatatggtttgggcctgtgtccccacccaaatctcatcttgaattggaatccccacgtgttgagggagagacctgtaagcccacatgttgagggagagaggtgattggatcatagaagcagttttccccatgctgtcctcaagatagtcagtgaattctcatgagatctgataattttataagcatttggcctgttcccttcttgcacttctctctcctgccaccatgtgaagaaggtccgtgctcctcctttgccttccaccatgattgtaagttttctgtggcctcctaagccatgcagaactgtgagtcagttaaacctcttttgtttataaattacctaatgttgggcagttctttatagcagtgtgaaaatgggactaatacagaaaattggtactgtgaagagtggggtactgctataaagatacttgaaaatgtggaagtgactttggaactgggtaacaggtagaggtgggaacagtttggagggctcagaagaatagaggagtatgtgagaaagtttggaacttcctggagacttgttgaatggttttgatcaaaatgctggatggtgatatggacactgaatttcaggctgaggtggtctcaaatggagatgggagcttattggaactggaccaaagatcactcttctgtgctttagcaaagagactgctggcattttgcccctgccctagaggtctgtggaacttcatactcaagagagatgatttagggtatctggcaggagaaatttctaagcagcaaagcgttcaagaggtgacagaccataagagtttgcaaattttgtggcctgaccatgtaatagaaaagaaaaatccatttttgggggagaagttcaagctgcctgcagacatttgcgtaagtaatgaggagaatggggaaaatatcagagatcttcatggcagcccctcccataacaggtctggaagcctaggaggagaaagtggttttgtgggccaggcccagggccttgctgctttgtgcactctcaggacttggttccctgcatcccagccatggctaacaggggccaatgtacagctcaggttgttgcttcaagagggtgaaaccccaagccctggtggcttacacgtggtgttgggcccatgggtgcacagaagtcaagaattgagctttgcaaacctccacctagatttcagaagatgtatggaaatgactggatgcccaggcagaagtttggtacaggggtggagcctcaagaagaacctctagctagggcagtgtggaaaggaaatgtagggttggaccccctcacagagggtccccaatggggcactacctagtggagctgtgagaagaggaccatcattctccagacaccagaatggtagatccattgacagcttgcaccatgcccctgtaatgtcggcagacactcaatgccagctgtgaaagcagccaggcatggagctataccctgccaagccacagaggcagagctgccctaggccatgggagtctaccctttacatcagcatgccctggatgtgagacatggagtcaaaggagattattttggagctttaaggtttaatgactgcccccactggattttagacttacgtggggcccatagcccctttgttttgaccaatttctcccatctagaacaggaatatttacccaatgcctgtaccctcattgtatcttggaagtaactaacttgctcttgattttacagaatcataggtggaaggaacttgccttgtttcagatgagacattggtctgtggacttttgagttaatgctggaatgaattaagactttgggggattgttgtgaaggcatgattggttttgaaaacttgccttgcctcagatgagactttggacttgtacttttgagttaatgctggaatgagttaagactttgggggactgttgggaaggcatgattgatgttgaaatgtataaaggacatgcgatttgggagggcaagggcagaacagtatggtttggttctgtgtctccacccaaatctcatctcatattgtaatctccatgtgtagaggaagagacctgtaatttccatgtgtcaagggaggaaggtgactggatcaagggggcagtttccctcgtcctattctcaagacagtgaatgcgttctcatgagatctgatggttttataagcatctggcattttcccctgcttgcacttctctcttctgccaccatgtgaagagggtccttgcttctccttcaccttccacttgattgtaagtttcctgaagcctcctcagccatgttgaattgtgagtcaattaaacctctttcctttttaaattactcagtcttgggcagttctttatagaacaagtgtgaaaacagaataatacaatgcctgatatgggaggaatcaagtgacactgccataatttatcaaggaaatcacctagggcaaaatccctaaaggactatacttgaggaacaaggacaaattgaaataaaactgagcattacaaagctatcaactgagctcaatctctgatttggttaaagtgattttttcactccccctactccacatatttctttccaaaagaagttatcatctggagactgtacaatttgtacacaatgtcaaactttcaataaaaattgtgaaccatagtattagacaatgttatatgaccttaagccaagatagaaaattgaaaagggaaacagactcaaaagggatccagatttttgagttaaagaggttacaataactacgattataaaaactaaaaatattaaaactcttaaaggaaaatatagaaggaaagcttcatgatattggatttggcagtttacttctcggctatgatgccaaaagtacaggcaacaaaaggaaaaacagataaattggactacattaacatttaaaacttatgtgcaacaaaggacactatcaacagagtgacaaggcaacttacagaaaatacttgcatattactaataagatattaatacctacagtatataaagaactcctacaactcagcaacggaaaaaaacaaacatcccaattttaaaatgggcaaagatgctgggtacaatagctcatgcccataatcccagcactttgaggctgggagtttgagaccagcctgggctacacagcaagaccctggctatacaaaaaaataaattgctgggtgtggacgtgtgcaccagtagtcctaccacttgggaggctgaggcagaggatcccttgagcccaggagttcaaggctgcacgatctatgtttgtgccactgcactccagcctgggtgacataatgagaccttgtctcaaaaaaataagaataaaaatggacaaaggacttgaagagacatttctccaaaaaagatatatgcaaatagtaagcacatgaaaagatactcaacctcattaatcattagggaagtggaaatgaaaactacagtagataccattcacacctattgggatggctattaccaaaaaacagaaaataacaagtgtttgcctgcatgtggagaaactggaatcattgtgcatcgttgatgtcaatataaaatgatgtacctgctgtgaaaaaaaaaaaaccatatgatgatggttcctccaaaaattaaacatagaattaccatatgatccatcaattccatttccaggtatataccaaatagaattgaaatcagggattcaaacagatattggtacacctattttcatagcagcattattcacaatagccaaaaggtctatcagtagatgaatggataaacaaaatgtgatatatacatataaatgcatattattcagcctttaaaaaggaaggaaattctgtacatgctacaacatgtacagaattttgaataaattttggatgaattttgaaggcatgataagtgcaataagcaagacaaaaaagggcaaatattgtatgacttgaatcatataaagtacctagaatattcacattcatagagacagaaaggagaatggtggctatcagggattggaggaggggagaatgggaagttattgtttaattaatacatacacagtttcaggtcaagataatgaaaaagttctggagatggatggtggtgatggttgcttaacaatgcaaatatacataatgcccctggaactatatactttaaagtggttaaaatggtaaattttatgcatattttaccacaggaaaattgcttaaaataattgtgattagtatcagccaaagtaaaaaagatattattattatcaaaggaatcatagcaagaatgacagttaaatttttaacagaaactatgggagccagaatacagtggaacatctttaaagtacttaaagaaaataaactctaacctatatctaataagaatcactttcaaaagtgaaggttaagtatagatatttttcaggcaaagaaataaggaatttatcgccaacagatctatattaaaacaaattctgaagacagacaataccaaggttagcaatgatttagaacaactgtaacagcaggttaaagccagaaaaacaaagaaaaagggagaaaaatacataaaatttagagaggaagaaataaaacttatatttgctgactgtgtatgtatgtacttagaaaatccaaacaaatctacagactattagaattaagtgaatttatcaaggcctgatacaaagtgaaatgaatgaaaattattcatatttctgtatgccagcaagaaacaaataatgaatttttaaagttataatttttataaccatccaaaaaacataaaatacctaaaaataagcctaatgaaagacatactgttctgtacattgaaaacacaaaaaattattaagatcaagaaaatctaaataaatggaggaatatacagtgttcaaagattggaagactcaatattgttaagatgtcagttctccccaaattaatctatagattcaatgtaacttcagtcaaaattccagctgtgtgtgtgtaaattgacaacttggtcctaaaatgtatgtggaaatacaaaggatcaaaaagtcaatccaattctgaagaacaacaaaagtggagaatgtacaccaacaccagatgtcaatatctgttatactggccagacacaatggctcatgcctgtcagcactatgggaggctgagacaaaaggattgcttgagctcaggagtttgagaccagcctgagcaatatagtgagtcttcgactctactaaaaatttaaaaaaaaaaaaattgctggacatgatggcttgtggctgtagtcccagctacttaggaggctgaggtgggaggatcacttgagcccaggagattgaggctgtagtgagctattattgtgtcactgcactccagcctgggtgacagaggaagaccctatctcagaaaaaaaaatacaagcactagcataatgttagcctaaggatagacaaatgggccagtggaacaggatagaatatgaaaataaattcatatatgtgtgattacctgatttacaaaaaaaagtggcattgcaatacaatgtatagaggatgatatttttaataaattgtgctgagtcaattagatattgatatgggaaaaataaactttgatctcttcctcacatcccatatatgaaattcaattccagatggctcatagaccatagacctgttgttgttcctttcctatgtgaaaagcaaaacaataatgtttgtggaagaatatataggagaataaacattctcctacatgggttggcaaagatttcttaaacaacaaaagctctaaggataaagaaaggaaagaataaattgggccaaattaaagtatcttttaaaaaaggtattatcagcgtaaaaaagcaagacacagagtgggagatgatattggctctttatatatccaataaaagatttacatttttaatacctaaaaagaactccaacaaatcagtatgaaaatgggatccagtacaacaaaaaaatggacaagagatttgaacactttactaaagaagatattcaaatggccagtaaatatatgaaaaaatgctcattatagaaatgcaatttaaattcataatgcaatgtcaccacaacagttaaaagaaaaaagagacaatactaaagttgacaaagatctgagtaatattaaagagtacttcatttaaattccagctccccacttgctagttatatgaccatattgaaagttaaattacttaactttcctgcatccatagtttgaacatctataaaatggggataatagtattaaatacctcatagagttgttgagagaattgaggaagatgattcatgttaagtgcttaatatagttcaactggcattagctattataatttaattattatgataaccaataaactaagcattattatatattttttcagataaggaaattgaggccagtggagataaatcacttcccacagttatgaaaagataagagaagagttgaatacatttctttctcaactcaaagtccttgcttttaggcataccacctaccaattccactcttggcagatatataaagagggtattgagtgactgccagtcacaaatattgcttgactcagtataaagcttctcttatagctattaacctgtgcatctattattcagaccccttacttaggttttgaagttctaatacatagtctgcttgcctgggttccaagccctgctatcctaatcattatagttacatatcttaaaatatgctgcctagtcgcttgatgtctccatttgtatgattcttggtgttatgtttgcctgctccttgtccatctgcttacttatgactcacagcttctcctcatttaggacacagttcaaatgtcaccttgatctctataatatgatcctcatttattttctgcagtactgaaaatgttttttataatcttccccttccacctaacaagagtataagatccatgagaacagaagcctatatttctgttttattttgttttgattggctgctttgccttcagaggccagaagagtaggcattcaaaaattattaagtgtgtaaattaattttgtgtcctctcctcaaaatttatgtgcacttcagctcaaactttttaatggctctaactcccagtctgtctattcagaacatgacacaacttaggtgattcacctacctcccttattcttaccaattacctcataatctaacagcttatgacaaggtagtcatttgatatggtttgattctgtgtccccacccaaatttcaccttgaattgtaataatccccatgtgtcaggggtggaacaatgaggaggtaactggatcatgggggtggtttccccatgctgttctcatgataatgagtgatctgatgtgatcacgtcatgagatctgatgattttataattgtctggcatttcccctgctttcactcattctctttcctgctgccttgtgaagagctgccctctgccatgattgtaagtttcctgaggcctccccagccatgtggaactgtgagtccattaaacctctttcctttataaattacccagtctcgggtatttctttgtagtagcgtgaaaaaggactaatgtaaactggcaccacagagtgggctgctgttataaagatacccagaaatgtggaagcgactttggaactgggtaacaagctgaggttggaacaggttggagggctcagaagagaggaagatgtgggaaagtgtggaacttcatagagacttgttgaatggctttgaccaaaatgctgatggtgatatggacaatgaagtgtaggctgaggtggtttgagatggagatgaggaacttgttgggaattggagtaaaggtcactcttgctatgctttagcaaagagactggtggcattttgcctctgccccagagatctgtagaactttgaacttgagagtgataatttaggatatctggcagaagaaatttctaagtggcaaagtgttcaagaggaagcagagcatagaagtttggaaaaattgcagcctgatgatgcaatagaaaaaaaaacattttctggggaagggggtagaatttcaagcctgctgcagaaatttgcataagtaatgaggagtcaaatgttaatcaccaagacaatggggaaaatgtctccagggcattttcagagacctttgtggcagcccctcccatcacaggcctggagacctaggagggaaaaatggctttgtgggccaggcccagggtcaccctgctctatgcagccttgagacatggtgccctgcatcccagctgcttcagctccagctatgtctaaaggaggccaggtacagctctggcattgcttcagagggtgcaagccccaaggcttggcagcttacacgtggtgttaggccgacaggtgcacagaactcaggaactgagctttgggaacctccacctagatttcagagggtatatagaaatgcctggatatccaggcagaagtttactccagtggcagagccctcatggagaacctctgctagggcagtgcaaaggaaaaatgtggggttggagcccccacacagagtccccactggggcactacctggaggagctgtgagaagagagccaccatcctccagaccccagaatggtagatccaccagcagcttgcaccatgtgcctggaaaagcagcagaccctcaatgccagcctgtgaaagcaccagagagtgggactgtaactctgcagagccacaggggcggagctgcccaaggccatgggagcccacctcttgcatcagcgtgacctggatgtgccacatggagtaaaaggagatcattatggaactttaaggtttactgattgccctattggatttcggacttgcatggggtctgtagcctctttgttttggccaatttctcccagtaccctcattgtacctaggaagtaaccaacttcctttcgattttataggctcataggcagaagcgacttgccttgtctcagacaagactttggacttaggcttttgagataatgctggaattagttaagactttgggggactgttggaaaggcataattgtgttctgaagtgtgaggacatgagatttgggaggggccggggcagaatgatatgatttgtctctgtccccacccaaatctcaccttgagttataacaatccccacatgtcatgggtgggacaaggtataggtagctggatcttgtgagttagtctcagaagatctaatggttttataagtgtctggcatttcccctacttgcactcattctctcttctgccaccctgtgaagaggtcccctccagtatgattttaagtttcctgtggcctccccagccatgtggaactgtgagtcaattcaacctctttcctttataaattacccagactcaggtatctcttcatagctgcatgaaaatggactaatacatcattctaatgacaagatagttattttgacagtcacttcaatcaaaatggaactacactttaaaggaatttagatctaagtttctgatcaaaatttttaaaggttattttttgctttaataatgttataaattcagttatgattctttataggattttatgcagtaatattttacttcattatggtaagacaatagatgtaaagcagctagcatatggtagctactcaactgttaatgttccttttcgttaacaattttcattattaaaattgttttccttttagaaaagtatagatacttgaagcactacaggatatggtaataagactatctaaaaattaaaacttgaaatctttagttttgttcttaacaacaactcaaaaattgagagaagatatttttaagaaaagttaccctacttatatttgaagctagcaaagattacagaggaggtagaaacaacagatactttaaaataaaagttataagtaattattattttattcatctagtttattcttcttcaaaataaaactttatagatatatttaaatgttggacctacagatccttcaaatgggccacataaaaagatagtatgtatcagtaacttatagatgtaggtattaatgtagttggtcatatttcatttaaaatttttctggagtgttttatgtaagagcatgacagaagatagattaaatcaacagtggatattaactcaaacacaccagttcagtgcataaaataaatttctgcattttctgatacatgattctatgatatgggccagcattatgaactgttgagaaatattacatttctgtatgataatggtttttaaaacttatgcatatggctttggttaataatgttaaagatgaatatttggatctatgttgactataaagatatctgacttgactgtgatacaactttagaacaaaaaatcctttaaaaaattaatcccacttaaccatgtttgttttcatatggatttatagtcttgtttcttcttttaaagtatttttcttttaaatcttagcatgcataccacagaatcaaaaaatgaacatttggaggatgaaaacttccaaacatctacaactcctcaggtaaaaacttaaaagtatactgtaatatatgatataaaatcaacctgatcttaaaatttattcctaatttacttattagataggtttcttttatatatctggttaaaaatgaaaagtggtaaattttaaaatagctagttgtaatgggtcctaggaaatgagcagaaataatgaaacaaatggaaaggtgtgactatagagcattttggagctaaagagcacagattttaggaataagaagaaatgtcgcttattatttctcaccacattcagggaaaactcagtaacttaaactaacagaggtaaagataagtctagattaattaaaatgttgtgctgtgtgttttgaagagacccaagttttttatttttatagatatatagagcaagtcgttagaccttttgttgatctagttttacttagtaataattgctcataattagaattgtaaatttcgtatttttttaaaatagagatttctacagttcttaagggtcaaaaagtcatttttaaaaatattttaaatattcaccattgattctaattatctgtgaagaagtcatcttagtctacatcagtttattacaaattctaaaataataaaacttaaaataatatggttttactctacatgacctttcacccaccttaataaaaattcaccattgtgtctttatcccttttatatagtaacagaattttcagaaaaagcctgcctctataccagaactccaataggttaattatgatcagatttgaagaactttgatcttaaagagctacataattcatttttaaccatcagctgccttgatatctctgtctccttagtcattacatgtaaaattcccttcctcaatgtgtccatgcactctagcctttttattgtttcctgtgatgataagatgttccctctttcactcactcaaagtattatcaagtcactcaaattgctggcacacacacccccacacccacccacccatgacaatcataaggcaaatttggagatttctactgcagagttaactctactctggtgttttgttgttgttatcattgtttatgttttgttttttacattggaagaagtttctcaatattctcacaaaccaaagattcctttttttcaaaatcagcagtttcataatcaggctaccattaaaaggcctgggagattaaggtatacccttgcactatttaatatgttatctataaatattagtggaagcatgcttgaatttccgaaggcttgacctatgtttttctcatttttctttcagttatataaatttatcaaatgagatgaatccaagtaaaattatatttcacctcctttctaattgagttgtattttcatttcacaaaagttttggtgaataatctttgggatgtatacagaggatggacacttttaattattgtgcccaaactgtaggcacctttattcagtatacacaaatgattgaaaatagtggggacccaagtctataaaaggttcaatcaaggtaccttgcaaaatacactgctgttacatccccaaacagctactgatatggagcatgaatcttcttttgtatctgtgattcctcgcattgacagtaataatataaatttaattctaaaatttggtggtttatttcattcataaaattatacagaaagtatggttccttaaagattttcttgttttactacagagtctcattgatcctaataatactgcacaggaagaaactaaaactgtcttatcagatacagaagaaataaaaccacagacaaaaaaggagacatacatttcttgtcctctaagaggagtattgaatgtaattattacaaatggtatgtgaaacaaaaaatgtaaatgaagagaagatgagaaatatgtttgataaatattaaaacatgagacaacaaagacactacttaatcaatatactccagatcagatgatcagctttgttacaagcaatatgtgaacaaagaggaaatattttcttgaatctttcaaagataaaaacaaaaacaaaatattgcctaggaggtgtatgttttaatatttgtcatacttttttatgttaaatttttgggattagaaacatcattgattaaaggattttatttaaaacctactttgacatttagttttaagttagctagaaagaacattataattttggaaataattatgtttcttattaaaattgggccctaagttttaaaacagcagcaaccttgtaaaaagttgtataacacttgctttcccactacaattttaaagcatagtgttgttgtcagcaaatacttataaagagattttcttgtgtatgtttttctaaatattctgtttgattaaacctatgagagaaagagattttggcttccagaagtatatagaattttgttccctatagagaacaaaaaattgattaaaaatgatgaagcacaagtaattgaagttttaaatttttattttcttatttgctgcttgctaactttaaacttttgaagcaaattttattcattgatttttttcattagtaaaggttgctttttaatttacgtcagtatattgatggccttgaatcaaagttttctgtgaacttgaatagtcctcatctgccagtgtaagtgattggactcctttgtaaatatacatatgttcccatgacttggtctatttagtaggccatttctacaaagcagttattaggagtagggccagggtctgtggaagagagggaaatgtattatttaccaaaattattcactgagtgtggactacagtttgctcaggaactaattgaggagttctagaacatcagaactaaaactgcaggtttagatataactcatttccccctttgttttctttcatttttgattttgcagttttggagacatttataggaaaaggagattttctgtgtttctatttaggggtgcatattcttgcactctcttttttgaaatcaatctctctctgtttgtccctctctctcaacacactccctacattcacactgtttcctttatacacaaagtatagaatctcaatctctgggtatgcttagaacatgccactgttagtaatcccactctgccgcatcatggaataagtaatgtacaaccatgtgtaagcagaatgaaacaacaaaataatttcttaaaactgcatagagtttggataataaaaggaaatagaacaacatgtttttctataaataatagttaattcaccaataccacatgtgtacaagttaaatttaaataagaaatctaaactctcaaatgcacacagaaatcagtctcatcacatttaatatcatactgtttgcatacctcatttggggaatggcttgcttcatcccaaataaatggatagtctaggacagtagatttagagcttaagatattattcctttttgtttcttttcagcctacttttaacaaaaatgctaatatatttttatgaagctttttttctttaaatgaattaaagttttcttgtatgtccaactatgatttttaagtaatcttggggacagaacttctccattaaaattttattatcagttttatgaagttagcagtcttggaaatttaaggttcaaaaataatatcccagagacttccagtttccagttctacacgtaaggagattagaagtcatcactctgtcctaaaaacaaataaaaagctgaagaaactgaaaaatcaacaattcttcttaaatccatcagagaagtgagtcacagggcaaactgctgcccaaaaaataggagtgattagacagattcagagaatcataacttacaggaatgaaaacctctttgggaaccaggagcagggtacaaaaacctgaattgtaatttaaaacttggctaaagctctgtgtggaaaagtcgaggaggtccccaattatgggatgggagaggcccacacttttttaagttttaccttctgcagccaaccagcaggaggagagggaaagtatcaaggaaagaggagggtaaccattgtgaaatataccacagtattctgttcttcttacaaagtctgccccccaaaaaaaaattttttatcagagcctaacctacacatgtttttatcagagcctaaccaacttagatctgatggatctaagaagagttgttgatttttcagtttcttcagctttttatttgtttttaggacagagtgatgacttctaatatccttacatgtagaaatggaaactggaagtctctgggatgttatttttgatctaaacttccaagactgctaacttcataaaaactgatagtaagattttaatggagaagttctgttcccaactctagtcagcctcctctagccttccacatagttgaaggaaaatatccaactctggcctcctctaaccatcctgcaccaactaagggagtgaaaaaaaccagaaaagcattttttgacattcacagctcagaggcacaggcctactaaaagactgagatctagtgatagaactatagaattttctccccacccccaacacacacaccttatcaccacattactaaagtcttacttaccacaggtccttttactcagtacatcatgtttatctttcaactaaaatttacaacgtgtattaaaaggcaaaaaacacagtttaaagaaatggagcaaacatcagaaccagactcatatatggagggtatattggaattatcagactgtgaatttaaaagttatgttaaatatgctaagatctctaacggaaaaaaatagaaaacatgtaagaacagatgagtattataaacaggatgaaaattgtaagaaagagatgccagatatcaaaaacactgtaacaaatgaagaatgcctttgatgggcttattagtaggctggacaaagctgagaaagaatctccgggcttgagaatatgccagtagaaacttctaaaactgaaaagcaaagagaaaaaaatactgaacaacaatgaaacagaatatccaagaattgtggggtcactacaaaaggtgtaacatacatgaaatgggaatatcaaaaggaaaaggaagacagaaaggaatagaagacataattgaagccataatgactaggaatttccacaaatgaatgtcaagcaccaagtcacagattctggaagcccagaaaagaccaaacagggtaaatgtccaaacagactacacctagccatatcatattcaaacttcagaaaagtcaaagataaagaaaaaatcttgaaagaagacagaggtaaaactacccataaaagagcaaaggtaagaattacatccaacttctcatcagaaaccatggaagcaagaatagagtggcatgaaatatttaaaatgttgagagagagaaaaaaaaaaaaacaacaccagccttagaattctgtatcctgtgaaactgtccttgaaaagtgaaggagaaacaaagactttcacagataaacaaaaattgaagaacttttgtgccagttgacttggcttgcaagagatgttaaaagatggtcttcagagagaaggaaaatgatgtagatcagaaactcacatctatgtaaaaaaggaagaatattcgaaaggaaatacacaaagataaaattttttaaattcttaatttatctaatagataacaatttgttcaaattaataatagcaataatgtatttatgactatagcttatgtttaagggaaatgaatgagagcaataatacaagaaatgggagggaggaattagaaatattattataaagtgtttgctctacctataaagccatatagtattatttgaaagtggactttgaccaggcacagtggctcacacctgtaatcccagcactttgggaggtggaggtgggtggatcacttgaggtcaggagtttgagaccaacctggccaacatggtgaagccctgtctctactaaaaatacaaaaaattagccgggcatggtggcaggcacctgtaatcccagctactcaagatgctgaggcaggagaattgcttgaacccaggagacggaggttgcagtgagccgagatcacaccgctgcactccagcctgggcaaaagaaggaagaaaaaaaaaaagaaaagaaaatggatttgtattagttgtaaacgcatgttgtaagctctcaggcaaccattacaaaaatttataaagaagtataattgatatgctaacagaaaattgaatcatataaaatgctcaattaaaaccacaaaaggcaggaaaagaatggaagacaaaagtaggaacaaagaagggcaatgaatagcaaagaggaacaagcatgattgatattaacccaaatatatcaataatcactttaaatgtcaatggtctaaatacactaggtaaaatacagagattgctagagtgggtcaaaaataagaccgaactatgtgttttttacaagatacatattgattaaggaaagagatggagaatgatattccattctaacactaataaaaagaaagttaaattagctatattaatttcagacagcagacttccagcaatgagtgttatcaggaataaagtggagcattacataataataaaagggttaatttttcaaaaagacatgacaatccttaatgtatttgtgcctaacaaaagaatattaaaatacgtgagtcaagccaggctcattggtatgcatctttagtcccagctactctggaggctgaataggaggattgcttaagcccaggaggccagcctggggaacatagccagaccctttttcttaaaaaaagaacacatgagttaaaaactggcaaaactataaggagaaagagataactttcatttttctagttggaactttaacacctgtctatccgaaatggacagagacagcaggcaaaaattcaataaagacatagttgaactcaacagtatcatcagtcaactggatataattgacatttatagactacttcatcccaaaagagcaaaatacaaattctgctccggctaatatggaacattcaccaagacagactatatcctgagccataaaacataccttaataaatttgaaaggatgcaatctctgctctcagaccacaatgaattttaactaaaaatcagtaacagaaaaacagctttaacatcccgaaatacttaaagattaaacaacacacttctagataacaccaaatcaaagaactctcaagagaaaggtaaaaatactttgaacagccagacatgttggctcacacctgtaatcccagtactctgctaggccgaggcaggcagattacttgagctcaggagtttgagaccagcctggcaacatgatgaagccctgtctctacaaagaaatataaaaattagctgagtgtggtgacgcatgcctgtagtctcagctacttgggaggctgaggtgggaagattgcttaccccaggaggcagaggctataatgagccaagatcacaccactgtatttcagtgtgggtgacagagtgagactctgtctcaataaaataaaataaaataataaaaaatacaagtactttgaacaaaatgaaaatactacttatcaaaatttatgggatgcagcaaaagcaatgagtagaaggaaacttatagcatttgataatatttcttaatagaaaaaaagaaagatctaaaatgaataaattaagcttccacctcaggaagctagaaagaaaagagctaattgagttcaaagtaagcagaagaaaaaaagtaatataatttagagtagatatcagtacaattaaaaacaggaaatcaataaattcaatgaaacaaaaacctggttctttgaaaagatcaacacaattgataagcctttagccaaactaactaagaaaaatatgagagaagacacacattacttatatcagaaataaaagagaagacattgctacagatcccatgggcattaaaaggataataaagtaatactatgaacaactttattcccacaaattcaataacctagataaaaaggaccaattccttgaaagacacaatctgccaaaactcagaagaggaagtggataatatgaataggcctataactattaaagaaattgaatcagtgtttctttccaaaacagaatgtactgggcccaggtggattcgctgataaattctacaaaacatttaaggatgaaattatacaattttctcagctatttctagaagacataagcagaaggaatactttccaatttattctataaggtcagcattcctaatatcaaaatctggcaaaaacattatagaaccaatatctacagaccaatatctctcatgcacatagatgcaaaaattcttaacaaagtattaacaaattgaattaaacagcatataaaaaggatacaccatgaccatgaccaagtgggatttatcccagatatatgagattagttcatcattcaaaaattaagtaatgtaatccatcacatcaacaggctaaggaagaaaaatcacatgatcatatcagtagatgcagaaaggtatctgacaaaatccaatgcccaatcatgattaaaaataaaaaactatcagcaagctagaatagagtggaaacttcctcaactgcataaaaactatctactaaaatcctacaggtaacattgtactcattggtgaaaaactagaagcttttcttctagatcagtaacaaggtaaggatgcctcctcttaccacttcttttcaacattgtactggaagtccaactaatgaattatgacaaggaaagtaaataaaaggtatacaggttaggaaggaagaaataaatttgtctttgtttacagataagatgattgtatcggtaaaaattctaaaagaatcatgtaaaaaaaactcctggaacaactactaagtgagtaagatggcaggtacaagattaatatacaaaagtcaattgttttcctatgtgccacagtgaacaaatggaatttgaaattaaaaacagcaccatttacattagcaccacaaaaattaacatcttagatatatgtctaacaaaaatatatacaagatctatttgagtaataactataaaactctgatgaaataaataaaagaactaaataaattgagaaatattttatgttcatgaaagactagtattgtcagatgtcagtacttcctaacttgattcaatgcaatcccaatcaaaattcctgaaagttattttgtggatatgaacaaatttatttaaaaatttgtttgggcaggcaaaagacccagaaaagccaactcgacattgaaagagagaaacaaaatcagagaactgacattacccaacttcaagacttactgtaaagctacgataatcaggacaatgtggtattggtaaaagactagacaaagagatcaatcaaacagaatagagtccagaaatagacccacaaaaatattgtcaactgatctttgacaaaggaataaaggcaatacaatggagcaaacataatcttttcaactatacatcatgacaaaacatatggacctccacatggatgcaaaaaaaaaaaggaatctatacatagaccttaaaactttccacaaaattacctcgaaacatatcatagacttgaatgtaaaacacagatctataaatgtagatggtaacatagaaaatctagatgacctttggtatggtaatgagttttaggtataatatcaaaggcacactccatgaaagaaataatagataaacttgatttccttaacattaaaatgtatgttcttccatgctgttcccttctgtgaaagagaagggaaaaaaatctatgctctgtggaatacactttcaagagaatgaaaagacaagcaacagattggaagaaaatatttgcaaaggacatatttgataaagactgttatcaaaatataaaaagaactctaaaacttcaccaaaaagaaaacaaacaaccagattaaaaaatgaacacaacactgcaacaggaacctcacgaaataagatatacagatggcaagtaagcttatgaaaagatgctcaacatgataggtcattaggtaattgtaaattaacacaacagtgagagaccactacacacctattaggatggccataatccaaaacactgacaccactaaatcttggcaagggtacggagcaacaggaactttcattcattgcaggtgggagttgtacaaactgtacagcccctttggatgatagtttggcagtttcttgcaaaaataaaaagacttaccatacaatccagcaattacactccttgatatttacccaaatgagctgaaaacttaagtccgcacaaaaacctgcacataaacatggatgtttatggcaaccttattgataattatcaaaattcagaagcaatcaaaatgtctttcattaggtgagtgaataaataaactgtggtacatctagaaagtggaatattattcaatactgaaaagaaatgacctatcaagcaatgagacaacttggagtaaacttaaatgcatgtttctaagtgaaagaagccaatctgaaatagctacattctgtgcgagtccaactatatgacattctaacaggggcaaaactatggacacagtaaaaagatcagtggttgtcaggaattgagaggagggagggatgagcaggcagagcccagaggatttttagggcagtgaaactattttgtatgatattataatgatggaaatatgtcattatacatttgttaaaagccatagaacatacaaacccaagagggaacctaatgtaaactctgaactttgggtgaccatgatgtgttaatataggtttatcaattctaacaaatggaccactctggtgtggaatgttggtcatagaggaagtgtgtgggagccgggatttttttttcatcaacttttattttaagttccagggtacatatgcaggatgtgcaggtttgttacatgggtaaacatgtgcgatggtggtttgctgcacagatcaatccatcacctaggtattaagctcagcatccattagctattcttcctaatgctctccgtccctcaaccccctcaacaagccccagtgtgtgttgttccccccatgtgttctcatcattcagctcccacatataagtgaaaacatgtgttatttggttttctgtttctgcattagtttgctgaagataacagcttccagctccatccatgtccctgcaaaggacacgatctcattcctttttatggctgcatagtatccatggtatatgtaccacattttctttatgcagtctatcattgatgggcatttatgttgattccacatcttttttattgtgaatagtgctgcagtgaacatccatgtgcatgtgtcttcataatagaatgatttatattcctttgggtatatacccagtaatgggattgctgggtcaaatggtatttctgctcctggatctttgaggaattgccacactgtcttctacaatggttgaactaatgtaaattcccaccaacagtgtaaaagtgtttctttttctctgaacatcaccagcatttgttgttttttgactttttaataatcaccattctgactggcataagatggtaaatcattgtggttttgatttgcatttctctaatgatcagtgaggttgagctttttttcatacgtttgctggctgcataaatgtcttctttcgagaagtgtctgctcatgtcctttacccactttttaatggggttgtttgttttttttcttgtaaatttgtttaacttccttgtggactctggatattagacctttatcagatggatagattgcaaaaattttctcccattctgtaggttgtagagagcggggatttttgagatctctctgtaatctctgctcaattttgctgtgagcctaaaactgctctaaaaaataaagcctattaaaaatacaataatatccacattccttctgggttatagtcagtagagaacagacactaaggagccaagtggggatgaacatagttccattagtggagggccagtgcttcccccaagtaagatctccttggaaaaatggagtaaacataaggcttctccatagatcgtgtctcctcctgtctggaaagctgatccttcagagcagactttgagtacgcagttaactatgaggaaggacttgcctcaaaaacactatcatgagcagactggagttcactagaggctggagaagagaaatggatgccttttagaggggtcctgacccacatgtgtttactactgagaataacaaatgaaaagaggagagtttactcatccaaacaatgcaaaacagacagaggaatggatttctcacttttgaggcaaaagaaacctacctactgattctaggatatggctcaataactatgaggttctcaccaatcaggttaactacttactattccaatcttggcaaagagcaaataggaaatgaaaagagttgaaaacgtttgtctctaacatcaatgaacttgagaagggttttcacctacagttttacattataatgcttttttattccccaagaagtcatccattcaattaagtatgtttgctcagtggtttttaccctgtcataagtagaactatttatgcagttgctctctgtaacacctttcacagcatcatatttaaaaagcttttaataatgagtataaccatgtacggtaaattaagaaaccagaaagctaaccatatcaataaatactagagagcaaataaaaagttttagagcatttattttagaaaagttttgtagtattatcctaaaaataagaacacgtttttaatcctttggttatatacccagtaatgggattgccgggtcaaatggtatttctagttctagatccctgaggaatcgccacactgacttccataatggttgaactagtttacactcccaccaacagtgtaaaagtgttcctatttctccacatcctctccagcacctgttgtttcctgactttttaatgatcaccattctaactggtgtgagatggtatctcatcgtggtttcgatttgcatttctttgatggccagtgatattgagcattttttcatgtgtcttttggctgcataaatgtcttcttttgagaagtctgttcatatccttcgcccactggttgatgggattgtttgtttttttcttataaatttgtttgagttcattgtagattctggatatcagccctttgtcagatgagtagattgcaaaaattttctcccattctgtaggttgcctgttcactctgatggtagtttcttttgctgtgcagaagctttttagtttaattagatcccatttaaggattataaatcatgctgctataaagacacatgcacacgtatgtttattgcggcgctattcacaatagcaaagacttggaaccaagccaaatgtccaacaatgatagactggattaagaaaatgtggcacatatacaccatggaatactatgcagccataaaaaatgatgagttcatgtcgtttgtagggacatggatgaagctggaaaccatcattctcagcaaactatcgcaaggacaaaaaaccaaacacctcttattctcactcttagatgggaattgaacagtgagaacacatggacacaggaaggggaacatcacacaccagggatggttgtggggtgggtgtagtggggagggatagcattaggagatacacctaatgttaaatgacgagttaatgggtgcagcacaacaacatggcacatgtatacatatgtaactaacctgcatattgtgcacatgtaccctaaaacttaaagtataataataaaaaaagaatatgtttttaaaaatttgtaacttctcatagactatatatttttaaaactctagctgtcccatattaattgcttagccatatactgcacccagctggggctctgagaatggcacattgaaaagaattattagggacaagaaatttttctggttgttagaaaaaaattgtactagtgttctaaaagttcataattaaagtattcccaaaaacgttctcaacattggtgtttaggtgctctcctgaagtaacattaatttagatacatcaaaatgtcatttactcagcaaacatttattgaatacctataaggttctgtttgccagggagctaaaacaaaatatctaccctcaactacaagcataataataaattatttaaccagaatcctgtttgtaattctcttaaggtcacttacaccagtgtagtcaaaagtatcttcatcttctcactagaaaactctgctcctcttgttcttcttcctttttttctgtttttttttttttttttttaagttataatattgtctcagttatacagcctagagagctcataagcatctttgacttggccttttttcttcatgctgttattcagtttgtttataagccctatcaattccacttccataatatttctctctttttttttctttttttggaggcagagtctcactctgttgcccaggctgcagtacagtggcaccatcacaactcactgcaaccttgacttcctgggctcaagtgatcctcctgcctcagcctactgagtagctgggactgcaggcacatgtcaccatatctggataatttttaaaattttttgtagagacagcattgccctgagtttcccaggctggtcttcaacttctgggctcaagccatcttccagccttggcctcccaaagttctgggattacagataataagccattgcacccagcccataacatttcttatgtttattttactcctaaagtttagcaaagcattcaagacacttcatgtttcaattatgaattttctttccactctcacctgccaaaatatctcacttcatccggacaaatttacttacctctcaatgtgctcttgacttcacgttgctatatctgtgtccatcctatcccttaacttaccatgtccttatctttgcctattgaaatttcatctttcaagaacctatgatttttttccagattttccagttttactttggcacttatgccattttaatttgtacaacatttctgtcttttttattaaattaattgtaagttccttcaaagcaggtattagctctttatgactgggacctatccttgcatatagtctttcagaaaccatttattaaattagctaatgcaatataaattagttattgcttcaaatgagatgtcatgaaaactattgatgactgttaagaaatgataatatctttgaatttcagaagagacttaatttcttgattttaaagtagaagttcaaagtaaatcaatactgatatctacattcaagacctagaatattacgtaggctagtaaatgttatccttcatctctggagtatgaaaacgaccgtaactggtgaaattgctggggtttatctgactaagtgtattaaccaaatccagtgaacgtttctgtctgcatcgtattcaagatctttccagcttttgacaccaatgatcactctcttattgaaacacttgtcttttttttctaattctgaggcaccaactggttttcttcttccctcactgcttcttcctttcttgtcttccatattccattcttcttttcctaacttctaaataccaaatatcactcaggacttagacctgggccttttcctcttttctttttatatagtttttctatgtggtctcatcaatgtccaagatatcatatttatgcatgtgaccttctaatttaaacattatctggccaggcgtggtagttcacacctgtaatcccagcactttgggggctgaggcgggcagatcacctgaggttgggagttcaaaccagcctggccaacatggtgaaaccccatctctactaaaaaatacaaaattagccagacatcatggcatgcacctgtagtcccagctactcaagaggctgaggcaggagaatcgcttgatccccaggaggcggaggttgcagtgagccgatattgcaccactgcactccagcctcaaaaaaaaaaaaaaaaaaaaaaatatatatatatatatatatatgtatatataatcattatagatatagttgaagcttcctgtgtactattttccaacctcattcccctccttttcctggaggtaccaactattcagataaaagcagaaattaatgtcagtagcagtgtgttcatcatgtgtctatgccttcatgacaaaggaagtttaaaaacttgagttcctggcttctacactgggaaagtaatattaataatgttagaaattctccaaacatggggtgacttattaaaacctgctcaggccaggtgccgtggctgatgcctgtaatcccaacactttggggcaccaaggtggaagaatcatttgaagccaagagtttgaggctagcctgggcaacatagtgagacttcatctctacaaaataaaaacttttttaaaattagctaggcattgtggtgtgtgcctgtagtcccagctactcaggaggctaaggcagagggtccctggagcccaggagttcaaggatgctgtgagctatatgatcatgccaatattccaacccaggcagcagggcaagaccctgtctctttaaaaataataaaataaaataaaagctgcttgggcaaactgttaaatgtttgcttctattcctgaggtacccaacgggtccagaatttttttagaatacattactagatttactattattttattttagatgtttgtatctaagcttagtttggcctccaattttcttggattataatgatcttaaatatttatattgcatttatgttagcctcacaaaatgaattgaaggtgttccctctttttccattctctgaaattattttgatgtgatagtggttatttatatgttctttgaatgtttggtagaactttcatattaaagtatctcatactagtgggtgttttctgagaaagtatttactgattgaatttttaaaaatagatacaggaatattcaggtgtcccatttcttcttgactaagtgtttataagttatagtagccaacgaagttgttcatttcacttatgtttttagactgttgtcatatagtcatttatagtattcactttattttttcactcatattttatgttacatttcattttttattcctaatattgcttatttatgccttctctttttaattaatcaatcttaccagaagtgtgtctattttattattcttttcaaagaatcagcatttggttttgtgaatcttgcctattgtttttttgttttatagtttattaatgtctatttctactttttgccttatttcctttaatttattttatttaggtttactccgattttttttttttttttttttttttcaattttagacagagtcttgctctgttgcccaggctggaatgcagtggcccaatctcggctcactgcaacctctgcctccccagctcaagcaattcttctgcctcagcctcctgagtagctgggattataggcacctgccaccacacccagctaatttttgtattttcagtagagatgggggtttcaccatgttggccaagctggtcttgaactcccgacctcaggtaatccgcccgccttgacctcccaaagtgctgggattacaggcctgagccaccatgcccaatctctttttctctttccaaacttccgaaggtggacgcttaactaattttcaccctatttttcaatataaacatttaaagatataaattaccctttcagtactgcctcagctctatctcacaagttttgttatgtagtatttcacttccaaatatcttctgatttttgttttcatgtcttctttgactgaaaaattatttaaggtatgcctttagtttgaaaatgaaagaaatttacatttttttctattataaattgcattttagttacagagtataagccacatgttataatgtttgtttatttgttgtgatttgattcataggctagtataggttcagttctcctaagactttatcaggcttcaaagtatatatattctctaatttgagcatatggaagtctatatatttcctttaaattaagcttttttaatacggtggttaaaatctgagataatcttactacattttgattttcattgactcagaggtttaagtttcttcaaggttgaggatttagccatttttctttgtaattctgtcaatttgtgcttcatatattttaaggttgaattgttacttgcatagatgtctttacataatgacttttattcctcagaatgttttttgtcttatagtttttgatatgaaaatagctataccagccatatattggttaatatttgttttatttatcatttactcttctcataccttcagaattttgtgtcttcatgtttttaactattacaggtgatacctggattttcatgtttttaatccagtcttcaagtgtctgtctttaactaatttagaccatttaagtttattgtggttattgataaatttatatttatttctgtcatcatgttttgtgctttctgttaaccatattatttctctaatacttttccccaatgcattctgttagattgatcaaggtttttcccctctatttgtttaaaagttgtatgttctagttctattctattcacgattacccttgaaatttaatatgtgtacttgaattaacaagtaattaaaaaattaattttaaaattaaaatcacgtttcatcttgaaggatgcattaattttgatcaccctcatttgtctccaacttatggttttccagtacttttgttccaatttatattttatcagcttttttgaggtataatatacagaccacaaaatttatttattttaaatgcacattttgatgagttttggtaaatttatagagttgtacaacaattacaaaaattcagtttttgaatacttacataatctcaaaaagtttcctcatgcttatttgcattaaatcctccctcccacctacccaagtcccaagtaacaaatgatctgctttttttatagttttgccttccatgaaaagttacatagattggccaggcacagtggctcacacctgtaatcctagcactttgggaggccgaggcgagcagatcacctgagcccaggagttcaagactaacctaggcaacatggtgaaaccccatctctactaaaaatacaaaaattagctgggcatggtggcacacctgtcagctactcgaaggctgaagtgtgatggattacgtttattgatttgtgtatattgacccaggcttgcatcccagggatgaagccgacttgatagtggtggttaagctctttgatgtgctgctggattcggtttgcctgtattttattgaggatttttgcattgatgttcatcagggatattggtctaaaattcttttttttgttgtgtctctgccaggctttggtatcaggatgatgctggcctcataaaatgtggtagggaggattccctgtttttatattgattggaatagtttcagaaggaatggtaccagctcctctttgtacctctggtagaattcagctgtgaatccatctggtcctggacttttttttgttggtaggctaattaattattgcctcaatttcagagcctgttaatgggtctattcagggattcaacttcttcctggtttagtctcaggagggtgtatttctccagcaatttatccatttcttctagattttctagtttatttgtgtagaggggtttatagtattctctgatggtagtttgtatttccatgggatcagtggtgatatcccctttatcattttttattgcatctatttgattcttctctcttttcttctttattagttttgctagtggtctatcaattttgttgatcttttcaaaaaaacagctcctggatgcattgattttttgaagggttttttatgtctctatctccttcagttctgctctgatcttagttatttcttgccttctgctagattttgaatttgtgtgctcttgcttctctagttcttttcattgtgatgttagggtgtcgattttagatctttcctgttttctcttgtggttatttagtgctataaatttccctctacacactgctttaaatatgtcccagagattctgatatgttgtgtctttgttctcgttggtttcaaagaacatctttatttctgccttcatttcattatttacccaatagtcattcaggagcaggttgttcaatttccatgtatttctgtggttttgagtgagtttcttattcctgagttctaatttgattgcactgtggtctgggagacagtttgttgtgatttctgttcttttacatttgctgaggagtgctttacttcaaactaggtggtcaattttggaataagtgagatgtggtgctgagaagaatgtacattctgttgatttagggtggagggttctgtagatgtctattaggtctgcttgttgcagagctgagttcaagtcctggaaatccttgttaaccttctgtctcattgatctgtctaatattgacagtggggtgttaaagtctctcattattattgtgtggatgtctaggtctctttgtaggtctctaaggacttgctttatgaatctgggtgctcctgtattgggtgcatatatagttaggatagttagatcttcttgttgcattgatccctttaccactatataatggccttctttgtctcttttgatctttgttggtttaaagtctgctttatcagagactaggattgcaacccctgctattttttgcttttcattttcttggtagatattcctctatccctttattttgagcctatgtgtgtctctgcatgtgagatgggtctcctgaatacagcacactgatgggtcttgactctttatccagtttgccagtctgtgtcttttaattggggcatttagcccatttacatttaaggttaatattgttatgtgtgaatttgatcctgtcattatgatgttagctggttattttgctcgttagttcatgcagtttcttcctaggatcgatggtctttataatttggcatgtttttgtgtggctggtactggttattactttccatgtttagtgcttccttcaggagctcttgtaaggcaggcctggtggtaacaaaatctctcagcatttgcttgtctgtaaaggattttatttctccttcacttatgaagcttagtttgactggatatgaaattctgagttgaaaattcttttctttaagaatattgaatattggcacccactctcttctggcttgtagggtttctgccaagagatcttctgttagtctgatgtgcttccctttgtggctaacccgacctttctctctggctgcccttaacatttttcccttcatttcaaccttggtgaatctgacaattatgtgtcttggggttgctcttctcgaggagtatctttgtgatgttttctgtatttcctgaatttgaatgttggcctgccttgctaggttggggaagttctcctgaataatatcctgaagagtgttttccaacttggttccattctccccatcactttcaagtacaccaatcaaacttagatttggtcttttcacatagtcccgtatttcttggaggctttgttcgtttttttttactctttttctctaaacttcccttctcacttcatttcattcatttgattttccatcactgataccctttcttccacttgatcgaatcagctatggaagcttgtgtatgcgtcatgtagttctcatgccatggttttcagctccatcaggtcattaaaggtcttctctatgttgtttattctagttagccattcatctaatcgttgttcaaggtttttagcttccttgcaatgggttcgaacatcctcctttggctcggagaagtttgttattactgaccttctaaagcctacttctgtcaactcgtcaaagtcattctccatccagctttgttccattgctggcgaggagctccgatcctttggaggagaagaggcactctggttttttgaattttcagcttgtctgctcttgtttccccccatctttgtggttttatctacctttggtctttgatgatggtgacctacagatggggttttggtgtggatgtcctttttgttgatgctgttcctttctgtttgttagttttccttctaacaatcagtaccctcagctgcaggtctgttggagtttgctggaggtccactccagaccctgtttgcctgggtgtcaccattggaggctgcagaacagcaaatattgctgcctgatccttcctctggaagcttcatatcagagggacacccggctatatgaggtgtcagtcagtccctaccaggagctctgcccattctcagagttcagactccatggtggagaaccactgctctcttcagagctgtcagacagggacgtttaagtctgcagaagtttctgctggcttttattcagctataccctgcccccagaggtggcgtctacagaggctgccaggcctcgttgagctgcagtgagctccacccagttcgagcttcccagctgctttgcttacctactcaagcctcagcaatggtggacgcccctcccccagcccaggctaccaccttgcaattccatctcggactgctgcgctagcagtaagcaaggctctgtgggcgtgggacccaccgagccaggcaggggatataatctcctggtgtgccgtttgctaagaccattggaaaagcatagtattagggtgggagtgtccagattttccaggtaccgtctgtcacggcttcccttggctaagaaagggaaatcccccgaccccttgtgctgcttcccggatgaggcgatgccctgccctgcttcagctcaccctctgtgggctgcacccactgtccaaccagtcccagtgagatgaaccaggtacctcagttggaaatgcagaaatcacctgtcttctacgtcagttgtgctgagagctgcagacaggagctgttcctattcggccatcttggaacaatcctctcctttcatttatttaagaaatatttgaaaagcaaagatttcatcattttgatgaagtccaatttaccagtttttcttttatggaatatgtttttgatattatatctaagaaacctttgcttagtccaaggtcataaatattttctcctatatttttttcctagaagttttatagttttagctcatacaattaggtctgtgatccattttagttaatttttgcatatgacctaaggatctaggtttagtttttgtaaatgaataaccagttattatagaatcatttgttgaaagaacatctttttcctattgaattgtcttagcatctttgatgaaaatcaattgactatttatgtgggttggattctgaactccacttagttccattgatctatctatctctcttaatgtggattctacactgtcttgactactgctgctttacactgaattttcaaataagacagtattaagtactctaacttcattcttacttagcaagatttttttggctattctaggtatttttgtatttctatataattttagaatcagcttgtcaatttttccaataatctttctagactcttggcaggaattgcagttaatttgtagatcaattgacatctaacaatattgagtcatctaatccattaacatgatatatctctccatttatttaggcatttatctgagtgatgttttttagttttcagtgcaaaggttttgcacttattttgttaaatttattcctaattattattgctatagtttgagtgtctttaccaaaactcatgttggaatgcttaagaggtggggcctaatgggaagtgtttgggtcttgggagcttttcttttgtgggcagcttggtactattcttacactggtgagtgagttctcactcttgtgggattagttgtctcaggaatggattagttaccatgagaatgagttgctatacggtgaggtcacgcttcatgcttggcctcctggtacatgcctactcccctttgaccttgttctaccatattgtgatacaacactaaagctttcaccagaacccaagcagatgccagtgtcattctttccagcctgcagaactgcaagccaaatatacctctttataaattactcagtctccggtattctgttatagcaacacaaaacggactaagacagaaaatttgtactgagagtgggatgttgctatttagatactcaaaaatgcagaagcatcattggaactgggtaatgggcagaagttggacaagtttgaaggagcagactagaaaaagactgtattgccataaacagagcattaaggataatttcaatgagggctcagaagacaacaaaaagacgagagaaagtttagaatttcttagagattggttaagtagtcattaccacaatgctgataaaaatatggacagcaaaggccattctaatgagatctcagatagaaatgaggaacaaggtattaggaactggagaccaagtcatccttgttagaccatagcaaaaatttggctgtgttgtttctaaggctttgtgccctaaggttttgtggaaggccaaacttaagagtgatgaactagggtacctggcagaagaaatttctaagcaaaatatagagcagctatgtagttacttcttactacattcagtgaaatgcaaaatgacaagggaagcaagcataaaaatttgaaaattaatagcctggccatgtggtagagaatgaaagagcattttcaggagaggaatccaagggtgcagcagaacaaccaatactaaagagattagcactgagagaagagagccagttgataattattgagacaattttttaaaggccctgaagacatttcagaaatttttgaggttgcctttccagaggtctaggaggacggaatggttttaagagacagaatccatgcatcactgccctgtgctgttttgagatcctgctccccaaattctggcacagccctcagcagccaccccagccatggcacaatcatacccaggtatggctcaggctgccattccacaagatacaaaccataaaccttggtggcacgcagtcgtggatcaagcagcctcaggtacagctcatgacagcactctggagggtgcaagtggtaagccttgatggcgtttacaaccatgtggtactagttttgcagatgtgcagaatacaagagaagtgtagtcatggtggcttccacctagattttaaggaatgtactgaaaagactgggagctcaggtggagatttgttgcagggccagagccactgcagtgtatcttccctagggcaatgctgagcagaaatgtagggttggagctgccacaaagagtctgtaccagggcaatacctagtgaatccatgaagtggaccaccactgggactccagaactatagagccattgccaccatacaacctcagcctggaaaagccataggtatccaattccaaccagtgagagcagccatgtggctatgcccaacaaagcaatggaggtggggctgcccaaggctttagggataaaaactccccactgtgcccaggaggtagcacgtggagtggagaattattctggagttttaagatttagtgtctgccctgctgacttttgaacttgctcgaggcctgtcacctctttcttcttttggcctatttctcccttttggaatgggactgtctgccatatgactattccaccattgtatcttggaagtaaataacttgttgtttttttttttattattttacaggctcatagctaggaggaacttgccttgagtcttatatgagactttggactttgacctttgaattgttactggaatacattaagactttggggaccattgagattgaataattacattttatagtgtaagagggacatgagtttggggttccaagggtggaatgccatggtttccgtgtctctgccaaaaatcatgttggaacctttaagaggcagggcctaatgggagatgcttgggtcatgggggctctgccattttgagcagcttggtgcagtcctcatatagtgagtgagttcttgctctcatgaaactggattggttcctgtgggaatagattagttaccctgagaatggattgttataaagcaacccattgtacaaggttgtaccttgtgtttggcctcttggcacattcccacttcctctttggtcttctgccatgttgtgatgcactactaaagccctcaccagaagctaagcagatactggtgccatgcttcttgaacttcccggtctggagaaacatgagctaaataaacctctttatacagtctcaggtattctattataacaacataaaacaaactaagacatttatttttgatgctattgtgattggaattgttttctttatttcatctttgtactgtttgttgctactatatatataaccgatttttgtatattgatcatatactctacaaacttgctaagccaccctcttagttctagtaagtctgggagggggtgtggtatgtgggtgtgtgtgtgtgggtgtgttccttaggattttctgtatacaaggctaacaataaaaagagttgtcttttttccataacttttttccttgactattgcaaggaaaaaatagaagtggtaaacacagatatctttgcatgtttcctaatctagaggtaagcacatttttaccattaagtatgttggctgtaggcttctggtagatgccttgatcatttgaagaagttcccttctattcataagctgatgagatttttttaaatatatgagtgttgaattctgtcaaatgcttttctgcatctattgaggtgatcatatggttttgtcctttattctgttaatatagtttattacattgatttttggatgttaagtcaaccacctcacattcctgagataaacttcatttgattatggtataaaatccttttcatatgttgctcaattacatttactaatatttggttaagaatatttatgtctaggttcataagggatattggtatatagctgtgttttcttgtaatgtctttgtcttgttttgatatcagggtaatattgatatcaaatgaaataaagttcattgggaagtttccttcctcatctatttgcttaataaagtttttgtaacattggtattatttcctcccttaatagttggatagagttcaccagtgaagtatattttttctctataggaagatttgaaattactgatgcaatttctttacttgatattgatatttgttttttttttcctttttccttgagtcagttttggtaatttgtgtctttctaggaattgttctattttatctaagttgtcgaattttttgccttaaagttattatgctattttcttaacatccttttaagggtagggtctgtgatgatatttttctttgattcttgattttgggaattagtgtcttctttcttttttcttggtcaatgtaactaaatattatttatcttcttgactttccgaaataagcaattttgagtttctttggttgtttttaatgttatcctgttctgtatttatcgttttccactgtgacctttttatttcatacatcctacttacttttggcttggtttactcatctttttctagagtcttaagatggaagttttaattaccaattttagattattttttctttctgtttttaaagctatacattttcctctatacactgctttaattgcatcctgtaaataatgttatgttattggttttttgtattttaagtttataacattttatttataaaaataggctgggggaaaaggatttataccactgcattatttcctgggggagaactattttgggccatttttgaaattttttttcctcttaacaattttcaaagtcacatttaaattccttcagaatggtatttgtcaacaaaaaagctcaagtgaaaaggaggagggaaactggggaagcatgaagaaagggagtgagagaagaaggagtgggcatacaacagtcaacacataaagaaatggcttttactgaaatgactctgccctgtgcctcatgcactaggtgatgcaagcatgctgctcagacatcaacaccaaatgtcatttagaaatggtagtcttctctgggttctgaaggacacttgttccccaacatgacactattaaatgatgctttcaaggcagacactaagacattactccaaagagaaggctgtggtggcagatgctggggccatattcttcatagtccttcttggtgtgacaggcctgaaataactccagagttgaggctatcattaagcttccaaaccataaggcattgtggtgcatgtgatggattaccacctgaacctctgcaaacttaggtttgattctcctgccactgagctccttactgagttttaatctggcatgtaccactcttcaaatctctctgtagttgaggttcaaatccccgaatatggtcaaaccccttgaaagaacaacattcttatacagtggaccatgcacatcaatgggacagttttgtattcatcaacaacattcaagatggattccataaagtctgggttggcaaactctgggtaaaaaaatatttcaggttgcaggaaccttttgtaaccaacatctattatgaacttctcctggttgatcacattgatacctgtgtattgtttgatccacttccaggaatccacatcatgcttagcaaattccttgactgtatcagggcaaatgtaacagtatttctccttaatggcttttgtggtctccagtgactgctcaagagggattcctacctccctctcccttagcagctgttgagtgaaatacacagtatcacctacaatcaggatgtgattgatgcagctcccaattacataaccttctacaactgggagaacatgggtgactccatctcctttgtcaatgactatactcattaacatacattcacccacttgttgagatgtccaagatactgccaaggccagtacctcctgaactgcaatgtagaatcctggtacattaaataattcaaacataatttctgcaaaaatgctctgtattttctagtgtattcagtggaagttctgtcattaaaaaataatggtcctcagattctgctcaaagatatttaaaaaccacttgctccatgaacctttccataatatcccagtcttcagtgattccagtcatattgaccactttgtagcatacatagatttatcaatggcttcatcctgtatgaaaaagtcaaggtcatcaactcccctcaacattctcctttgggctttgtcaactacctttgctgactctctgatagaaatgcaagaaagaatagtaaactatggctcagtgttgcctgcatagccaagctcagaatatctactgaggtgatcacagggctgagacccagagcagtgggtgcagctcaacctccaggtgtgggctggatgccaggggctgagagcaaggcaatggaggagccagggtgggcaccaagtggctcttacctgatgccacagtctgccacacaggaaggcaggaaccccgccatgcttggaatacacagcatttagccccactggccaccctggagcaccctgccaccatccacttggcaacccactcaccccatacaccatgtcttctgcgtgtttccacttttattcattttaagatatattgtagatgggtgcagcaaaccacatggcacatgtatacctatgtaacaaacctgcacgttctgcacatgtatcccagaacttaaagtacaataaattttaaaaaaggaatattttaaaggatcaacctactatttgacagtcatggaaatagtgaatgggaattaaagggaaaaaaataagtaagcaaaggaagggaggaggaaatggaaaaagaaaggaaagaaaaggaaaagggaaatacaagaaaagagccaaataaataaataaataaacaaataagtgactgaaagtctgggagttggcaaatactattcagacaacactgacaaaataggcctcttgctaaaaatagcagaatgcacaaagtacaggagcagcctgtctgtcctgagaggctggggaggtttaggaaaagaggctggggagatttgagacagatctgaagtatgtagtcagtttttgcttggtggaaaaagtaatcatgggtgattcagaaaaaggaagatacttacataataattgttttgtacctttttttagtcttctattactttcataaaattatctttgcatcaaaagttattaacactttcaggactccttgtacgcaaaattctttgaattgcatttcttaatttgtgatcacactggtaatttatatagcacaatgaactgaatgtgtgtctttatgtttaaagggaaaaataaaattcaaaacagcatatttgatataatttatgattacataatagagaaataccaattttgatataatttttagaaagtaaagcttaggccagtcacggtggctcatgcctgtaatcccagcactttgggaggctgaggcgggcggatcacctgaggtcgggagttcaagagcagcctgaccaacatggagaaaccctgtctctactaaaaataccaaattagccgggtatggtgctgcatgcctgtaatcccagctactcgggaggctgaggcaggagaatcgcttgaacccgggaggcggaggttgtggtgagccgagatcatgccattgcactccagcctgggcaacaagagcaaaactccatctcaaaaaaaaaaaaagaaagaaagaaagaaagtaaagcttaatgaaaatttcttattagtagaactactaaaaaaatacagtgactctaaactcatatcttaccactcaatagatgtgtatcggaatttaagcagcagagaaatcatttttaactttttttaaatttttacttatcaaaaaaccatatgagctaaaaataacaaggcttcctaaaatgtacaaacctcaccacagctttaccacactgttttttggggggttttgctattttaaaatataaaataattcttcaatataactcacaattatttaagtatcagcaatactatgttatttatattaataaattctgcttccttttgtgagattaattactccatagcctttgccagtctgtttctggccattttactatttctctacccagagttgtaattgccctttacctatccttcttaatcagaacatccttcctttataccacttattaaaaaataaatttaatacttaattcaatttaatacttctaaataaacatatatatataatatagtcaagttcattaggaatatatgtgtgatttttcacatttctttaatgtccaaaaagatatcccagtgcatatatgttttctggtgagttttaatgtacatattatttattattcttttttcctgacactagtgcttctcaaattatctgtgatgaagaaacagatgtggtttttttgttttgtttttcttttaaaaaaaaaaacttttattttgggttcaggggtgcatgttcaggtttgtaacataggtaaacttgtgtcatgtggatttgttgcacagattattttgtcacctagggactaagcttagtagattaatacccaattgtttttgtttttaatttcctatttgatgtagactgatatttactttttataaaatacagtgtcaaattgctatagaagtttgtaaccactctccatttctgtatttgtcttgtcactgagaacaaatccttggcaccagccaagcgggcccctgaccaacagcacaggggagtgtccttctggctccttgcttcctgtcagcgatccgctcactagacaagtgcctgaaccactcccttgtcttgtctattgatattcaagcaaaatctcaatgcaaaaagagaatccatgatgtaattagagaagataaagtgttcttttcacatatatcctaaaaaatatctttcctcaaaatgtcaaaaattctataaccagaaatgttctgattttcctagaatgcaagaattcctggaagaacatcttaacagattgcaatgttctttcatgctcactagttcattttattgtaacaaaacctatttatgttggcaggagataatttttttatccccattttacagataataaaactgacttacaggttaaaaaaattacatatatatagtaattacacttatgttttcttctttccccataattaccatttgcgtatgtgtgtgtgtgtgtgtgtgtgtatatatatatgtatgtctcctaatctcctatccttttacattcaacctgcttgttttatctaaagtttgtttcttgtaggcaccatatagctgaatcttgtttttttaaagtcctgtacagtaatagttgcctttttattttagtccattcacataattattgatatggttggacttgcatttaacattttgttatttgttttctatgtgtcatgtctttttgtttttcttttcttacattactgcttctttcatgttaaccaagtatttttagtgccctatttcaatttctctgttgatttttttttttcttgagacggagtctcgttctgtcacccaggctggagtgcagtggtgggatctcggctcactgcaagctccacctcccgagttcacgccattctcctgcctcagcctcccaagtagctgggactacaggtgcctgccaccatgcccggctaatttttttgtatttttagtagacacggggtttcaccatgttagccaggatggtctccatctcctgaccttgtgatccgcccaccacggcctcccaaagtgctgggattacaggtatgagccactgcgcctggcctctctggggcttacttttttaagagacaatggcatggtcatagcttattgcagcctcaaactcctgggctcaatcagtcctctcacctttgcctgtcaagtagctgggactacaggcatgtgtcatcacacctgggtaattttgcttaaattttttagagacaggtgtattagtccattcttgcattgctttcaaatacctgagactcgataatttataagtggtttaattgcctcacagttcttcaggctgtacaggaagcatgcaggcatctgcttctgggaaggcttcaggaagcttacaatcatggcagaaggcaaagacatgtcacatagcgaaagcaggagtaaaagagcaaggggcagtgccacacacttttaaatgacgagatctcacaagaatttactcactgtcccaaggacagcaccaagaggatggtactaaccattcaggagaaatctgcccccatgatccattcacctcccagcaggacctatctccaacattggggattacaattcaacatgagatttgggcagggacacatatccaaactatatcaacagagtttcattgtgttacttaggctagtctcaaactcctagcctcaagcaatacttctatctcagcctcccaagtacctttgggggttataataatcaatcatcttcactttttacaatctactttggtttaataatttttacttaattccagtgttatatagcaactttgatccaatgtacctcttatatgctatgaactcagcagtattgttatagttattgcctataataatcagatgctttttttaaaaaagagatgaaatcagaatacacacacacacacacacacacatatacacacatacacacatacaatcttttatacttacaaatttatttaccacttccagtgccgtttattccttataggttcaagttgccatctggtgtcatatccttttatcttaaaagcattttatttagtgtttctttagcaaggataagttctctttatttttatttatctggaaatgtctttatttcagctccatttttgaaggatcatttaactggataccgaattcttaattgacagttatttttccctccacttttgaaatgtcgcttcataaggcctccatttttttcagataaaaatgccagtattgatcatattattgttcccctgtatgtgataagtcatctcttgctattttcatgattttcttattatccttggttttcaccaatttgactatgatggctctaggtgtgaatctctttgtgtttatcctacttgagatttgttgaacttcttatatttgaagattaatgtttttcataacatttttgaagttttcagacattatgttttcaaatatttttctgccctcttatctctctcttctcctggaattcccattatgcatatgttagtgctcttgatggtatcccataagtttctgaggatctgtttattattcttcgttcttttttctttttgttcttcagattgattaacctctattggtctatcttcaagttcactgatactttctttcacaaggtcaaatatgctactgaacctcgctagtgattttttcactttaactgttgtacttttcgattctagattctatttttaaatatattctgtctccttattcatgttctctattagacagcacattatcatatttttaatttgaacatatttataatatatactttgaaaactttctttctaaatccagtatctgaattgagagtttctattcactgctttttttccagagtatgaaccatattttcctgtttccttacatgtctgataatttttaattgaaaactaaacactttaattacacattatagcaaatctggatttggtttttatttgtgattgtttttgttgttgttattgttttggtaattggcctatacatgtgctgtgtaatccttctgcccagtggttttcagcagtgatgtcttttatattgtgttgttgttgttattgttgttttagcctgtctttctagggatttcctttgtgtctgttgcatagcttgattttggagagacattatgttaaagctagtaaggcttccactgtctgccaaataatctgtgggtgggtgggtgaatgcattcaaagttgcaattaatactcaagtcttacttcatttttactttttgtcatactctcttgagtctttcctgcacttccatacttttccaatcggccatatatgtgtggagaacttatcacaaactttctattattctctcctttccaggatcagtcttttttttttttttttagtaatactcaggtttttaatttattatagtgaatggatacaaagcaaaattagcaaagggaaaaagttgtgtgtggtaaagtctggaggataccaggcacaaacttcctggaatcatctcctgtggagttacaaggatgtgtttctcttccccagcatgaaattttgacagcacatgtgcaatgtcgtctaccaggaccagagtctcattagagactcagtactcaggattttacggaggttactgtccttcacatgtaccagaattccagactcccagaagaaaagcagctgttcagagtaaaccatattgtttgtataaacagtttaggcaccgtgagccactcttctcagtgagagaattggaacttggaactggaaaactctagccttgcatgtgggtctttctctctctttctttctttctttctttctttctttctttctttctttctttctttctttctttctctctctctttctttcttccactttgtttgttgtttctctctctctctttctttcttttttaattttactttgagttccaggatacatgtgcagaacgtgcagctttgttacacaggtatacatgtgccatggtggtttgctgcacctattgaccctcaggatctctcatttaaatttttgtcttgtcttccacttccccaattgaaactgcaacctcagactagcaaagctgcaattctgtctgttcattctcaaaccactctgctatatttaactggcaaaaccattgatttcttccctctactccataccaaatccacccctgcccccagccctaacaggaaagctgctgggttttacatccagcttcaaactggtaaaactactgtttttcccagctgagcttggggatgagaagagagatgagagtgtattagtccgttttcattctgctgataaagacatacccaagactgggaagaaaaagaggtttaattggacttatagttccagatggctggggaggcctcagaatcatgtcgggaggtgaaaggcacttcttacatggtggcggcaagagaaaatgaggaagatgcaaaagcagaaacccctgataaagccatcagatcttgtgagacttattcactaccacgagaacagtatggggggaaccacccccatgattcaattatctcccacaacacgtgggaattgtgggagtacaattcaagatgagatttggatggggacacaaagccaaaccatatcagggagcaaccccagtcaggaagggctcagacttttaccaatcctacccaaaaccctaacacttttttcaaggataaatgcttcttaatttgataactgcctttgatgagttttcagggtcctgaaatgtttgtttttggtatttttgcaatttttggggggagttttggtgtggaaataaattgccaaccttttcatgtcacctcccaaccttatctttatatcctctgattaacaattttcattagtaatgtgttacacaaccagtacttgtttagactaacctacattttaccaatttctttgcacattgttccttcctttttggttctatgtcatatttctaaagcatatctttcagtagatttttccctggtaaaaaatggcatatgttcttaaatgtatttgtttgacaatatctttcatttgtcttttgtttgagtgacagttaactggctacagaattcaacattgaatgatttctttatctctgtactttgaagactttatttatcttccatcttctattgttgctgataagtactgagaatctgctctattgtttattcgattatgattaatctctttttctctgtctagattctttaagattttatttttgcctgagacacaaccaaaaaagagaattttagaccaatatccttgatgaacattgatgcaaaaatcctcaataaaatactggcaaaccgaatccagcagcacatcaaaaagcttatccaccatgatcaagtgggcttcatccctgggatgcaaggctggttcaatatacgcaaatcaataaatgtaatccagcatataaacagagccaaagacaaaaaccacatgattatctcaatagatgcagaaaaagcctttgacaaaattcaacaacccttcatgctaaaaactctcaataaattaggtattgatgggacgtatttcaaaataataagagctatctatgacaaacccacagccaatatcatactgaatgggcaaaaactggaagcattccctttgaaaaccagcacaagacagggatgccctctctcaccgctcctattcaacatagtgttggaagttctggccagggcaatcaggcaggagaaggaaataaagggtattcaattaggaaaagaggaagtcaaattgtccctgtttgcagacgacatgattgtttatctagaaaaccccatcgtctcagcccaaaatctccttaagctgataagcaacttcagcaaagtctcaggatacgaaatcaatgtacaaaaatcacaagcattcttatacaccaacaacagacaaacagagagccaaatcatgggtgaactcccattcacaattgcttcaaagagaataaaatacctaggaatccaacttacaagggatgtgaaggacctcttcaaggagaactacaaaccactgctcaaggaaataaaagaggacacaaacaaatggaagaacattccatgctcatgggtaggaagaatcaatatcgtgaaaatggccatactgcccaaggtaatttacagattcaatgccatccccatcaagctaccaatgactttcttcacagaattggaaaaaactactttaaagttcatatggaaccaaaaaagagcccgcattgccaagtcaatcctaagccaaaagaataaagctggaggcatcacactacctgacttcaaactatactacaaggctacagtaaccaaaacagcatggtactggtaccaaaacagagatatagatcaatggaacagaacagagccctcagaaataatgccgcatatctacaactatctgatctttgacaaacctgagaaaaacaagcaatggggaaaggattccctatttaataaatggtgctgggaaaactggctagccatatgtagaaagctgaaactggatcccttccttacaccttatacaaaaatcaattcaagatggattaaagatttaaacgttaaacctaaaaccataaaaaccctagaagaaaacctaggcattaccattcaggacataggcgtgggcaaggacttcatgtccaaaacaccaaaagcaatggcaacaaaagacaaaattgacaaatgggatctaattaaactaaagagcttctgcacagcaaaagaaactaccatcagagtgaacaggcaacctacaacatgggagaaaattttcgcaacctactcatctgacaaaggactaatatccagaatctacaatgaactcaaacaaatttacaagaaaaaaacaaacaaccccatcaaaaagtgggcgaaggacatgaacagacacttctcaaaagaagacatttatgcagccaaaaaaacacatgaagaaatgctcatcatcactggccatcagagaaatgcaaatcaaaaccactatgagatatcatctcacaccagttagaatggcgatcattaaaaagtcaggaaacaacaggtgctggagaggatgcggagaaataggaacacttttacactgttggtgggactgtaaactagttcaaccattgtggaagtcagtgtggcgattcctcagggatctagaactagaaataccatttgacccagccatcccattactgggtatatacccaaatgagtataaatcatgctgctataaagacacatgcacacgtatgtttattgcggcactattcacaatagcaaagacttggaaccaacccaaatgtccaacaatgatagactggattaagaaaatgtggcacatatacaccatggaatactatgcagccataaaaaatgatgagttcatatcctttgtagggacatggatgaaattggaaaccatcattctcagtaaactatcgcaagaacaaaaaaccaaacaccgcatattctcactcataggtgggaattgaacaatgagatcacatggacacaggaaggggaatatcacactctggggactgtggtggggtcgggggaggggggagggatagcattgggagatatacctaatgctagatgacacattagtgggtgcagcgcaccagcatggcacatgtatacatatgtaactaacctgcacaatgtgcacatgtaccctaaaacttagagtataataaaaaaaaaaaaaaaaaaaagattttatttttgcctttggtagtctatagtttctcaacattttatctaagtatctatttttacttaatcctgattagaactcatttgacttcctgtgtccaaatcaataaaaaccctaatcaattctgtaaagtttgaagccagttttcttctcaaatattatatcttcttcattctttcaattatgtttctgaaactactattagttgtgttttagatcttttccataatctaaatctctcattttccacctcatttttttgtgtgtgtgtgctatgctcttaagtaatttcctcatatctactactttgctgtgttctctcttcagccatgtctagactgctgtttgggtacttagtggttttttttttagttgagtaaattttacagttttttctagatgttctatttaattattttacaatgctttcaagtaatttcttcttctcatgtctccaatttttaaaaattgtctctagtccctttgaaaatacatattttatagtgtctatctagtggttctattagctaaggttttcagacatctaatcccattctttgtagtatctgttaacttttgctcatgggatatttcttcttattttaagttcagattcacttggctttacctttgagactttatgcagtctgggatcaggactgtctattagagattttttgaattagcatctactaagtgtgttctagggatacttctatgcagggacacttttatggtaggtttagaactttgggatccctaacctgtgcacataatgtaatttgagccctacacataagttggatgaggccagttttacctatgaattctcaaaaaagactttgccacccagagaccagctaagacaaactgccttgtcttctcaatttgtcagtaggatgacattttcttgtccgtgttttgttttgttttgttttctgttttgttttgttttgttttcttgagatggagttttgctcttgttacctaggctggagtgaagtggcgccatcccagctcactgcaatgtctgcctcctgggtttaagcaattctcctacctcagcctcccaagtagctgggattataggcatgcgccaacaggccaggctaattgtttgtatttttaatagagacagcgtttcaccatgttggtcaggctcattttgaactcctgagctcaggtgatccacctgcctcagcctcccaaagtgctgggattacaggcatgagccaccatgcccagcctggtccattcttttagtaagagtttagccctccaaggcttccagttttgcaggatgacaataatcagaggggaggaggaaagagatactttgttctaactttctgcctggagtgagtcaaaatcgtcctcttttaccctggcaaattctatacagccggaaaggggtcatagctaaaaaatgcatataaactgttttaagaatattaaaagcattagcaattatgattcatagcaaataaaggtagcaatttaattagcatatggaaatttaccatgttattgtctgtcctttatagaaacctatggattcctcagtgagtagcacctagttgccagaaacaagatgtctagtaacttatacctactcatcttatctacctctacttcctacacataatctaagatactttatatttattcccacaaaatctaggttcatttcttccagccattacctcctctaatacatttatgccaaatatcagttgaattatcctttcaatacaaagatttagtaggttcctcttaaaagatttggcaccttgacactgtgatcttcaataaggttgtgaattcttatcacagccagtcatcctcttattttccatcctgatgaaaaagctattttaaaatataaaatgaagtaaatctcatcatattgccatgatgtttttaactatcatatattataatggttagcattttccagagttcacatataggttttttttatttttttatttttttattgagactgagtctcactctgtcacacaggctggaatgcagtggcacaatcttggctcactgcaacctccacctcccgggttcaagcaattctcctgacccagcctcccatgtagctgggattacaggcacgcaccaccacgcctggctaatttttgtatttttagtagagacgggatttcactgtgttggccaggctggcctcaaactcctgaacctcatgtgatccagcctgcctcagcctcccaaagtgctgggattaaggtgtgagccactgcacctggcccacatataggttttaaatatttttaaagtaaaaacactttgtttgaaacctacttcataaattgacaggttatttggaatatatgttaagcagatatctctttcaccaaactagtaagcaatgttgatctataccatgtatcattttataaaactggctattagtatatatgataaaagagaattgatcctttgtttgtatacatctatgtgtatgtagatatatagctgtacacttttttgtatttcaggagttatactgtttgtgatatggtgtatgacctggtcaatcttaggctctgaagctctccctggtggaaatttatttgggttgttcattattttttatagtgccattattgggggaaaaattttacaactcattagaatacctttagtgcctccacttccacctcttcttggtaagtatataattagctctcttttctttattattgactatatgcaaatgttgaacattttcttgttgaattagttataattcagaaatatttcaatgtagtatgttttatatagtttcttcatgtatgtatttactgtatgtgtgtgtgtgtgtacagctcctttatagatgcatttatttctctgtctacatatatacacacaagttttatccaaaatttatttttaaaataaatttaatatccttagtacattattcctgttgctttattgtttaatagaatctttaaaaattttagattcacggggtacatatgcaggtttggtacatggatatattgcataatggtgacatttgggctctagtgaacccatcaccaaatagtgaatactatacccaataggtaatttttcaaccttaaccctccaaccctctctccttttggactccccagtgtctattatttccatctttaggtccatatgtacccattgtttagtgcccacatataagtgagaacatgtggtatttgatttttctgtttctgagttgtttcacttaggataatggtgttcagctttatccatgttgctgcaaaggacatgatgtcattcttttttatgaatgcatagcattccatggtgtatatgtaccacattttctttatttagtcatttaagttgattccatgtccttttattgtgaatagtgctacaatgaacatatgtgtgtatatgtatttatggaagaatgattcacatgttgaaccatccttgtatttctggagtaaaatccacttaactatattatctttttgatgtactattgaattcattttgctagttcagaatttttgcatctatgttcatcagggatattgaccagtagtgtgtgtgtgtgtgtgtgtgtgtgtgtgtgtgtgtgtgtgtatggctttgcctgattcgggtataactgtgatactagattcatggaatgtgttagggagggagtccctccttgatttttttggattaagtttcagtcacctttgaccctgaactagaataagtggattgtacgatgaataaatgaatgaatacaaattattgtaaaataaaattttgttaagtatatggtaaccatacaaatgcatgacaatagacaatgtgatatgaaaactctcagccagcctaccatatttgtgattgtttttgaactgcatagtgggaggaggtgctccttacaattttcactttgtaaacatttattctttgattttaaccatcaccgctataaccaccatcactcatggattcaccaaaaattaagtaaataattatcttatttgtttttataaaactttctaaagtgtatgtagagctcacatttatttcattgtttaatactagaagtgttttggatctttatttagaagtttggtgatgttttgtgaccggaaatatgctgtaggaaattgactgttgtttatatcatttagcctatgctaaaattggttttgttatataccattttactcaaagttgccatttccaataacctattgatgatgttaagtgagaacttactgtattcaaatatatctaaatattcagtacagtgggccaggcacggtggctcatgcccataatcccagcactttgggaggccaaggcaggaggaccacctgagcccaggagttcaaaaccagcctgggcaatatagcagaccttgtctttacaaaatattaaaaatttttctgggtctcagctactcaggaggctaaggcaagaggatcacttgagctcaggaggttaagcctacagtgagccatgtttgcatcactgcactcaccttggacaacagaatgagaccctgtcctcaaaaataaatatatattcagtacactgtcagtagagataatctctacatcttatctctgctgtcccttctgtatccacaattttcttacagcaccttctaagtatttattgaatcattttcctcctctccaaactttctcttttgctctagcttaggctatttgtttccaacttttgcgtggactgtggcagagccttcaatttggtctctgtctccagttttatcccaaactaattcaccaagaccctcacataaaaaacgcaagactcattatgttacttcctgcctaaaaccttcccatggtgccttactttgccaaagtggggggagacctttctatgatctggcccacccaagctcattctcctccctcctttccttgccctgtatgttccagcaacactaacttacttgttgaaccccatttaggtgtattgtttcttatcgccattcctttattcatgctgccttctctacttgcttgtaacctgccctttaccaaaataatgagagacatagtgcattagaaaagaaagtaaacatttccgttttctttctcagaaaaatgaactgtcatgtatctttattttctttcttttaagggatgttactggctggttttacgattaggaatgttccattcatcaatgaacatgtccatgttcctaacacatggtcttcaattttaagaagcattgcccttaccattattctaataagagctgggcttggactcgatccacaggtagatttacaattacaaatcgagtaaggttatttcaaatattagaggacggtgagaaagaaaaagaagcaaaaattttattttcctgttccaaatagagtctgtaaacaaacctaagataaagaaaaaaaggccgggcatggcggctcatgcctgtaatctacaaaaattagccgggctggtggcatttacctagtaatcccagctactcgggaggctgaggcaagagaattgcttgaacctgagagacggaggttgcagtgagctgagatagtgccactgcactccagcctgggggacagagcgagactccgtctcaaaaaacaaaacaaaacaaacaaacagaagaaaaaaacagaagaaaaaaagactgtatagaaatattggcaccctaatttctatgtctagccatcattatcactgatatgaagagaattgactgtgttgtaaggtctttattagcgatctaatcatttgcacagagataaatgtctcttatatagcacctatattatttgggaggctcttctatggagaagtatgtacttttcagttaacataggataagaaaaaccttataaaagtctttttctttttttagggagattaaggatttcagtaatttttttatgacattttctccacaggattatgttcctgattatctttgcattattgtaaaatccaatcttttaaagcatttcttaaaatattacattctagggatcataaatcccatctataagaagatgactattcatgaatatgacagccactcaaataaatgtggcaaatgtggtttaatagaaatagctcaagagcataaataattatagccaataagattatattctccagcagaaagtatgaaccaaggagaacattgaaaagttctcccttttaaaatgaattatgcagtttttaagttattttctttggcatgttggtattctatttatacttattaagttaatcaaacagttcatatcaaaaagttaatgggaaaacactaataggacactattattatactatttattaggaaagttcaggaaggtagcattagctatttaatcacagtaaaattgatcttttaataattaaaatataataatatttttaaaaagatgaaattgtttataatccaacctatgatgacatataaaatgtaatagagttcaaagtccagtgggacaatctgttgaaatgagatttcgtttagtgaaagcttcttatgaaaaaagactttatagtttgacatttgttaaaataattttcttgttggccattgtaaatgtatctaagtgtgactgttttgtgtttcaggctttgaggcatttgaaggtcgtttgtttcagattggctgtaggtccatgccttatggaggcaagtgcagctgctgttttttcacacttcattatgaaatttccctggcaatgggcatttctattagggtaatttctttctcattttttcttatgaaaatattcaattaaggatgcttcattaaaactgttaaaatattcagaatgttgtatagaaaagctctattaaaattcgtttcagtgttaaaatccttggaaagcagttgattaaaagcagagccatgtcccaaattgtacgaaatttttttaacaaacattcatagcccctaaatgtttatcatcaagaaaattcacatgatcaatttattccttttcatctgtattataacatatctgtatgttttaatctatctaatggcctcttcctcatagctgtatgtaagtacagttgcacatttcatatatatgtatgtgtatatatataagtatatttgagaaacattttatatagacataggtgtataaatataaactctcccattttaaagaaagcaagcaaacaaaaactcttgccgtatatccaatgccccatccatctttatctaccatccatttgtcttatgtttgaattcctcaaaataagtctgtaactactgtctctagatcctaactccttttcatttcttaattcatcaacttttgtctctgcttatccattccaatgacactcatagcaaagttcatccattacatagttactacaaaatccagtgaattcttaaattaatgtttatgataaaatactcaaatgcacttttattttaaaaattagaactttataaataaaggaggaatgaccttagaatatgccttcaaatcataatgcccataactctacccaaagtgacaactcttacgagtttttttcttctccaatttttatttcggctcaaggggtacatgagcaggcttgttatatggataaattgcatgtcacaggggtttggtatgcagattattttgtcacccaggtaataagtataatacccaataggtagtttttctattctccccctccttccaccctccaccctcaaattcacctagtgacgattgttcccttctttctgtccatgtgtactcagtgtttagctcccacttataagtaagaatatgggatatttggtttcctgttcctgtgttaattcacttaggataatggcctcaactccatccacgttgctccaaaggacatgatctcgttctttcttgtggctgtgtattattctatggtgtatatgtgccacattttcttggtccgcagtctgatgctctaaccctgagatataccccctcctatgtgccacattttctttatccagttcaccattgatgggcatttaggttgatctcatgtcttttttcttttttcattagtttttaaggaacaggtggtgtttgtttacatggaaaatatttttagtggtaatttctgagattttggtgcacccatcaccagagcagtgtacactgcacccaaggtgtagtcttttatcgctcaccctcctcctactcttccccctaagtccccaaagcccattgtatcattcttacgcttttgcatcctcatagcataactcccacttataagtcagaacatacaatgtttggttttttcattcctgaattacttcacttagaataatggtctccgactccttccaggttgctgtgaatgccattatttcattcctttttatggctgagtagtattctgtcgatggtgtgtgtgtgtgtgtgtgtgtgtgtgtgtgtatacatacacatatatacacatagatacgtatatatacaccacattttctgtatgcattcattgattgatgggcatttgagctagttccgtattttttgcaattgcaaattgtgctgcaataaacatgcgtgtgcaagtgtttttttcatataatgacttcttttcctctgggtagatacccagtattgggattgctagatcaaatggtagatctacttttaattatttaagaaatcttcatactcttttccatagtggttgtactagtttacattccccccagcagtgtgaaagtgttcctttttactacacccatggcaacatctattttttttttttatttttttgattatggctattcttggaggagtgagatggtattgcattgtggttttgtttgcatttccctaataattagtgatattgaggattttttcatgtttcttggccatttatatatcttcttttgggaagtgtctattcatgtccttagcacactttttgataggataatttggttttttcttgctgatttgttagagttccttatagattctggatattagtactttgttggatgcatagtttgtaaacattttctcccactctataggttgtctttttactctgctgattatttcttttgctgtgtagaagcttcttagtttaattaagtcccatctatttatctttgtttttgttgcctttgctcttgggttcttggtcatgaagtctttgcctaagcaaatgtctagaagggtatttccaatgttaccttctagaatttttatagtttcaggtgttagatttaagtctttgatccatcttgagttgatttttgtataaggtgagagatgaggatccagtttcattcttctacatatggcttgccaattatcccagcaccatttgttgaatagggtgtcctttcccaactttatgtttttgtttcctttgttaaagatcagttggcttaagtatttggctttatttctcagttctctattctgttccattggtctatgtgcctatttttataccagtgttatgctgctttggtgactatagccttatagtatagtttgaagtcaagtaatgtgatgcatccacatttgttctttttgcttagtcttgctttggttatgcgggctatttttgggctccacattaattttaggattgctttttctagttcagggaagaatgatgatgtagattgtttttggcagtatggtcattttcacaatattgattctacctatccatgagcgtgtgatgtgtttctatttgtttgtgtcatctatgatttctttctgcagtgttttgtagttttcactgtagaagtctttcacctccttggttaggtatattcctaagttcgtttgcttggggttttttctttggttttgtttgtttgtttgttgtttgtttgtttgtttttgcagctgttgtaaaaggggttgagatcttgacttaattctcagctcagtcaccatcggtgtataccagtgctactgatttgtgtacattgattttgtatcctgaaacgttactgaattcatttatcagatctaggagctttttggatgagtctttagggttttctcattatatgatcatataatcatgaatagcaacagtttgacttcctctttactgatttggatgccctttatttctttctcttgtctgattgctctggctaggacttccagtactatgttgaatagaagtggtgaaactgggcatccttgtcttgttccagttctcgggggaatgctttcaacttttccccattcagtataatgctggctgtgggtttttctttctctctctctctcgggttttttttttttttttttttttgagacggagtcttgctctgttgcccaggctagagtacaatggcccaatctcagctcactgcaacctctgcctcccaggttcaagcaattctcatgcctcagccttccaaagacctgggagtagctccccaagctcgccagcatctgttactttttgactttttgataatagccattctgcctcctgtgaggttgtatctcactgcagttttgttttgcatttctctaatgttagtgatgttgaatatttttccatatacttgttgactacgtgtttgtcttcttttgagaagtgtctggtcctctcctttgcccatttaatggggttgttaggtttttgcttgttgatttttctaagttctttttggattctggatattagacttttgtcgaatgcatggtttgcaaatattttctcccattccataggtggtttgttgatgatttcctttgctgtgcagaagccctttagtttaattagatcccatttgtcaatttttgtttttgttgcaattgtttttggcgtcttcatcataaagtgttttccagaattgaaatttcctaggatatgtccagaatggcctgtgtccagaatggtatttcttaggatatcttccagggtttttatagttttgggttttacatttaagtctttaatctatcttgaggtgatttttgtaaacggtgaaacgtatggagtccagtttcagttttctgcatatggctagccagttatcccagcacaatttccgagtagggattcctttccccattgcttgtttttgtcaagtttgttgaagagtagatggctataggtgtgcggctttatttctgcgttctgtaacctgttccactggtctatgtctgtttttgagttccttatagattctggatattagtactttgttggatgcatagtttgtaaagattttctcccactctataggttgtctttttactctgctgattatttcttttgctgagcataaccatgctgttttgcttactgtagcattgtactaccgttcgaagtcaggtagtgtgatgcttttggctttgttctttttgcttaggattgctttggctatttgggctttttttgtttgtttgtttttttggctccaaatgaattttaggatgctttttttaatcctgtgaaaaatgtcattgatagtatgataggaatagcattgactctgtaaatagccttaggcagtatggccattttaacaatattgcttcttcctatctgtgatcatggaatgttttccttttgtttctgttgtctctgattctttgagcactcgtttgtaattttcattgtagagatatttcacctccctgcttagctgtattccaaggtattttatagtttttttgtggctattgtgaatgggattgcattcttgatttggctttcagcttggatgttgttggtgtatagaaatgctacagatttttgtacattgagttttgtaacctgaaactttgctgaagtcatttgtcagatctgggagctcttgagaggctactatggggttttcttggtataaaagtgtttcacctatgaagaggcatagtttggcttccattcttcctatttagatgtctgtgtttctttctcttgcctaattgcactggctaggacatccattactatgttgaataggagtagtgagagtgggcatccttgtcttgttccagttctcaaagggagtattccagctttttcccattcagtatgaagttggctgtggttttgtcataaatggctccaattattttgaggtatgctccttcagtaactcatttgttgagggtctatatcatgaagggatgtttttatttttagttctattatatgatgaatcacatttattggtttgtatatcttgaaccaaacttgcatcccagggataaagcttacttaatcatagtggactagctttttgatatgctgctggattcagttggcttgtattttgttgaggatttttgcatctatgatcatcagtgataactgtcctgaagttttcttttttgttgtgtctctgccaggttttcatatctgaatgatgctggcctcataaaatgagttagggagggatccttcctcctcatttttttggaataatttcagtagcattggtaccagctcttctttacacttctggtagaatttgtctgtgaatctgttgggtcctgggcttgcttttttttttttttttttttttggctcagagactttttattactcattcagtttcagaactcatttttgatttgttcaggatttcagtttcttcctagttcaatcttgggaagttgtatgtttccagaaatttaccaatttctcataggtgttctactttgtttgcatgaagatgttcatcgtagtctctgagagttttttgtatttctgtgtggttggcggtaacgtccactttgccatttctgattgtgttttttggatcttctctctctcttttttttttttccttattggtctagctagtgacctatccaatttatttattctctcgaagaaccagcttttagtttcatttatcttttgtatggcttttcatgactcaatttcattccattctgctctgattttggttatttcttttcttctgctagctttgggatggtttcctctcgtttttctgtttcctttaggtatgatattaggttgttaatttaagatccttctaacttttcaatatgggcatttagcactataaacttttcccttaacactgctttgcctgtgtcttagagagccgagaatgttgtatctttgttttaattagttataaagaatttattggtttctgccttaatttcattgtttacccaaaagtcattcaggcacaggttgtttaatttccatgtaattgtatggttttgagagttcgtcttagtgttgacttctatttttattacactgcgggtccaagagtgtggttggcctgatttcaggggttttcttaaatttattgaaaataattttagactgatagtgtgatcaattttacaatatatgccatgtacagatgagaggaacatatattctgttgttgttgggtggagtgttctgtagatggctgttaggtccatttagccaagtgttgacttcaagtcctgaatatctttgttcattttctgtctctttgatctgtctagtactgtcagtgagatgttgaagtctcccactattattctgtggttatctaagtttctctataggtctctatgaacttgttttatgaatctgaatgctccagttttgagcacatttatcttttagacagttaagtcttcttgttgaattgaaccctttatcattacgtagtgcccttctttgtctttttgattgttgttggtttaaagtctattttgtctgaattaggataacaatgcttacccttttttgttttgcatttgcttgctagatttttttccatccttttactttgagccaatgggtatcgttgcatatgagctgggtctcttgacagcagatacagttgggctttgcttctttatccaacttgccattctgtgagttttaagtggggcgtttatactgtttacattcacagttaatattgatatttatagctttggtcctgtcattatgttgttagctggttattatgcagacttgattgtgtagttactttacaatgtcaatgttctatgtacttaaacgtatttttgtggtggccattaacagtccttcacttccacacttagcactcctttaaggacctcttgtaaggcatgtctggtggtaacagattcccttagcatttgtttgtctgaaaaggatcttacttctccttcaatatgaagtttagtttggctggatattaagttcttggttgaattttttttttttttttttttttggcgacagagtgttgctctgtcgccaggctggagtgcagtggtgctatctcagctcactgcaacctccacctcctgggttaagtgattctcctgcctcagcctcccgagtagctgggactacagacacgcatcaccatgcccagctaatttttgtatttttagtagagatggggtttcaccgtgttggccaggatggtcttgatctcttgaccttgtgatccacccccctcagcctcccaaagtgctgggattacaggcatgagccaccacacccagccaagtttttttttttttttttttttttttttttaagaatgctgaaggccaggcatggtggctcatacctgtaatcccagcactttgagaggccgaggtgggcagatcacgaggttgggaatttgagaccaccctggccaatatggtgaaatcccgtctctactaaaattacaaaaaattgccaggtgttgtggtgcgcacctgtagtcccagctacttgggaggctgaggcagaagaatcgcttgaacccgggaagtggaggttgcagtgagccaagatagcaccagtccactctagcctgggcaacagagtgagactccatctcaaaaacaaaaagaaagaatgctgaatataggcccccaatttcttttggattgtagagtatcttacagttccactgttagcctgatgggattccctttgtaggtgacctgccccttcactttagctgcctttcatgtttttttctttcatgttgaccttggagaatctgatgacttggggatgtcttggggatggtcatcttatgtagtatctcacaggggttctctgcatttcctggatttaaatggtgacttctctagcaagatttgggaaatttttgtgggcagtatcctcaaatatgttttccaacttgcttattctttctccctttctttgagtgatgccttgagtcatatgtttggtctctttacataatctcagatttctcagaggttttgttcattctttcttgttctttattttcatctgactgagttaattcaaagaagtggtctttgagatctaagattcttttctcagcttggtctgttctgctgttagtacttgttattgtattatgaaattcttgaggcgcatttttcagctctatcagtttagtttggttctttcttaaaatgcctatttcatctttcagctcttatgtcatcttattggattccttagattatttggattggattttgactttcttctgaatctcaatgatctttgtttctatccagattctgaattctatgtctgtcatttaatcctggttaacaaccattgttagagagttagtatgattgcttgaagacaggaagacattctggctttttacattgccagtttttgcactggttctttcacatctgtgtgggctaaggttcctttaatgttttgagtcactgtcctttggatggagctttttccttttttatattctttaatgcccttgagggtttgactgtggcacaaggtaggttcagtcaaatggcttcatttctggaagatttcagggggcaaaggctcagctcagcactcctgagctgcatgctctaactttgcagggctggtaccatacccacagatttgttgtctggcccttcagtgttaagcactgaggtgttcccagtccactggcaacaacactctgatggggtgtgccagccagagtgcttcattgtagtgattgtagcaaggtccctactcacacatatgtgccagcagcagcagcacacagcaggtatgcctgtgttggcaggggtgcagtgccggcaggtgtgggatggggttgttctgcatacttgcatgggtcagccagggcaatggtgctgtggggtgcactcatgtgccactggggacagagtggcagcatcttcgtgagttttatgttaccattctagatctttgaaaataatgttctggacttctaacaagtgtatttgtgaacccagagaaaaaaaagagtattattttgtgcatttttacttaatcatacccaagaaaattttactttacaatttgttcttttcacttaacaatagtcttgaggtttatccatctcaagatggatacacacgtagtttattccttttaattgtataagactacattgtatgtcaacagcagattttatttacaatgttataacaaaaatagcattttatttgtctcattttacttaaatataagtttgtctagaatagttacctgggttatatgcatttttagtttgatatacactgccaaaatcccttcggtatggccactttaatttgccctaataccaatagcttatgagcatacctgttgttcttgaaaatccttgcaaatccttgatattattaaattttataatgttttcacatctgataattgaaaaaatggcatatttttgttgttttaatttgcatttctgtgattattcacaaacttgaatatcttttatatatgtgttgtccttcaacttttccttatctgtaactagcctgttcatatcctttgtccatttttttgttgagtcttcaacttctttattaattatatctgttatatgtatttgtaaattatatgtattgcaaatatcactagatatttaattttgtttgtgatgattttttttctctctaagaagtgtattttgttattttcaacagacagaattgccaatacacaacaccattcacttgactttgaaaatgaaaaagaaaaaaagggggagaaagagcagaattgcttttgaagtagtactttattgtagtacttttgaagttgcttttgaagtactactttaatataattgaatgtatcaaaatctctttttatgtctaatgcctttgtatgtatcattcaaaaggtcctttttacctcatgatcacaaatatattattctacattttctttttttttttttttgtgacagagtcttcctgtcacccaggctgtagtgcagtggcgtgatctcagctcactgcaacctccacctcccgggttcaagtgattctcctgcctcaaccttccaagtagctgggactacaggcatgcaccactgcacccagctattggtttcacaatgttggccaggctggtctcaaactcctgatctgtccgcctcagcctcccaaagtgctgggattacaggtgtgagccatcgcacctagccccctacattttcttattactacttttccttttgagcttttaacatttattatgtgtaaggatctatctatattcctttccacataaatagttatctcaacaccatttatgaaagatttctttctttctcccactgatttaaaataccaattgtatgatgtaacaaatcccatagatttgtttccacacattgtattttcttttcttccaatttattttgtctatttatatgtcactattattcagttttaactattttacccttacaaaaacagtatcttgttttcttaagtttacttgatcttttgttctaagatcttattcttccaaatgaattttataatcagcttgtcaagctcagtaaaaatccctgcaaagattttgattggtgtatctctgattaatttatttgggggagagattacatctttatattattgaggctttggccgggcatggtggctcacacctataatcccagcactttgggaggccaaggtgggcatatcacttgaagtcaggagttcaagaccagcctggccaaaatggtgaaacaccgtatctactaaaaacacaaaaactagccagacgtggtgttgggcgatggtaaaattgaggctttttagttcacacttgtgaaatgtctctctaagtattcaggtattatcttaattattatattattatattcacaatttttataaaagtatagactatcttcacagtttttttcttagatattttgtgtttttaattgatgttatggattaaattctctttgatcacttattcctggggaagccagctgccatgtcctgaggcagccctgtggagaaaaccccattggaaaaaactgaagcctgcaatagctacatgagtaaacttggaagcagatcttctcccaccccaccctacctcatgggaaatcttaagtgaaggcatacagctaagccatgcccagattcctgacccacagaagtcataagacaataaatatttgttgttttaagctgctatgtttggggatgacttgttaagcaaaatgagaaaaataatacaacaggtgattacaatgtgcagcagagtttaggaaccactgaactagaccagtatgtggtcttagagaagtctagtctcttcttgagcccacagggaaatctgtagcataaactgcaccatagaggttgtacagccagaagcaaatgggctaaactattagacactcacatcagtcagtcattggcagatgctgtctggagggaaagtagaggggtgcacaacctccctagtattcccaggtaggtgcttgtcagcaggacaagggttctagaaatctgcagatattagcagccaacaagcagcactgggagatgtgttcatttaccaggtcaattctggcaggagcaccaaaagcatttctacacaggatatacttcagcctttataaagtaaatgtagaagagatgaggcgaaattctggataagatatgtcaatagaaggtattcggagcaggagcctccccattcctcatgggtgtcatcaaccactccagaaatgttctcatttgcctttgtaacttaggtggccacacttgtttttttgggcagacaactctgttccttccttccttacttacttatttactcaagaggtaggaaatgtgtggaagatagatttgtctgaccattcttacagtggtactccaaataattaactatttggtttccccagaggtctctcctgctcccagcatctgccatttcagggcttggagcacttttagaagcacatgtatcttttgaggcaatcttatttacacagattttggtttatggtttccttttttcaatcctaaattgtctgtctcttatcttactgggatatacttagtttcttgtccattgcggattcaccttttgctttctggttaggttatgaatttttctattacttttacatcttcacttcaaaggatttaggaatagagggagaggctgcaacctgtgttcagcccaacattttaaaccacatctgtataaaattttagccagcactaaacaatgcatgaaaagttttatcaccattaaattgcattcactcaaatttgaaattcttctaaacaatgtttgttataaagttattataaactacttgtacttataaaacactacttgatttaaaagatgcttttaaattaattttcattctttctttcagttttgttctaggtgctgtctctcctgctgttgttgtcccttacatgatggtgctgcaagaaaatggatatggtgttgaggaaggcattccaaccttattaatggctgctagcagtatggatgacattctggctatcactggattcaatacatgcttgagcatagtcttttcctcaggtaaacaagaaaatataacaaccactagatcattcatgaccttttttgttacttctttaaacagggtttctggctttgcttcttcatttattaaccaagactgttcaatttaacatctttttaatctccatagaaagctcattctagaccaaggaagatatttcagtggcttaagataccactacttaacacacatgatctcattttaataatcatgtgacaattaatttgataaaccatattattactatgtatctgcttatattgctttggaattttatcagttctcattagaaaaaattcagcggtattatttgtactactaatattttaataggcatttttgaaatgtgcctttttggccatcctaataaacaactggttgctctattataagacaacctaaacatacagagctgggtcagccatatgccttaatggtagtgttaggacaagatcctgcaccagttctgattccaaggtgatatctggtcttgaatatcactacagaaattgtgaaagtaaacatttccacatttagtaatgctttaattatctgcaatgttgaaattgagtcttctgcattattgaagcactaaaatatttttaagttgaaaagtaatatatatagttttatagtttctcttaaaatcagaaaatataaataaataagaaaaagaggaaaagttaaaaaaatctgcagtagtcacatccagaagaaaagaatcatttccttctgaaccttttgatataaatccacccatattcccttcccttcccttcttcccttcttcctttccctttcctttccccttcccttcccttccccctctctctctgtcaaatattcttataaaaatcagtgaatattgaccaatatgttcttttttttttttttgaggcggagtcttgctctgtcacccaggttggagtgcagtggcacaatctcggctcactgcatgctctgcctcccgggttcacgccattctcctgcctcagcctcccaagtagttgggactataagcacccaccaccacgcccggctaattttttttatatttttagtagagacagggtttcaccatgttagccaggatggtctcaatctcctgacctcatgatccgcccgcctcggcctcccaaagtgctgggattacaggcgtgagacatcgcacctggcctaatatgttcttataacctgaattgttttacacttaactgtatatcacaaacatgtttcttttcagtaaatgtatttgtatatcattttaatagttgtttagcttaatgaaagagtattcaatgtgctgcatcataattacttatcctgttcaaaattaaacttgactccaatatttactattaaaataatacttagttgtgctgctataaaaattttttttaattaaaaaattggccaggcatggtggctcatgcctgtaatcccagcactttgggaggccaagaagggtggatcacttgagatcaggagttcaagaccagcctggccaaccaacatggtgaaaccctgtctctactaaaaatacaaaacttagccaggcatggtggtgggcatctgtaatcccagctactcaggaggctgaagcagaagaatcacttgaacccaggaggcggaggccgtagtgagctatccagcctgggcaacagagtgagacactgtctcaaaaaaaatttttttttaatttaaaaaataatacttaattgaacatatagagaaatatttgtacctattcttcatattttcttaagcttaaaagtgtaattgttgatctaaaagatatctacatttatgagtgttctgaaacaaattgccacaatatcatgtcctaccagggtacataaacttgtcatttcctctcacctgtcttcaaaacttggtaatactagcctttttcatctttgctaatttgataggtgaaggagggatctctataaatgaagtattttgaatactagtgctgttaaatatccatgtttattagtcattggcattttgtaaattgcttttcttggaagtcttttgcctatttcttttaggtgggttcaccttttgttctttttgatttgtcaagattctgcattaaattgagaatgaaaacctttgttttatatactttagttttttcaatttgtaatttggcttttaattttctcactctttttaccattcagaagttaaagttttttattgtcaattgtgaaaatcttttccttcatgattggtatctgtcattctttcaaaaaatactgttatcagtcatgtttcaaaaaaatatttccaggccgggcccaatggctcacgcctataatcccaacactttgggaggccaaagtgggtggatcacttgaggacatgagttcaagaccagcctggccaacatagcaaagctccatctctactaaaaatacaaaaagttagctgggtgtggtggcacaggcctgtaatcccagctactcagggggctgaggcacaagaattgcttgaacccaagaggcagaggttgcagtgagccaagatcacaccactgcactccagcctgggtgacagggggagactgtctgaaaaaaagaaaaaaaaaattcctcttccttttgccggctactatgccaaacactgagaataaacagtaggcaacaacattagcttttattgaatacttgcttggctcttgttctaagttccatatatgtcaccactcatttacaggtaaggaaactgagaaagatgttaagtaatttactcaaggtcagagatccagtaagtaggggagccaagatgcaaatctggcagtctgactccacacccacacatttaactcttctcttctccactgcctcccaagaaaacagagagacaagatcaaatggtgcatgttctcaaggagcttgtatattaaagaaaaattacaaatgggatgaatattacattgtgaagattaatattaagtaagtgtcaacttgattggattgaaggatccaaagtattgttcccggttgtgtctgtgagggtgttgccaaaggagattaacatttatttagtggactgggagaggcagatccaccctcagtgtgggtcggcaccataaaatcagctgccagcatggctagaataaagcaggcagaagaagtttaggagaagctgacttgctgagctttctggccctcatctttctcccatgctggatgcttcctgcactcaaatatcagactccaggttctttggcttttggactcttggacttactccagttgttttccagggactctcaggccttcatccagagactcaaagctggcctgtcagtttccctacttttgaggttttgggactcggactgagccaatactagattccttgcccctcaacttgcagacgtgttgtgggacttcactttgtgatggtgtgattcaattctccttaataaactccctttcatacatacatatatcctattagttctatccctctagagaaccatgactaatacagattttgataccaaggtaatggagtaatgctataaaatacctgagaatgtggaagtgactttggagctgtgtaatgtgcagagggtggaacagttgggaggactcagaagaagaccagaagatgtgggaaagtttggaactgcctagagacttgttgaatggctttgaccgaactgctgatagtgacttggacagtgaagtccaggctgaggaggtctgagatggagataaagaacttgttgggaactgaagtaaaggtcactcttgctatgctttagcaaagaggctggtggcattttgcccctgccctagagatttatggaactttgaaactgagagagatgattgaggacatctggtagaagaaacttctttttttgttggtgttgttataccttaagttctagggtacaggtgcacaacatgcaggtttgatacataggtatacatgtgccgtgttggtttgctgcacccatcaactcatcatttacattaggtatttctcctaatgctctccctcccccagccctccaccccccgacaggccccagtgtgtgatgttcccagccctgtgtccaagtgatctcattgttcaattcccacctatgagtgagaacatgcggtgtttggttttctgtccttgtgatagttttgctgagagtgatggtttccagcttcatctatctccctgcaaaggacatgaactcatccttttttatgattgcattagtattccatggtgtatatgtgtcacgtgtcttaatccagtccatcattgatggacatttgggttggttacaagtctttgctattgtgaatagtgccgaaataaacatacatgtgcatgtgtctttatagtagcatgatttaaaatcctttgggtatatacccagtaatgggattgccgggtcaaatggtaattctagttctatatcctcgaggaatcgccacaatgtcttccacaatggttgaactaatttacactcccatcaacagtgtaaaagtgttcctatttctccatatgctctccagcatctgttgtttcctgactttttaatgattgccattctaactggcatgagatgatatctcattgtggttttgatttgcatttctctgatgaccagtgatgatgagcattttttcatgtgtctgttagctgcatagatgtctactttggagaagtgtctattcatatctttgcccactttttgatggtattgtttttttcttgtaaatttgtttgaattctttctttgtcaaatgggtagatcgcaatttgtctcccattctgtaggttgcctggttcactctgatggcagtttcttttgctatgcagaagctctttagtttagttagattccatttctcaattttggcttctgttgccattactattggtgttttagtcatgaagacctcgcccatgcctatggcctgaatggtattgcctaggttttcttctagggtttttatggttttaggtctaacatttaagtctttaatccatcttgaattaatttttgtataaggtataaggaagggatccagtttcagctttctacatatggctagccagttttcccagcatcatttattaaataggcaatcctttccccatttcttgtttttctcagttttgtcaaagatcagatggctgtagatgtgtggtcttatttctgaggcctctgttctgttccattggtctatatatctgttttggtaccagtaccatgctgttttggttagtgcagccttgtagtacagtttgaagtcaggtagtgtgatgcctccagctttgttctttttgcttaggattgtcttggcaatgcaggctcttttttggttccatatgaactttaaagcagttttttttccaattctgtgaagaaagtcattagtagcttgatggggatagtattgaatctataaattacttcgggcagtatggccatttccatgatattgattcttcctatccatgagcatggaatattcttcaatttgtttgtgtcctcttttatttcgttgagcagtggtttgtagttctccttgaagaggtccttcacaacccttgtaagttggattcctaggtattttattctctttgtagcaattgtgaatgggagttcactcatgatttggctctctgtttgtctattaatggtgtataggaatgcttgtgatttttgcacattgattttgtatcctgagactttgctgaagttgcttatcagcttaaggagattttgggctgagatgatggggttttctaaatatacaatcatgtcatctgcaaacagggacaatttgacttcctcttttcctaactgaataccatttatttctttctcctgcctgattgcactggtcagaacttccaacaccatgttgaataggagtggtgagagagggcatccttgtcttgtgccggttttcaaaaggaatgcttccagtttttgcccattcagtatgatattggctgtgggtttgtcataaatagctcttattattttgagatacgtcccatcaatacctagtttattgagagtttttagcatgaaggagtgttgaattttgtcaaaggccttttctgcatctattgagataatcatgtggtttttgtctttggttctgtttatgtaatggattatgtttattgagttacatatgttgaaccagccttgcatcccagagatgaagccgacttgatcgtggtggataagctttttgatgtgctgctggattcggtttgccagtattttattgaggatttttgcatcgatgttcatcagggatattggtctaaaattctctttttttgttgtgtctctgccaggctttggtaccaggatgatgctggcctcataaaatgagttagggaggattcccttttttctttctttttttttttggacaaaagaagaagtgtttaatttttttgatgttttcaatgttgatattttttccaagaagtagagaagtatctctggatggctatctaaaatttataatttttgtacagatatggtatataggacagtgtcatagttttttttgttattatactttaagttctagggtacatgtgcacaacatgcaggtttgttacatatgcatacatgtgccatattggtgtgctgcacccattaactcgtcatttacattagatatatctcctaatgctatcccctccctccccacactccatgacaggccccagtgtgtgatgttccccaccctgtgtccaagtgttctcattgttcaattcccacctatgagtgagaacatgcggtgtttggttttctgtccttgtgatagttttctcagaatgatggtttctagcttcatccatgtccttataaaggacaggaactcatcctttttatggctgcatagtattccatggtgtatatgtgccacattttcttaatccagtctatcattgatgggcatttgggttggttccaagtctttactattgtgaatagtgccacaataaacatacgtgtgcatgtgtctttatagcagcatgattcataatcctttgggtatatgaccagtaatgggatggctgggtgaaatggtatttctagttctagatccttgaggaatcgccacactgtcttctacaatgattgaactagtttacactcccaccaacagtgtaaaagcattcctatttctccataacctctccagcacctgttgtttcctgactttttaatgatcaccattctaattggtgtgagatggtatctcattgtggttttgatttgcatttctctgatggccagtgatgatgagcattttttcatgtgtctgttggctgcatagatgtcttcttttgagaagtgtctgttcatatcctttgcctactttttgatggggtttgattttttcatataaatttgtttaagttatttgtagattctggatattagccctttgtcagatgggtagattgtaaaaattttctcccattctgtaggttgtctgttcactctgatggtagtttcttttgctgtgcagaagctctctagtttaattagatcccatttgtcaattttggcttttgttgccattgctattggtgttttagtcattaattctttgcccatgcctatggcctgaatggtattgcctaggtattcttctagggtttttatggttttaggtctaacatgtaagtctttaatccatcttgaattaatttttatataaagtgtaaggaagggatccagtttcagttttctacgtattgctagcccgttttcccagcaccatttattaaatagggaatcctttccccatttctcgtttatgtcaggtttgtcaaagatcagatggttgtagatgtgtcgtattatttctgagggctctattctgttccattggtctatatctctgctttggcaccagtaccatgctgttttggttactgtagccttgtagtgtagtttgaagtcaggtagtgtgatgcctccagctttgttcttttggcttaagactgtcttggcaatgcaggttcttttttggttccatatgaacttgaaagtagttttttccaattctgtgaagaaagtcattggtagcttgatggggatggcattgaatctataaattacctttggcaatatggccattttcacaatattgattcttcctatccatgagcatggaatgttcttccatttgtttgtgtcctcttttatttcgttgagaagtggtttgtagttctccttgaagaggtccttcatttcccttgtaagttggattcctaggtattttattctctttgaagcaattgtgaatgggagttcactcatgatttggctctctgtttgttattggtgtataagaatgcttgtgatttttacacgttgattttgtatcctgagactttgctgaagttgcttagcttaaggagattttgggctgagatgatggggttttctaaatatacaataatgtcatctgcaaacagggacaatttgacttcctcttttcctaattgaataccctttatttcattctcttccctgattgccctggccagaacttccaagactatgttgaataggagtgatgagagagagcatccttgtattgtgccagttttcaaagggaatgcttccagttattgtccattcagtatgatattggctgtgggtttgtcataaatagctcttattattttaagatacgtcccatcaatacctagtttattgagagttcttagcatgaagggctgttgaattttgtcaaaggccttttctgcatctattaagataatcatgtggtttttgtctttggttctgcttatatgatggattacatttattgatttgtgtatgttgaaccagccttgcatcccagggatgaagccaacttgatcgtggtggataagctttttgatgtgctgctggattcagtttgtcagtatcttattgaggatttttgtatcaatgttcatagggatattggtctaaaattcccttttttgttgttgttgtgtccctgccaggctttggtatcaggatgatgttggcctcataaaatgaattagggaggattctctctttttctattgattggaatagtttcagaaagaatggtaccagctcctctttgtgcctctggtagaattcagctgtgaatccatctggtcctggactttttttttggttggtaggctattaattattgcctcaatttcagagcctgttattggtctattcagagattcaacttcttcctggtttagtcttggaagggtgtatgtgtcccagaatttatccatttcttctagatgttgtagtttatttgcatagaggtgtttatagtattctctgatggtagtttgtatttccatgggctcagtggtgatatcccctttatcatttttattgcatctatttgattcctctctcttttcttctttattaggcttgctagcagtctgtcaattttgttgatcttttcaaaaaaccagctcctggattcattgactttttgaagggttttttgtgtctgtatctccttcagctctgctctgatcttattttttgccttctgctggcttttgaatgtgtttgctcttgcttctctagttcttttaattgtgatgttaaggtgtcaattttagatctttcctgctttctcttctgggcatttagtgctataaatttccctctacacactgctttaaatgtgtcccagagattctggtacattgtgcctttgttctcattggtttcaaagaacatctttatttctgccttcattttgttatttacccagtagtcattcaggagcaaattgttcagttccatgtagttgttcagttttgagggagcttcttaatcctaagttctaatttgattgcactgtggtctgagagacagtttgttgtgatttctgttcttttacatttgctgactagtgctttacttccaattatgtggtcaattttagaataagtgtgatgtggtgctgagaagaatgtatactctgttgatttggggtggagagttctgtagatatctattaggtctgtttgttgcagagctgagttcaggtcctggatatctttgttaaccttctgtcttcttgatctttctaatattgacagtggggtgtgaaattctcccattattattgtgtgggagtctaagtctctttgtaagtctctaaggacctgctttatgaatctgggtgctcttgtattgggtgcatatatatttaggatagttagctcttcttgttgaattgatccctttaccattatgtaatggccttctttgtctcttttgatctttgttggtttaaagtctgttttatcagagactaggattgcaacccctgctattttttgctttccatttgtttggtagatcttcctccatccctttattttgagcctatgtgtgtctctgcacgttagatgggtctcctgaatacagcacactgatgggtcttgactctttatccagtttgccagtctgtgtcttttaattggggcatttagcccatttacgtttatggttaatattgttatgtgtgaatttgatcctgttattatgatagttgctggttatttgcccgttaattgatgcagtttcttcctagcattgatggtctttacagtttggcctgtttttgccctggctggtaccgggtgtttctttccatgtttagtgcttccttcaggagctcttgtaaggcaggcctggtggtgacaaaatctctcagcatttgcttgtctgtaaaggattttatttctccttcacttatgaagcttagtttggctggatatgaaattctgagttgaaaattcttttctttaagagtgttgaatattggcccctacttacttctggcttgcagggtttctgctgagagatccactgttagtctgatgggcttccctttctggctaacctgacctttctctctgggtgcccttaacactttttccttcatttcaaccttggtgaatctgataagtatgtttcttggaattgctcttctcaaggagtatttttgtggtgttctctgtatttcctgaatttgaatgttggcctgccttgctaggttggggaagttctcctggataatatcctgaagagtgttttccaacttggttccattctcctcatcactttcaggtacaccaatcaaatgtagatttggtcttttcacatagtcccatatttcttggaggctttcttcatttctttttactcttgtttctctaaccttgtcttctcactttatttcatttatttgatcttcaatcactgataccctttcttccacttgattgaatcggctattgaagcttgtgcatgtgtcacaaagttctcgtgccaaggttttcagctccatcaggtcacttaaggtcttctctacactgtttattcttgtaagccattcatctaatcttttttcaaggtttttaccttccttgcgatgggttccaacatcctcctttagctcggagaagtttgttattaccaaccttctgaagcctacttctgtcaactcgtcaaagtcattctccatccagctttgttccattgctgacaaggagctgcgatcctttggaggagaagaggtgctctgatttttagaattttcagcttttctgctctggtttatccctatccttttggttttatctacctttgttctttgacattgttgacctacagatggggttttggtgtagatgatcttttggttaatgttgatgctattcctttctgtttgttagttttccttctaacagtcaggaccctcagctgcaagtctgttggagtttgctggagttccactccagaccctgtttgcctgagtatcaccagtggaggctgcagaacagcaaatattgctgcccgatccttcctctggaagcttcgtccaagaggggcatccgcctaaatgaggtgtctgtcagcccctactggcaggtgtgtcccagttaggctacacaggggtcagggacccacttgatgaggcagtctgtccattctcagaactcaaacgccatgctgggaaaaccactgctctcttcagagctgtcagacagggacgtttaagtttgcagaagttgctgccttttgttcagctatccctgcccacagaggtggagtctagaggcaataggccttgttgagctgcagtgggctccacccagttcaagcttcccagccgctttgtttacctacttaagcctcagcaatggtggacggccctcccccagccaggctgccacctcgcagatggatctcagactgttgcgctagtagtgagcaaggctccatgggtgtgggacccgctgagccaggcacgggagagaatcatcttgtctgctagttgctaagaccttgggaaaagtgcagtatttgggcaggagtgccctgtttttccaggtagtctgtcacggcttcccttggctaggaaagggaaatcccccaaccccttgtgcttcccgggtgaggtgatgccccaccctgcttcagctcaccctctgtgggcctgcacccactctccaaccagtcccaatgagatgaaccaggtacctcagttggaagtgcagaaatcacctgtcttctgcgtcgatcatgctgggagctgcagaccggaactgttcctatttggccatcttggaacccacccaggacatctggtagaagaaatttctaagcagcagagtgttcagtttatgacctgagtgctcttaaaagtgttcagttttatgcattcacaaaaatatggtttggaattggaacttatgtttaaaagggagacagagcataaaagtttggaagatttgcagccttatgatgtgatagaaaagaaaagcccattttctggggagaaattcaagctgactgcagaaatttgcagaagtaacaaggagccgaatgttaattgccaagataatggggaaattgtctccagggtatgtcagagttcttcacaacagcccctcccgtcacagggttggaggcctaggagggaaaaaatggttttgtgggccaggcccagagctttgctgctctgtgcagtcttgggactgcactatgtcccagccatggctaaaaggagccaacatacagctcaggctattgcttcagagagttcaatccccaagccttggcagctgccacatagtgtcgggttgatatgctagttggccatttgtatttttttttggaaaaaatgtctgttcaagtctatcttagtccattcctgctgctataacaaaataccttaggctggtaatttatgaacaacagaaatttatttcttgcgttctggaatgtgagaagtccaagatttaggctacaacagactcagtgactggtgaggtcactatattcactatagatagcaccttctctttgtcctcacatgttcaaaagggaaagtaaactcccttaagcctcttttataaaggccctagtcccatttctgagggctatgacttcatgaactaatcatctccaaaatgccccacctcttaatattatcacattgaatattaggctccagcatatgaatattgggagaacataaacatttggaccatagcaaagtcaactgaccgtttctcattatgttgttttgttattgagttgttgttctgtatatattttagatattaaccccttatcaggtatttggtttgctgggaggtttttgattcctgattcagttactagttataggtctattaagattttttattttgtgacttagtcttggtaacttgcatgttactaggaatctgttcatttctcctaggttatccaacttgtcagtatataatcattcatagtagactcttagaatcctttttatttctgtaatatctgttgcaatgtcttctcttttgttcctaaaagaagttgagtcttctttattttttttcttaaatattctagctgattatttgtcaattttgttgaactttgaaacaactactagtttcattgggttttttttttctctagccttttttttttttttttttttgagatggagttttgctcttattgcccaggctggagtgcagtggcacgatctcagctcagtgcagcctctgcctcccggttcaagtgactctcctgcctcagcctccagagtagctgggattacaggcatgcaccaccatgcctggctaattttgtattttttagtagtgacaggtttctccatgttgctcaggctggtctcaaactcctgatctcaggtgatctgcctgcctcggcctcccaaagtgctgggattacagtcgtgagccattgcacccggccttctgctctagactttattatttccttccttttgctaacattggattgagttcttctttttccagtttcttgaggtgtaaagctaagttgcttattttagatctttcttcttttttaaggtaggtagttagatatataaactgtcctcttcatattcattttgctgcatcccacaagctttggaatgttgtgtttccatttttatttgtctcgagacattttctaattttccttgtgacttattctttgactatgtattaatcagagttctccagagggtcagaaccaataggagatatagatatagatatagatatagatatagatatagatatagatatagatatagatatagatacatgcatataaaagagaatatatttacatatatatgaaatataatttattaaggagaattggctcacataattacaaaggcaaagtcccacaataggccatctataagccggaaaatgagagaagcctaaagcatggctcccaaggaagccagtgacatggctcagtccaaatttgaaagtctcaaaaccagggaagctgacagtgcagccactagtctgaggccaaaggcctgagagctcccaaaaggctgctgatgcaagttccagggtccaaaggcaaaagaacctagagtttgatgtgcaagggcaagaggagaaaaaggcatactgctctggaagagagagaaagtgcataaaaaagaaatccaagcaagctgaatgttcccattcttctgcctttttgttctagccacacttgcaaccaattgcatgatgcctacccacagtgaggatgggtctttctctctcagtccactaactcatccatcattctcctgtggcagcaccctcacagatataccctcactcagtgcttcatcaggcatctaagcatccctcaatcaaattgacaattaatattaaccatacaggccaattggttaacagagtatatttttgtaatttccacatatttattacttttcctttttccttctgctatgaatttctaatttcatttaatgtggtcagaaaagatacttggtatgagttcagttttcttaaatttttaaaaacttgtttgtggactagcatgccatttatcctggaaaagtcttggtatgtacttgagaagaaagtgtattttgctattattgggtgaagtgttctgtatatgtcagataggtccaattggtctacagtgttgttcaagttctctgttttccagttgatcttctgtctggttattgtatccataattgaaagtgggatattgaagttttctgttattatgatgttgttatctatgttacccctcaattctgtctatgttggcttcatatatttagatgctgtactgttagttgcatatatatttataattgctatatcttcttggtcaattggcccttttattattatgtaatatccttgtctcttgtgctattatttgacttaaactctattttgtctaagtatggccatcgttgttctcttttggttaccaactgcattgaatatctttttccatcctttcactttcaacctttgtgtgtctttagatctaatgtaagtctcttgcatatagtatatatttagatttttttaaatccatttggccaatctctgtcttttgattggaaaattagcctatttgcatttaaagtagttactgatagggaggggcttactattgtcattttgtttattgttttatgtatgtcttgcagctatttttttccacttttcctctcttcctgcctccctttatgtttcactgatttctttttttggtaggggcatgcttgggttcctttctcatgtttatttgtgtatcttctgtaggtcttttctttgtggttactgtagaattacatgaaaacatctcatagttataataatctattttaaattgacaacaacttaactttaatcacatacaaaaactctacttctttacacttccttctcactttgttatcagtgtcacacaatatatatttttatattgtttattcacataatttaatacagtaatgttatgcttttactttttaaattctatgcttcaattaaaagtgaattacaggctgggtgtggtgtcttacacctgtagtcccagcactttgagaggccaaaatgggaggaccacttgagcctaggagtttgagaccagcaagaccttatctctgctaaaaatttaaaaatattatctgagtgtggtggtgcatgtctgtagtcccagccacttgggaggttgaggtgggaggattgctttagcccaggcctgcaaggctgcagtgagctgtgatcaaaccactgcactccagcctgggcaacagagcaagactttgtctcaaaaaagaaaaagaaaaaagtaaagaaaaaaagtgttttacttaccaccattacagtattaaaggattctatgttcactcatatatttacctttaccaaagaagtttatgttttgtatgcttttgtatttctatccaatgccctttcatttccacatggaggactccctttaacattttttgtaaggtaggtctagtggtgatcaattccctcaccttttaattctctggggaactctttgtttgtccttcatttttgaagtacagttttactggctatacagttcttggttgacagttttttttttttctttcagcccttttaatatatcatcccattctcttctggcctgtagagtttttgctgagaattccactgataaccatatggcatctcccttgtatgtgaaaagttgctttgatcctgttcctttcaaaattctctctttgtctttgacttttgacagtttgattgtaatgtgtctcattgtaggtcttttgcaaattatccaacttggagttctttgagactcttggatttgtatgtccatttccttctttaaatttgagaagtttttggtcatttttttaactggctctctgcccctttatttttctcttcttctggcactttcataatacatacattggtctgcttgatggcatcctataagtctcttaggctgtcttcactcttcattccttttcccttttgctcctctgactccataatttcaaatgactagtcttctgtttcactgattctttattctgcttgatgttattgaaactgcctttgcaaaaattacaactgaagaaattatgacagtgaaagacatcagacctaatcaactccatcttgcttctagcatttaaactgtccttgttcattcctggcagtcggatgaactaattttgggaaggtattcagttcatggtttgactctgaaacaaagttgataatagccatttcctgaaaagatccccttcttgcctggaaccagtctgcctttgcaggataaacaaattagctatagcattagaaattacagttgaagggttatgcagcctctggctccaagagtctgaacctctccaaattgctcctggggataacatcactattgtaaaacctaaaatcattgcttgagatattttgcagaccctgcactggctgattcatccagtgcacccagactggtaataatggctcaactagttctgccatcccacccacaaacagaagacagcaagaaaacatcacttcaaccccctatgatttcatctccaacctgatgaatcagcagtccccacttcccaagcccctacctgccaaattatctttaaaacttctgatccccgaatgctcagggagactgattttagtaataataaaactctggtctcccgcacagctggctctggatgaattactctttctccattgcaattcccctgtcttgataaatcagctctgtctaagcagggcacaaggtgaacccattgggcagttacacagtctgttggtgatttccaatagtgaatttttcaattgagctgttgtattccttagcttcagagtttctgtatggttcctttttttttttttttttttttagtttctatctctttgttaatattttcattttgttcatgaattatttcctgctttcatttagttatctatttctgttgtcactgggcttcattaagagagttaatttggattctttgtcaggtaactcatttatctatttctttaggattggtttctggagatttattttgctcctttaatttagtcatcaggtttctctgtttcttcttatgcctgttattttttatttttttattttttacttatttttgccaagatttggacgtttgaaaaaactgccactgctcccagtttttatcagctggcttcatacggaagacctttacctgaatcagcatggctataggttctagcagcctctcaaaccttttctgggaatgcatcttctttgggtttatacattgcaacatcccaagtagaggtttgccagtttctttttctggagctgttgttctctctggtatctgtctgtggcactgcaggttccctggtgctgcatcatctctgacctctcctttattcccagtggctcccacgcatccaaagtatgccagttgggtgtcaagttagagagagagagagagcttcaggtaacctcataaaactattccgttccagtcttctctttccctgctaatggagaagctgcaagttgagtgcttcccagccacaccaacctgttccagcttggggaaggggtatcatgagtataatgcaacagcttttcttatttgttcaatgccactattcttggctttgcacttgtctgtgctactacagcttcttaatggtttatggaactccataaaggcttttagaccatatattgttgttcagttggtatctttatggagaatcaaggtttggagctccccattccaccatctggctgacatctctctgtttatattattttttatttttattgtattttattttcttgagacaggatcttgctctgtcagccaggctggagtgcagcctcaaactcctgagctcaagggacctcctccctcagcctactgagtacttggactataggcacacaccacataccgggctagttttttattttcttgtaaagatggggtttcactctgttgcccaagctggtctcaaactcttgggctcaagcaatccttctgccttggcctcccaaagtgctaggattaaaggtgtgagcccaccatgccctgcctgttatatttagtagaaaatatgtctaaaaatatacttacttactatattgaatccactacccagagcttaactgaactatttttgtgactcattttgtttttttattttttgttttttacttattacaatgaactacaagtatggatatattaatattaatgaatataaaatatactggaatcttttgtattttttttccttttttcttcaccaaaagcagatacttaaatatactgaaatcttaattgacccttgaatgtttctaggactgaccctggaacaaaattttttatgttgttattacattgttcttttcatgttaaaatcatttgtttctttttcatatagtacatgaaagaagaattgttaatatagcccttaacagccatatgctaagtgccacaagtgtttcggtctctctccattcttgtacctcacttagtctttttttttttttcttttggaggtgtggcctccgtctttcacccaggctggagtgtggtgtcacgatctcagctcactgcaaactctgcctcccgggttcaagtgattctcctccctcagcctcccgagtacctgggaccacaggtgtgtgccaccatgcccagctaatttttgtatttttagtagagatggggtttcattatgttggccaggctggtcttgaactcctgacctcaagtaatccaccctcctcagcctcccaaagcactgggattacaggcgtgagccactgtgcctggactacctcactctgtcttttaagttggctatgtaaggggagcatcttgtgcttgttaagtctttgttttctggcctatttacataatggacatttctgagttgtgtgtatatattaaattatttgagagtatatatttaacgtactaaatagatctacatgttttcatatatgtcactataaaaagaccatttgcatatatttgttctataaaatgcttacttttcttcatgaaccacctagatttgcttttctgatgtgtagtgtatgtgaagatacttctttgtgaatttttttttattgtgtgcccctacaggtggtatacttaataacgccatagcctctataaggaacgtatgtattagtctgctggcaggaattgttttgggattttttgttcgatattttccaagtgaagaccaggtaaatacaaaatctattttatagaagtatagtattagacatttttttcaaaatattaaactttggtaaggtcgatgaaatttaatacttaattctatttctctaaaactagcctccaatgcctactctgtacttaaaactgagcacagcagtgattgatacaggtcaatggctttgattaaagtctctgcttcttaatttggcaaataaggaatatcaaaaaatatacttaatgcagagtatccctctgaattatactttccctttctctactaaactgcctactgatgtttgataatttcccccaaattttcccttaaacattttagggggaaataggtccccatttatttctgcatattttctgactgaaattcactcctgctctcctttgacaaaggcaacactcaaatttagccatttcctgccttaaaggaaaacatgccattacttttgtatttctgtaatttccatccaaatttagctgtaacatattgaccaaagagatattcaaatattttttaagaattcattggatatgttatatgaaactggagattttatgggtctcttttcttcttcacttatagtaatactttaaccatattactgatactagtatcagagatatggcagaagatgaaacgtgactaattgcaaattttgttacttggtagtaagtctgctaaaatatatggtgagaaagaaaatcaaaattttagacatttaatataacatttaaagacataatatcagagggtcaaaaatatataatagataatgtcaaatcttatattatatatttaatataaactaatttctaaatatctatctaattctagaaaaaacttacattgaagagaggattccttgttttgactatgtgtgtttctgccgtcttaggcagccaacgtattggtttacatggatctggaggattatgcacactagtgttgagtttcattgcagggacaaaatggtcccaagaaaaggtgaatatttttaatatgctatattttaaaagctaaaacaactgaattttttacatatatttaggaaatcccctcattctggttggaaaatgttccaaaaggttttctgtcctcaagaaagtgtatgaatcaatcgaggaaagaaaatatttaggaaaagcacctggaaatatactaatatggaatcagaagttgagttaatcacatcaggcttctctttttcccaagttttatataatattattatattacctttatcaatctaattattttattcattgaaattttaattatacaattaatccatgaaaaatgtttgtaaaaggccggggacggtggctcatgcctgtaatcccagaactttgggaggtggaggcggacagatcgcgtggggtcaggagtttgagaccagtgtggccaacatggtgaaaccccatctctactaaaaatacaaaaattagctgggcatggtggtgtggtggtgggcacctgtaatcccagctactcaggaggctgaggcaggagcatcacttgaacccaggagccaagatcatgccattgcactccagcctgggcaacaagtgcaaaactccatcacaaaaaaataaataaataataaacaaacaaataataaaaatagaaatgcttgtaaaagaataaaacatatagaataaaatgtaaaagatttctttattccccaccactgtcaaatatcaaacccccttacatttttttaagtaaccagtattctatttatagacattaagatcgtttccactttttgttatttacaaacagtgctgtcataaacagtgttgttcatgtctttttttttgagacacagtttcactcttgtcacccaggctggagtgcagtagcataatcttggctcactgcaaactccacctcctggattcaagtgattcttctgtttcagcctccctagtagctgggattacaggcgcacaccaccacacccagcaaatttttgtatttttagtagagacggggtttcaccatgttggccaggcaggtcttaaactcctgacctcaggtgatactcctgcctcggcctcccaaaatgttgggattgcaggtacatctatagggatagagtcctagaaatgactttttttttttttgagacagagtctctctatgttgcccaggctggtcttaaaatcctgagctgaagggatcctcccaacttgacatcgcaaagtgctaggattacaagcatgagctaccacacctagctggaaatgatctgtgttttattttgatggacactgctaaattatcccttcaaaagattttggttatttacactctgccaacagtgcacaaaaatatctaattccttaactcatcaacagcacttgatattatcactagttctattctttttactattagatgacctcaccatccaattcttgtagtttcttacaattatgtgatgttgttattctttatttacatttctctgattagtagtatagtaagcttctcttcatatattctttttaaaatacctatgatcttctttgaccatttttattgggttatttatttttttgtttctaatttatagtttctcttagggctactgatcctttgttatgtatatattgcatataatttttgcttatcttcaactttgtttatggtgtctggtgtatgaaagtaaaatttcctatgaccaaacctattgggttttccttttttggttttggattctgcatctcatttaagaaggactttctcactgaagattataacatataaacgttacaaagatatactattttgtatattatcatttaatattttggtagtttttgtttgtttaatttgtttttttcatttagtcttttaatctatctggaatttatctttgtgaatgctgtgaggtaaggttatacatatatacatatgtgtatcttacaaactatttatatatatacacacacacatacagtttgtaagttaactgaacagagatagaactacatcatgcctgatgtgtgtgtatgtatatatatatatctatacacacacacataaatatacatatatattcagacacacatatgtacttgcatgtgatgaatatgtacatacagatatatgcacataaactagacagtcattttttgccaaattgtttatttattgaccaattcattaataattcagttttttaacatgaactaaattctcccatatatattaattctgaagtctatttaatcctacttctctatttctatgccaacaccactgttttaaatcactgcagttttatgtgtcaaaatctaatatagattatacttctttttaaagtattttttggctgttcctacacatattctttcttagataaattttagaatcagcttgagaagttccccaaccaaaaatcatagtgacattttgtttagtattcttatataatcataatgataaaagaaatgaaatgaatgaaatgcaaatcaataaataaaattaaaactgctagaatttttttaaatggtaaaagaaacagaactaaaacaagttttaaagattaaaagtaacaaataggataattatgctgtaaagaatagtaacattgtttttctttgtttttctttttttaaactataataagtggggatcagaaaacacagtcataagggaaatagttatgaagatagtttatgcctcaaggaagagacatcaaagttcttatgtatcttctgtttaaaaaaaaaaatgttaaacccagactgagactgaaatctcttcatccaaattcctggagaagagccagagtaatgtaggccaataggggcctttcctgtaacgttttaattggggaagtagcactgggaggcattcgtttccagaaagggaagctgggtaggcagttaaatgagaatctaatatatgttttggttttgttttaaggaaaaagtaactttaaaatattcaacatgggttctttggaagcaggcctagcagacttccaaattgtttttcctagtagtatatgctatatatatcaggattcactttaatgggattgagttccaggatggttgttagtggagggcttcccaacccccttttgagaacccaaatgtttgcatgaactgggtatgttctcatcaggcatgatgtagttatatctctgttcagttactttacagacaaaatctggaactcatacgaaacatggctagaaccctaaggacatcacttattctgtgacaaaatggccaaatagtattattttattgctttgtgagtttattttaatcaaattctacctaagtgtttgaataaaactattgaagtgctcagtttttattaagtttaacatttttattaaaataaagtgtcttaaatttattaaatgttaaatgactttaggccaggcatggtggctcatgcctataatgccagtgctttgggacgccacagccagagaccacttgaggacaggagttctagaccatcctgggcaacatagcaagactccatctctataaacaatttaaaaattagcccagcatggtggtacacacctgtagttctacttgggagactgcgagaggatcacttgagcccaggagttcaaggctacagtgagctatgattatgccactacactccagcctgggcaacagagcaagaccccatctctaaaatacttaaaaaatgaaaaaaaaaaggggggggaagactttaagtttctgaaatatatttatgtgccaaaatcattataaatgtatttctcttttctatagatgaaagtccaaaagattattacgactgtatgggatatttttcaaccacttctttttggtttagttggagcagaagtatctgtttcatcgcttgaatcaaatattgttggtaagaataattagagcacaaaaaatatgaaattcaaaaatatttaagaaaattataaatacatttatttttatttacaatatatctttggctacaacgaccttcttcagaaacacatgttgatacagtgtcatattttcatattgctcttcctttacactgggtgctcttttttttttataaaccaaggacagccctgaatatattccctgagttatctgaagaaataaatataagatttctttcctgagggaacatatttgatacgatcagcgctttttgagtactttcatttaaaactattggctgggcgtggtggctcatgtctgtaatcttactttgggaggccgaagcgggcagatttcttgaagttaggagttcgagacctgcctggctaacatggggaaccccctctctcctaaaaatacaaaaattagccaggtgtggtagtgcgcgtctgtaatcccagctactcgggaggctgaggcaggagaatcgcgtgaacccgggagtcggaagttgcagtgagttgagattgtaccactgcactccagcctgggtgacagagcaagaatccttctcaaaaaataaattattattattaataataaaagtattcaaaagaagtctattagttcagaattgtataaatgtcatctgtcttatttttcatggtacttccaccatcagatactctcttgcactttacagagaatcctccatcatattcattttttataatcattgtttttatgtaaaaaataagcacatgaagagacaatagccttaaaatgttttcaaaagttttagaaatcatattcctgggcatgaagaacacttcttcacaaatattttgttatttatgtttgttttcatctgttgtaggcatatctgttgccactctaagtttggcattatgtgttcgaattttaaccacatatctattgatgtgctttgctggttttagttttaaggagaaaatatttattgctttagcatggatgcccaaagctacagtacaggtaagaacatattaagcctgttgcttaatgctttcattttgatgcttttaaaatttaaaatgaaaaatgttactctagtcacaaaatatgagctattatccttactttttaaatgtttgattgatcataactattcattaaaattaacgtaaccagtcctggctactcaggaggctgagatgggagaatcgcttgaacccaggaggcggaggttgcagtaagctgagatggcaccactgtattccagtctgggcgacagagtgactccatctcaaaaaaataaataaataaataaataaataaacaaaaacaaagaaccttaatgtaatctttttctatttttatttttattttcattttgagaccaggtctcactctgtcacccagactggagtgcagtcgcatgatcacagctcactgcagcctcaacctcctgggcgcaaacaattctctcacatcagcctcctgagtagctaggatcacaggcacctgccaccacacccaactgcttttttattgtttttttttttgagacagagtctcactctgttgcccaggctggagtgcagtggcatgatctcggctcactgcaacctccacctcccaggttcaagcgattctcctgcctcagccttctgagtagctgggattatacaggtgcacactaccacacccagctaatttttgtatttttagtagagatggggtctcaccacgttggccaggctagtctcaaactcctgacctcaagtgatccacccgcctcagcctcccaaagtgctgggatcacaggcatgagccactgcgcctggtcttttttttctgatttttttgtagagaagaggtcttgctatgttgcccaggctggtcttgaactcttaggttcaagtgatcttcctgcctcagcctcctaaagttctgggattatgagcataacccactgggcccagccaatgtaacctttttaaatctcagttttaaaagcaattcttttgaaattaaaaagtattctttcaataagtacttcctaagtttatgaaaatgttttttattttcctaaaatatataataagaatatatctgaaaattggagtttttatattttgctgaatataacaaagctaaatgttatgattttaaaaagtagagacacaggccaggcatggtagctcatgcctggaatcctagcacttcgggaggctgaggcaggcagatcacttgagctcaggagttcaagaccagcctgagcaacatggtaaaacctcgtctctacaaaaaatacaaaaaaattagtcaggtgtgttggcacgcacttgtagtcacagctacttgggggctgaggcaggaggattgcttgaactcaggaggttgaggctgcaatgagctgaggtcacaccacttcactccagcttgggtgacaaaatgagaccctgtctccaaaaaaaaaaaaagtaaagtaaaatagagacacattgattttttaaaaaatacttttcctaccttgccactcactccatcacacaaatgcacatttattgtttttaattacacatttatttgtattctatttggttaatggctaaatccctgcccctgcccccttgatagactacgtaaggacagggacagtgtctggttgttgcagttgtttttcattatttctccctggcacttaacacagtgcctgacatgcaggagccaaatgtgtattgcatgcctgcaagaatgaatgaacagaaagggaaaccttgtaattttgccctcttattcaaggatattctcctcctcctaaaatatattgctacttattgttagactgtttaacttggcagcataatataccttaatttcctgtggctcttttcttagttgttattccaaaacagaagctcctaaattttcatgcaaaaaaaacctctattatcatgttagaaaagcaggttcatagggcctgactacctgttttgaataccatgttacttgcctataacctcaggaaaattattttctaatctctcagtccttcagtgttctcatcttacaatgaagtctatgactgtatctgtttcttagcagtgttgtcaggattcaatgagataatccacgtaaagtgcttagcactctctctggcatatggtggtgctcaattaacaatgttgttattttatcttaccttcaagtaatataaataataactttttatttttaatgtctactgtagggaataataaatctacaaaaggagtatctgttctctctccttccaacaatactctcgcaattttgttttattatttcataattttcataaagcagggaaaaaagaaaagcaggtatgaggaaagagaccactcactcgagtcctgcagtattattctgcttctgcctattcctgtctgctggcttcaggctagcttctacacaaagaatatcaagctggttccaggaactggcaagacataaaaaattaattatttatacaagtagagtcacaacagcaataatagataacgataatgtcacaagtaaataagatcaacaaatatttaaatttcaattttaaattattttcacctttatcctcttccaccgttctctgctgctaacataaaattggctaaggttcagctctttctcttgttcttcagtttcgagttactgataaaaattagagtggaaaaatgaagctattaggagagtaaataaataatttagtttacaaatgtaagatcagcttggcaattggattcttttaaagaaataatattaaatctcagtcactaggaggaaatcatttatcatctaataaagtcctcacataataaggttgtcgtaagaattaaatgaattgataaatggaaagctttaagaatgatacctgccatatgatgaatgccatataactatataaatattatttctagtttcaccattatcataatcatctcttaaaagtcaatgggtttggtttttgttttttgttttttctgttggaagttcttttatgttcaaatcctcttctaaactgtaagattctttcaagttggttttctgcatgattatctttttctccctagcatcctccagcacactggctcacgttcagtacattaaaagttacgatataaaaatgataccattttaaattattgatttaggatatagaaattgatcttaaattgaggggttcttttgccataatgttccatatcagaggtaatgtttccaccattatgttgttactttgcaactccatagaaaatatgttatatattggtatttaattccccaaaattttaaggcaatttcatgcctagattattaaacacaaagaaagagggttagcaagaaatttgctttatgttattaaaaataatgtggtagaaggtgactagggaaaaaaacttgtgacccagtacagtcattctaaaacgaaaacttcaaaggaactcattctctgacctggcagggcatgaggagtgagggagagagaaacttactactatctgaatacctactgtgtgccagctgttctttgcattctcatatttaattttcacaaccattcagtaagataagtattttgttcttcattttacacataagtaagtagaaggttagagagtgtgagtcatttgtacaaggtcactagcctggttgcagcaaaaatagaattcaaacccggtttgctagattccaagcctgctgtcagttctgctataacacagtgccccctgaatagggagaacaatgagaagaagggcaacaaatcctagagaaccataagaaaccttagtattttatgttgtcttgttgtagtcaagaaccacttgcacacggtaaaggcaactaagcaaaactggtttcgttagaactcctggtgttatgagggcaacatgaacactcaaaagagatattcgaatagaggaacactgagaggacaagagtgcaaaatcagcccaaaaatgtttgcctgctgatttgtcactattgtactcttcctccacatatatttgctaggaagaacatggaactgatgagtaacttatgaaaattactgagtactttttttttctaatagtctagtactagattttgtttattttaacagagccatttacattatatatcaactcagtttaatatttttctttatgccccatttttacccctaaatgcaggctgtgttaggtcctctggctctagaaacagcaagagtctccgcaccccacttggaaccatatgcgaaggatgtgatgacagtagcatttttagccatcttgatcacagctccaaatggagctctacttatgggcattctggggcctaaaatgcttacacgccattatgatccaagcaaaataaaactgcagttgtcaacattagaacatcattaaaaagtttacctgtcatcatctgcctgcttcttttaatgaattatttcacatgacagaagaattttaaagtagaaatatgtggggactgtacagagaatccaggatttagtaaacatgtgatttcagtacagggcttttcttggactttttactccaaagttaatttaataaaaataatattaaatggaatgctctcttggtatttacatactgtaagaacaaattaaatctgtaaataccctaggaaagtttaaagtaatccctcaggctgaatttgatatcataatacaaactgagcttaatataaaattaaacaaacttaatggcagaaagaaaaactttgaatattgaacttggtaagatagcctaagtttccaaatagaaggagtagaactcccatgatgtccagtaattcagttaaaaagatcaccacaaaaagaaagaaaaggaataaaacacatcaactttaaatgggttaactaaatagattttaaattctggttttggtgactacctgagtaaataatatgttcagtaatagaaccaagttagtctttccttacttctgccatgcccttaaaatgaaagtctggtttagcagtttttagatgaaacactatctatatttttatttatagaaataaaattaaatcacaaatggaagtaaactatatttttttcaattagtattttaaaatctaggcataaaaggcagcctccaaaaatgaaagatttggagactgctgtcatgtggcagtttcttctccttagtaatatagaattaccttttaattctggctgattaaatctgccatgttaatgtagaacccatcacaagcaaagtgagttttaattaacttcaagactctttattttaaagttataagagtcatataaacgattctaaaatggccttattgaatggcatcttagaaattgtttagacttctttggcaaaagctcaatgcaaggactgaatattactttcattcctctttttcctcttctccacaagcaaggtattaaaataccacagaatatgacatttacacataaatttgccaagtgaagcaattaaaatttaaggcaatcaaaactatgtgttattcctattaagactaagggcttttacagaatatatcaccgaaactgccagaagttctaaaaccttctgggaaataactcttagaaaatacactctgggagaataactctgggaaaagataaaatagctactattttagtgacattttctccttatagttttacaacaaagtacagactccattttcaaatattgtaattctagtactcaaattctaaaaatttaaactgtgccagtgttttgactactatttaaatcatgagggcatctcattgtcacttacaagaaaataaaaatataagcagggtgttgtggctcatgcctgtaatcccagcactttgggaggccgacatgggcagatcacgaggtcaggagttcgagaccaacctgaccaacatggtgaaaccccgtctctactaaaaatacaaaaatttgtcaggtgtggtggcgcacacctgtaatcccagctactcagaaggctaaggcaggagaatcgcttgaacccaggaggcagaggttgcagtgagctgagatcgcaccactgcactccagcctgggagacagagcaagactctgtctcaaaaaataataataataaaatatatatatatatatttacaagatagtattttacattcacaagaggattagatttcaaagtagaaagtttattttaataaaagagagataaataattttcaaaatgaggaattgtgttattgattaggaggaaaattgttgtaactattctttttattctttatttattgaactttctctaagtgtctgtgatatatgtttattatactgaaatagtcgcccttttaaggtggtgtggcagatgttgttatttatttgaaattttaagttttttatttataaaaagtttttataaaaatttattaatataatttaaaaattacaaccagttaaccatgtgtatgatattagtgtttatagtatttaaacaaataaggctgggcacagtggctcacaccatcccagcactttgggaggccaaggcgggtggatcatgaggtcaggggagggagaccatcctggctaacatggtgaaatacaaaaatacaaataacaaaaaaaataaaaatacaaaaaactagccaggcgtggtggcaggtgcctgtagtcccggctactcgggaggctgaggcaggagaatcacttgaacctgggaggcaaaggttgcagtgagccaagatcacgccactgcactccggcctgggtgacagagcgagactccgtctcaaaaaaataaaataacaaataaatacaagattgttgtttcttatcaactttttgtatctttgcctatttttttcactgtttaaggaatttttattaaagcaaaattttataatccaaattacctttccttgctcagttatcaattctgttacttaaaacagaagtgacattctgagctattccacactaacgaattacaaaattaaaggaatgctttaaatttttatactttgctgaaaattatttatcacagagtctgaaaagcattgcagcatttttatattttattattttgggaggattttttgttttcaaatcagtaagtaatctaggactatcattgcatttgttagatctgacgtttgcttggtatgtaaagttcaaagtttcctttttaaatttattttatactttacaaattttttccatagtatttaaggtttttgatattgagattttttcttcagtgatgcgcaagtttctttctgtggtccctgatcagttttaaataattggaacaccagtggcaccattaactgctttctgggcagcctctttagcttggtggtcttgtggtacagctatacctttgtcaaccttagtacagcgaggctctggagattcaagcatatgaagaagttctaaataaccaatctccaacaacatgccaatgattttaccagcacgactagggcatggcttgaagaagaggaaagagccattcactcgtttgcttttgcttttgaggaggagcagatgccatcatggaagtcaaaggttcttgaccttctacatgaacagcaggctgctgcacggtaacttggggctgtgcatgaaactgccattgaggattgtgaacttccatagcatatttatactgtgaaatggtgcaaacagcaggagtatctgtagtagcagtagcggcaactgcagaatgtgctcctattgtctgtgttgatgtgttacaacagctgtgttgacatgactcgtggaagctgtgaagaagctggtctcttactactaaatgtagtgagctaggagtggcttgggcatatttttcaatggatgaggtctggcaccctgagcaatttagggaggatttgatcttagttgagcagtttggctaggagaatactttgcagcatggctgtcagtctgtgggataactaccatgaagtaaattgaagaaggtgctggctgatagaggctgattcccaggttgagcatagtttttacacttgccattctttgcacatactgtactggttaatgagctgagcctggtgctcttcattgctcttcttcccatggagttaatgctatatacaatggctcagtgcccacaattctaccattcatttctgaaagtgctttagttgcttcctctggagaggagaaacatacacaaatcaaaccctttgttgtgacaaccatccttcataacctttgcattagtgattgtaccaagtggagaaagttctttccagagacattcatcaataccatcaagattttttgcataaatgttaacactttgttatctggtgatcctatactgcttgatcttttcaaatttgcacacaagttccatctgccattctacttctttctgagcttgaccaacatcaatttgttttccattgagcttctttctgttcatctcatctgcgcatctttatgcctttcaaagctgacaaatccaaaacctttgggttttccactttcattaaccactactttcacacttaagacagatcccaacttgccaaagagatctttaaggcacctaccatccatgtcttctccaaaaatcttcctgtaaacattggtgaactttttaactctgagttctgcttctcattgtttacaagacttaatccaacaaagactttgctgtcatttagaagcatccatttcattttttaatagaactttcagctgcttctgtgtctcaatatgtacaatgccatcacccttgaaaccattttcaccacaaagcacctaatgtgaaagtgatagagacaggaggcaaccaagggtcccccggtaaaaccccaccttcaagactaaaacagcctgaaggctgttagataaactggactgcgggtcctggttgaagccgccctttccccactgattctgaataatgcccacctgtgcactgggattacggggtggagcctcgggaagtttgtgcagtgtttattttttcaattactaaaaatgaattgttaaaatctctcactatgtttgtggatttttttattgctctttccagttctaattttggctttatttattttgagactacattattaggtatccacaattttataaaaattaagaaaaaattagaaaagtttagaaaaaagtgagaaaaatatagaaaaagatgtgacagaagcacacatgggctttatctggatgatctcgtcaggtttgtatcctggggaaggccttcacagcaagagatggaccagaggattgaggcaagggggccaccactcagaaggggaggagggcaaaggaactcctgagggaggaaaggatcagagaggaggctttcatgtctcagtgatatcactcagcagcatggcatggagtctatagttcacagagttccaaagagcagaagcagcctggggtctttacagcctagggtttatctgtggcaggcagattttggacacagtttcccagggcatgtaaatcaggcaggctctaaatgcctacaaatctgcatgtctgggcaatgtttaacacaattggatgtttaaaaatttgagtttgctgccagttggcttttgagctaatgggtctcagcttgctgtgaagaaataacctaggcaccaatacacagaggccatccttgtctcatttacattatatgtagtgactctatccttttttgctcacaattgttttactcatttcttttagatttgtttactgagattatttggtaggtaagatttcagtttattatagtttgctaattcattattcaaagtgctctactaaaaattttgctccatccttagtccccatttaaacaaaactgctgtgggtaaggtcatcattggccttcgtgttatcaaatctgttttattaacaaaattttaatgtttaaaattttcttatgtgtacacatttaatttatgtaattttaaaatggggtatcatacatggaatttggtagttttctttcctttttttgttcactactctgtttcttaatgctttattataacccacaaggcaatgtccccaatatttattatgtataactgatattcacataaaacatattttgtcattaagtgttacctttttccacataggtgttcctgttctttagtcttctattttctttctcttctgcttctctcccacccttcctgtctccatttatgtacgtatttaaatcatttaaaaaatcattttatgtgtcacttcaaagccttcagtgtaaattgagggtccaattttgttttctttgaattgtttattttcatatattaatttttcatctacatgtagattctcaattttttaccactcttgcttattcttaatacaattgtttttcttaattgatcaattccaatagttctatagtaggtgctgatatctgctgagaaaagttcctctcaatagtcttttttttggaacaattttctgactattcttctacatgaactttaagataatttaatccaattttaaaatgcttttgtgattctaatgtgaatttaattgaatttatatataattttagatttatgtttttacaagagttttgtttgtttttttgagacagggtcttactttgtcacccaggctggagtgcagtggtgggatctcagctcactgaagccccaacctcccacctcagcctcccaagtacctggttctataagcatgcgccaagcccaactagctttttgttttggttagagatagcgtttcacaatttgcccaagctggttttgaactcctgggctcaagcagtcctcctgcctcagcctcccaaagtgctgagattacaggtatgagccactgcgcctagcctcatgtgtttcttattcagtagcttttggtaacatttttatagtttttttcttatagatcttctacctttcttggtaaatttattttacctttattatttttgttattgtgaatatttttaccactagcatttcaaggtgcttattgctaatatattttgtattatcatcttatttccaaataacttaccaatattcctctttaaaatatttgaaatttctgtttttcctaatctctatgatttcctaggcatataatcatatccacaaaaagttttctatatatttatactgattatttcatttaaaaatcttgttacattcatggatcctccaagataatctttaataacaaataatgacagcagctattcctactggttccttgttttaattgaaacgttgtttcatgatttaaaatacttgttttgtaggcgtttcataaataacggttatgtttagacactttccttcaatttctattttactcaagaatcttcattaggagtggatgtttaatcttaacaatagccctctcagcatttattgatataatcacatttttctcttctttgatgtcatttatgtaattgtgttaatatacttaactgatattgaaatacccatgaattcctgaaatacagtgctctttgcatactgtattactcttttttgttgttgcaattattgataacagtgctgggtttttatttagaatattcattcatatgtatgtcagattggtctatagttttggtttttttgtttgtttttttgttttgagatggagacttgctctgtcacccaggctggagtgcagtggcgtgatctcggctcactgcaacctctgcctcctgggttcaagctgggattacaggcatgcaccaccatgccaggctaatttttgtatttttagtagagatggggtttcgccatattgtccaggctggtcttgaactcctgaccttaagtgatccacccaccttggcttcccaaagtgctgggattacaggtgtaagccactgcacctggcctacagttttgtcttatgtttatcaggttttcatattaatgctgcactgcctatgtgaaatgaattggtttttctttttaaaaaaaatttgggatactttaaataacattggaattatccttcttgcaaccctagtactttttaaattatggattttaaaaaatcactttacattctcttctttgtaactggtctattaacattttaaatttcttcttggattagttttggtcatttatatttttccagaaaattacccattttctctagattttccaatgtgttgctaaatagttgcatgcagcatttcaaagtgaatctttcttttttctttttcttttttttttttttttttttttttgagatggagtcttgctctgtggcccaggctggaatgcaatggcacaaccttggcgcactgcaacctctgcctcctggattcaagcgattcttccacctcagcctcccgagtagctgggattacaggcatccgccatcatgcccagctaatttttatatttttgtagagacgagttttcacgatgttggccaggctggtcttgaactcctgaccttaggcgatctgcccgccttggcctcccaaagtgctggaattaattacaggtgtgagccaccgcacctggccctcaaagagaatctttctaccttcatcttattttacttcttggtagcattctatagggttgaagattgtacttgtgagttttgagtttcttaatttgttgaatggatgtgattaatttatatctttagtgtgatcatgcagagaaatttatgagggatagtaatggaaaaattacaggaaatctgaaaatttaataaacttgacatttttattttctcactagtacagggttatctctaattatgaaatgtactacccttttctccttttctgtattattttggaaaattacagccttataatagagatcagaaatgtgttaacattatggctgatctatctgacaacagtgttctaagaaaacagtatcacaaatatactttctcaccatagttgttcaaaacagaagttttgtaagcgaagaatcaagcatttaaaccaaaggaaagttagagtgatgtcatctctggttgaaaaacatagtctttctgaacagattttcaatgtccttcaagaccataactaatataaaattaaacagtacaattgctaataatataagctgtacactttttatattaaagtgatgcttgctacaacatgactttactaaattggatttctgcaaaagataaaacaccaggcatggttgctcatgcctgcaatcccagcactttgggagtgctgaggcagggaggatcacttgagtccaggacttcgagaccagcctgggtaacacagtgagactctgtctcttagaaaaataaaaaattagccgggcatgatgaagcatgactgtagtctcagctacttgggaggctgaggtgggaggatcgcttgagcacaagaggctgaggctgcagtgagctacgatcatgcccccgcactccagcctgggtgacagggccagactttgtctcaaaatatatgaaagtagataaaattagtttacttgctgaacatgatcaaatatagcaagtttccagtaaaagactattaggacaaactatgttaacacaacctcagatgatgaagcatagttaaaacaaaacaaaacagctttgggcatattctatactccaacctctgtggtgcaaagggactatatggccaaccggatgttgagggagtcacagaactgctgcacatgtggtttttaaacatgatttttaattccccctaaagtggaagaagtcatctaacaaaatttattatgacttaaattgctactgctttatttagttttcctcaaactttaacaaaataaataattatgtagtaaattatagtcattaagcttgaaaaatgtttcaattgaatgggaaaacttcctgtgataaagcctccaatcatcgagtaagtcaatatattttacatataaattttccaacatgttaagcactaagcttttaactaaatagctaaggggaaattgttaccaccaaatgcaacacatatcctgcctttttgaataacacatactacttatcttgattccaattcatcactaaacatcacttgtataatttgatcacagtgatgtcctcagagacagttgtatgcagaatcctataaattgtctcaagctgctatgcctttaatgttcaccttaaatttatttttgttcccctgacttgctgtcagctgtcacattttgtagttcaccccttctgcaagacccttttgatacttgtgatttgttaagaagcagaaatcagataaccaaacttgttagaattcaatgtgaagtaagaataagtagactctgggtagctgctgcctctaccattaaaaattttttaaaaagaagactttttcaattaccacttaatttgaacttgacttacctagactactattagtcgatattagtttaacagagggaaaattgttaataaagtagatgtaatatgtaaacacatacatcatttccttgttctggatctatcaatgatttcatactttgactatatctaaattatctgcttttcccagccttcaaagtggtctttaattcacccctgctttccatgggttaaatttcctacaatgctgagatatttatattggtttcctcctgtcctacgaacttcgtactgatttctgccacaataaatttgattagatgaaaaaaaaaaaagactttttttttttttaagatagggtttcacttctgttgcccaggctggagtgcagtggcacaatcttggctcactgcaaccttggcctcctcaactcaagagattcttgtgcctcagcctcccgagtaactgggactactggtgcgccactgtgcccggctaatttttgcatttttctgtagagatgagatctcaccacgttgcccaagctggtatggtactcctgagatcaagtactccacccacctcagcctcccaaagtgctgagattacaggtgtgtcgtcactgcaccaagccaatgaggcactcatttctgaataaagtacaagcattagtaacatctcccctggtctctccagattggttatgctgccacaactgaattctaaatgggttaagtattatacaattacttaggcttctttggtaggtatcaaataaaacatccacctaaattcttaagaaccttgttaaatagtggcatttacaaactctctatacagattctgacagcacatttctattggaagactatggaatcacaatgaggaaggtagtactatatagatcagcagctggcttaattggcttcctgtaacttacttattaacaaattaggttacaaaatacaaagtcaacttaatgaatcatcgtatttggcattgaactcaaagctgaattgtgtgaattgtgaggtgctttccataattcaacttgcttaattacccatatgaatgaatcattcatacctcaagcctgctaacacttttggatacctgatgtttatgtaatagtgatgttcatttgctgagtaaggcatgagtagtttcctaggtaagcagaagcagtcctcaaaacaatcatgtgacgcagtaacaacagggctgtattttgaaggctctagaaaccgaagacatgtatttcaagagccaagttacttttttttttcttttaccacttatcctcaagttctacaagttacttacactgcatcaattcaaatacatttggttattagatgtctattttttaaagatggacaagataaaattgtgtaaatttacaagaagtaatgcaaactgctaataatgcttatttaaaggagttattaaagcaacagcttactaccaaccctacgcttctgaaaaatgtgcacaggtgggaaaagatatgggcatagctcttagcatattttaacaactgaaaatgtggcagggaaaaagtctttattctgagagtacaaccatcttacttttggggtattaaaattaccttttatgagataattcattttcaatgttatttgacaaaattcaaagttggtcattcattttagtctcctcatttttagtaaatttgcctcctgtaaaatctaagttatgggaaccactagaacatgtgtgaaaacaagttgctgtgagatgcagtgatagattttacaaaaagaagagcatttcatgaacacagatcaggatatccaaaattttggtgaggtggattttttccaaagtctggtgaccaactgtggaaaaataattggttaatctgacagtgaggccccttaacagtgttgaagaaaatgtatccgaaaaagcacccagagtcaaagaagtgagagcaatgctgtatttatcccccactgacatgtgaggaaagaacaattttggacatacaccttgtaaaacttctcaaaaaccagactacatttctaactctaaaatacatgctgctggtcatgaagatgttacgatcatataattgaacctactgacattacatgtaataaattaaaaacccaagtaccatgcttagtgtagtgtctggtacatacaagtgcccaataacaattagttttatttctagaaggattacctctgtctgcctcttgtacattcttataaaaagaaagcaaagtgaactgaataaactgtatcttaaatagactaaagaaaagcttttgtatttgtcttttctcaactaagcagtttccagagtgcctagcaaggtctcagaaacgcactcagtgaagggagttaaatggtaactcttttacaacagaaaggattccctacagagcccagcagaggcggagcactaggttgcccagcctggccttgaactcctgggctcttgtactgcagccatcctcccacctcaatcttcccagcagttgggactacaggcctgtgccatggcacctggctaaggatagctattatgagagtagtaatgtaagatgaaactaaaaagattcataatagtaggattaaaaagcacaaaaattttaaagattctccagtacgtttatttcacaaacttttttgtacagttgacccttacacacgggtttgaactgggtgggtacaattacgcgcatacttttttcaatcaaatgcaggtgaggtcacacagatcagcatttgtgcatgggatgtgaaactcatgtgtacggagggtcaactggagggccaacttttctacatatgggttctgcaagactttctgtgggacttgagtatgggcagattttggtatatgtgtggccctggaaccagtccctagcgtatacaagggatgactgtattttaatggtttatagtgttaaaaagagaaaaatatccacataaacacaattttgaacactgaactattttaatatgaattaatgtcttatgtttattaccaattatcttcaaattgcagcagcccatgagtttggttgtaagtgttcttgccattccaccccagctgtcactgagtcagtttaaaatacacacacacacacacacacacacacacagacacaagccttttgtaaagtaaacaaatcttttatactgtaaataactgttcctcaatggaactttttgtatccagtttacttcttttctaaagctgggatattcatattaaatacacaacaatctctataaagcaaagagtctatctctgtgaaaacacaagtaattcttgatggcaatatttttcttaattcacctaaccaaatgcagtttggaaggccaaaacgagaaaaaaacacttcagattatcaaaaccaaaagagatatgaaaaaataacatatttaacaatgtaggtgggaattttaaatacaagatcctgttgaaaatattgatattcaaagaaacaaacagctttggatccatagccacaatttaggttttcctagattaaaatcagaagtgattttattgttggaagatacattaattctttgaagtcagaataagaggcttgacaatttaatttctaattaagtgactgaatagacaaaggatcaaatacaaacagtagtgcaggaagaaaataaattggaagaaataattgttcaaccagtagtaataattaagaccaccattttaaaattttctatacacaaagaatgagaaaatattgttattattattatacttctttcttcttcagtattagtggacccacattatctcctgtcaattcattgtgtttattatgtgaaccatcgcaggcaggaaactaaaaagaaaaaagaattacaagtgttatttttaaaatatgattcattaggtagaaacatttgtgaaatgctctcagaaagaaagcatatcacttgctaaaaaaaatcagatcgttttcctgagtaatagttacattctacatccaactgaaccatattcaaaatctaacaatttaaacagttacttcattatttggtttagattttaaataaaaacctatgaatgagtccatatgagtgattaaaatagacaacaggtttaaaagggaatcgaataagttcttggtcatttgtggagcttaaaattcgagctcacctattgcttaattttaaaacaatggaatttaattcaaaataaattataattttttcttgctataaaactcatgcataccacacaatttttgaaaacaaaaatatattttaggctggtgcggtagtttacgcctgtaatcccaacactttcagaggcagaggtagacaaatcacttgacatcaggagttcaagactagtctggccaacatggtaaaacgccatctctaactaaaaatacaaaagttagctgggcgtggtgcatacgcctgtgtctcgggtacttgggaggctgaggtgggagaattccttgaacccaggaggtggaggttgcagtgagctgagatcatgccatcacacttcagcctgagtgacagagcaagactctgtcccccgcaaaaataaataaagaataaataaaaataaattttaaaaaattcactcataacccatccagatacacataataataattaacagtttggtatattttttcctatgcatttattgtgtgtattcttttttttcttttttttgtgagacagtctcaccttgtcgcccaggctggagtgcagtggcgtgatcttggctcactgcaacctctgcctcctgggttcaagtgattttcctgcctcagcctcctgagtagctgggactacaggtgcatgccaccacgcctggctaattttttttgtattttttagtagagacggggtttcaccatgttggtcaggctgttcttgaacccctgacctggtgatccacctgcctcggcctcccaaagtgctgggattacaggcgtgagccaccgcgcctggcctgcgtgtattcgttttttaaacaaaattgggatcacactgtaatatgctttcttactcatatcaggatctcatgtcattatatatcctttaaaaacatgatcattccctttttatcagatatttagtttataaaaattttgctattacaaaggatgctgtgatgagcaatactgtattaaaaacctcaaataatctatgatcaagtacaagaaacagattttgtcaactacttatagtacttatcactccaaactccttcccacattaaaaatcatctataattgaggctatcatttactacctcatattattaaagcagtttacatatatcatctcacttctcaaagatatgtaatgtggatgtatcaggttaaaacaaaccctgaagattagagattaaaaattaagtaacttgtccaaccaaactcatactgtgacaagtatatttgaccactatttactatgacaccaaagcttttttccattaaaccttaggtcctctctcaaagaatgtgtattttaaaatacatgttactctacataaatgccaaacattgcgaaggcattagatttttattcttctttgctgctccaacttttctaatgtaggtagtatctatcatgacatgaaaacttcaatttaggaatatggtctttcaataccaaatattacagaaaattctctcatcttaaagaacttcaaaactggggatttaagaggcgaaacaatcctagcactgcaaaattttagtgtacacgtaaacagacatcttaccgttttagaacgccaacacctacaataagctgctttagtaagacacaaatcttcaatgtttatttcattcactactttcggattttccttttgtattttaagattaatcaagctatccttctgttgtttcttcttcgggaggaatggacgaactgcaaggtagccaagaagtgcgagtacaccaaggaaaggcaataaccgaagccattctgaaactaaacatgtagatgtgtcagaatctgcagtgctcttggaaaagaattcaaaatagcatgtctagtttcatccttgagcttattctttgttactttttacattaattcctttttaatggatccataaaactgtgaataaataacacaataaagccagctctaccaaag

SEQ ID NO: 41 - DNA, 50177 bp, Homo sapiens
accccctctgtctcctccccgggcccggcgttcccgccccttctgtgcgcgcgtggaggccggggcggggcgggcgcagccggcgctgagcttgcagggccgctcccctcacccgcccccttcgagtccccgggcttcgccccacccggcccgtgggggagtatctgtcctgccgccttcgcccacgccctgcactccgggaccgtccctgcgcgctctgggcgcaccatggcccgcggggctgcgctggcgctgctgctcttcggcctgctgggtgttctggtcgccgccccgggtgagcgagcggagggatccgggttgggggacgcggagggcgcgggccgggactggggatccgcttgagatgcggcgttgggggcgccccgcggggacacccggagcctcctccctgcccggcaggacgcgctgtgcccacgggggcccaggcccggaggaggcgcccactttctccccaacgcttttcctggagccgttccagagagaaaagtcagcgtttgttgtcggagttgcaaactcttacatgtggggcggccttgggagaggtgcgtccgatttttcccaatctaggggaccttcttacagatctctctccctttgcatgagcccctcaccccaccccgttatctacccccagggtttggggacctgcgtcttcaggccgcgcgcggaggccgccctggagttgcctgtcacagccacgccctgcgtcccgggcctaaatttggaatcgctaggagcctgagacccgggtggtggggggaagggaaggaaaagttagaaaaaaactttgagccctgaaaatgttcaaaaatactctgtggatgcgggctccgggaatttcagcgcgtgctgtgcgccaagcaacacggggcgcagaaagaaacgtgtgcttaccaaattgtccatctgcggcggtggagaattcggaaaacagaaaaagtgggcagggaagaaagagccacggtcaccctcccacgccctaaaccgggcctatttctaattattactttaatcatgtttttctgtttccctccctttgaaacggaaacggagaccctgccggatgtggtatgttataaattcttttttcatgttataaattcttttttcaatggtcagtgcattttttgctcttcgtatgggcaggcttttaagtagaccggcttgcgggcagtgtggacttcaggacgggccttatcagggctggacgtatttaggaaggagacgcgggaacgcccggccctggggaggacggaggaggcccgatttgtgttgataggatctagctcagcctagagctgcggtgactaggccgggtctctatttttagggaggagttgctaatggatttacaccctctttaaaggggtcccgggtatcctagaaattgtgctttcacttggtagagattagagataatgaagcctgctccgtagaggaaaacttggaggactttccagcctgcaggggaggttccaagcagagcttcctgtttctcccttttcttcctaaatgtccttcttgcgggcaacctgtcaccacggacgggatggctctgtagggttttatcagctgcatttgttccccaggcacctgcagatgaacgggtttttcacttgtctctctgcgaatgcattccttcatccttcatgcctgccttccttcttttgcacctactgtgggcttggggtcagggaaatatatccaagggagtgctggtggcctaagaattcagtttcctggagaacagaggcatctgaacaggcagacgggagacagggccacagggacctttatagttccatcacgaaataactcaggggttcccagtggtaaatcttggtgaggggcttggctggattttgaagccctagggacagatttgccggctggtctggcgttccaggtcattggagcagagtgagtggaaagccttatattctctaagccccaaacaagtcgttgcacagtttttttgtttttgttggtggtggtggttttttttttttggacggagtttcactctgtcaccagtctggagtgtagtggcacgatgtcggctcattggcgttgcacagtttttaaacccacagcagtgttcatctggaactcctgattttggaagcagactgggcttaggaactccagctgctgatgctttgagtaaagggaagagtacctgtctatggggtgggtgggtagggaagagcagtgggataggggcataacaggggccaacctatccttccaattgcagaggagggcctggccgtcagcactgatggatctccttgagggacgcttctcaccccttctttgcagtctgaccctgctagagatggagacagaaacagcctgtcccaataatattaatacacgtttcatcgggaaagttgacttttgagttggtgatgctcagaacacactttcttatagcaacgtgcatcaggctgcaaaaccccgttgagcctgaagtaggttctcagactggtgctgatagctctggcctgatctcagagtgttggggaccctgtgttccttggttccttcataaattctcaggggtacaggtgggatgtggtgagggatggatggacagagggaggtgtatagaggaaaagaggaggcttcagctttgtagagagcaggatgtccccacagggcgacgttggccccgaggagacactttgtgatggttgcagacatttttggttgccaccctggggtgggacatcccaccatcctgcaatgggtggggcagcttagggaagctgctcagaatctttcaagggccaggacggcctccagcacaaagaattcatctggtcccaaatgccagtggtgttgagggtggaaaaccctgaggagggcttgggagttgcatgtatgcgctgattcagggctgcccctgcagttaggagcctgccgtcccgacagtagagtcgcacacatccgatgcatccctgctctctggcaaaggctgatttgccccaccccccggggcaacggcacagcggcctgtgcggtttgaaaaactccaaacatctacggaaccgacatctcttgaacaataccaggcctcttcaggattccctcgccccagtagagcaagtgtgggcttcgttgtttttttttttttttaactctctccagagctcttgtctcctgcccctgtgggtgtgtgtggaagttattaggagaatgtttctgggcagaggaagtgggttttatcatccagcgagtttgccttgattttccatcagcgcgtttggctctggtaaaagttgattgctttgcatttaactccctactttaggccgagcacggtgactcaggcctgtaaatcccagcactttgagaggccgagggccggtgggtcacatgaggccaagagttcgagaccagcctggccaacatggcaaaaccccgactctactaaaaatacaaaaattagccgggcgtggtggtgagcgcctataatcccagctactcaggaggctgaggcaggaaaatcacttcagcccgggaagcagaggttgcagtgagctgagatcgtgtcaccgcattatggcctgggtaacagagagagactcagtctcaaagaaaaaaaaaaacttcctgctttagctctttctcctttctctgtgtatgagacagagttttcatgtaaagacaaatacatgtctttacactttggagatactcaagtaaatgattgtttgtctggaaatcatttttcttcctgaaggtcctatggtgggtacatgctgtcatttagaaagaaatgcagctcatacaatacttttcccaattcagcatttaggaatcatggcgggatttcatggatactgtctggaatgttttcggactcagatatcttcccccggggaaatagacttctcagtagccacgtggaccttgtgctggttttcagtcctgctgaaaatgttctgagcactcttgttactttaggggaaaagaattacgtgtcctttgtgatttatagacacagtaagaaataagacctgtgtgtctctcggggtgcgaaggaggaaaagtcttttttttttgagatggaattttcctctgttgtccaggctggagtgaagtggcacgatctcagctcatggcaatctctccatctcaggttcaagcagttctcctgcctcagcctcccaattagctgggactacaggcatgcactgcatatctggctaatttttgtatgtttagtagagaaggggtttcactatgttgaccaggctgaaaaatatttttttgaggtggggtctctgttgcccagactggagtgcaggggtgcaatcagggctcactacagcctccacctcctgggctcaagcaatccttccacctcagcctctgtagtagctgggactacaagcacacaccactgtgcctggccacttttaaatttttttgtagagacagggtcttgctatgttgcccagactgaaaaaaaagtcttttttttttttttgagacagtgtctcactgtgtcacccaggctggagtgcaatggcaggatcttggctcactgcgacctgtgtctcccgggctcaggcaattctcctgcctcagacacctgaatagctgggaatacaggcacatgtcaccacacctggctattttttgtatttttagtagagacggtgtttcaccctgttggacaggctggcctcaaactcctggcctcaagtgatctgcccaccttggcctcccaaagtgctgggattacaggtgtgagccacctgaaaaatcattgtaaaaatcaactgtcctacattcttatttggaagtgactcctctaaccaaagacagggaaaaacaaaccaaactttattaacatgcgtttttcattgatacatgagagatacctagaaatgggtagttttcaaggaagtggcttggattctagctgctctagtaccctcaacaaagaacagtccatttttagagaattggcagagaaagacaaaggactttgagtcttcaggggcagcaacaaaatggcagagaaaggctggttattgaagcttgttcattctgagtcctgtgttccatgtcccaggcccatgtggattttctgctgtcttccgtgcttcacctctgttctcccagttggggaggtggggttcggattgcttgtgaatgtgggctcatcgttgctggtgtagctgcaggctgcaggctgtccagggcttgaggatttgctgatattctttcttttcttttctttttattttgagatgaagtctcgctctttttccccaggctggagtgcgatggtgcgatctcggctcactgcaacctctgcctcccaggttcaagcaattctcctgtctcagcctcctgagtacctgggattacaggtgcccgccaccacacctggctaatttttgtatttttttagtagaggtggagtttcaccatcttggccaggctggtttcgaactcctgacctcaggtgatccgcccgcctcggcctcctaaagtgtattcttttttgatttattcccagtctcttggctgaaacatggtagctcaccagcatttctactcccatttgtccaactgacggtatcttttcacatctctagagaccagaaggacttcctcttcttgaatttcctgttcagtattctttcttggcttggttccttggtgagttttgaggagatggtgcatgggtgtgtttttcggctttgttttagtatgactcagggttgccaccatgccttgtacggtctcctagtcatagtattaaagtttccgcttagcaggaaaccagaaacttcctttcttctcccccagagtcagattcaaaccagtgtttctcaagtgggctgtgaaagtagcttgcagccacccaccttgcaaagaagaaaattcaacagaggagaggagaaaatgcccacagggtacatggaaagccttgctaaagaagccgcatgggcaaagcttttgttccgctccctctgtcccggtgggctgggctgagatataatatatgtttgtcattgtggacggcagctggatgagtctgaaagcggttgcaaacccctttaattcactttgctttctcaactttgaatggtgtcgtgggctggggtgggtcccctgtttttgagaatcacctgaaagagtctgattttctgcatcttttcggggagtaaagctgttgctccaaagcgctgtttaaaagctgataatagtgtatctggttgagctaacagcccttcttgaggaggcagcagactggccagagggttctgcaggcattactcatcagcgacacctgagtttgcccaggtagcctgactcttgtttgtttctgctttgcctgaccctgcaaaattattgtccaaatgcaccctggcaagcattgatccacgaggggatgctgaccagaaggagctttcgtttctgcacgatggactggaacacgatggactggaatgatgacaagaataaacacactgcattgtcttttagggccaatggacttggaggcatagagattttataactactgccagaacccaaatattgccagtcggcctcttctgctgctgttgctagctgtcttcttctgggggaaatgggttgggttctaaatatgaattaacacagggctgtcttcgatgaattcagcacaaaatgttctcagcaattgaacactcggagagaagtgttaggcatttagtgcagactcatagaatagcaggacagggagggatttggatctgggcaagcaggagatggatatgaacatctgtcttttgagaccgtgccgaggtggcaatgaaggtagaggccccctgtgttgaggtctttactcaagaggctgtggtcctttgggactaacatagcatccgatagacagacaagatggacagctacagccacctatgggaagcggtttctactcttaaaccacaagcccctagacactcatcatatcataaacatatcaccgggcagtggcttgcaatctttttttttctttgtttctttttttttttttttttagacttgcccaggccggagtgcagtggcacgattgtagctcactgcagtcttgacctcctgggtgcaggtgaatctctcacctcagccttccaaggagctgggaccacaggcatgtgccaccctcagctaatttttaaaatctttttgtagaatcggagtctgactacattgcccaggctggtcttgaactcctgggctcaagcaaacctctcgcctcagcttcccaaagtgctggggttacaggcgtgagccaccatgctcagcctgcaatcattttttttgagacaggatctcactctgtcgcccaggctgaagtgcagtggtgtgatctcagctcactgcagcctcgaacccccaggctcaggtgacctgcccaccttagccttctgtgtagttgggactatgggcacatgccaccacactcaattaatttttaccttttttgtagatacagagttttgttctgtcgcccaggctggtggacatattttaatcctacagagtccaggctaaaaacacaccagtaactgtgatgcccatccctcctgcattcctgatttctgagtgatggtttcagacacaaacctgcttgaccaccctccagtagctcttgctgacctagatccgaggttctcagctttggccccattgcgggaagcttggaaacgtcactcttgcccagggttacctgggtagtctggtttatagacgtgttaggtgttttaatttttttttttttttgagacaagattttgctctgtcacccaggctggagtgcagtggtacagtcatagctcactgcagcctcaacctcctgggttcaagcagcccacctacctcagcctcgaaagaagctgggaccacaggtgcacctcaccatacccagctaatcttttctttctttttgtttttttcttttctttcctcttcttttcttttcttttgttttctcttctctcttttctttcttcttcttcttttttttagacagagtcttgctgtgttgcccaggctggagtgccttggtgcaatcttggctcactgcaacttccgcctccctggttcaagtgcctctcttgcctcagcctcctgagtagctggaactacaggcacgcaccaccacgcctggctaatttttgtatttttagtagagacgggatttcactatgttggccaggatggtctcgaactcctgacgtcgtgatctgcccacctcggcttcccaaagtgctgggattacaggtgtgagccaccgcgcccagccttttttttttttttttttttaaattacagagtctcactctgtcaccaggctggagtgcagcgatgcaatcttggctcgctgcaacctctgccacccaggttcaagtgattcttctgcctcagcctccctcaggcgtgagctggcacgcccagccaaatttttcattttttgtagagacagggtctccctatgttgcccagtttagtcctgaactcctgagttcaagccatccacctgccttggcctggcaaagtcttgggtttataggcgggagccactgcatcccgctattaggaatttttaaaaagcccctcggagggtcttcatgtgtggctgagttgtcaagaatcattgttattttactagatattctgtttcttccctcctacatgagatttcccatgaccgcctctcggatgtgaatgtctatgccatggattacatttttcaaagagcattcagtttgttatttcatcttcagcgagcccttaagatatttctcatgggccttttgtagataaagacactggggtcagagagttcaggagcttgctggtgatcacatggtcagcatggggaaaaatgcatgtggacatgagttctgttggtggtgagacgtgggcacaggggttgctgggcttgggagttggtggctgcgtgtgtgggctgaacagagctccccaggcacggccttgtggaccttgagggatgcctgccttcaccactagtgtgacttgaaggggaggagaatgtcctgaatcagtgatgggcattttgatatggaagagaactcccttgaatcctggtggtgaacttagaccagtcactgaggcctctccagctcctcagggtctccgtgttctaggtatccatgtgtccttccatccatttatccatccatttatgcatccatgcatccatccagccatgcatcctccttttatccatccatccatcaacccatcctcccattcatttacccatccatccgttcgtccatccatccatccatcaacccatcctcccattcatttacccatccatccattcatccatgcatccatccatccatgcgtgcatccatccatccatttatccatccatccatccatccatccgtcgtcccattcctttatccatccgttaatgcacctgtccatccatccatccattctccattcatctttccatccatgcatcatccatgcatccatccttttagttcatccagccactcatcaattgatacatccatctgtccaccatccactcatctatccatccattcacccatcctttcatcaatttacccatctaccatccatccatttatccgttcacccattcatctatccatctgtccatccatccacctatctgttcatccatccatccattcatctatccatccatccacctactcacccacccacccatccatccacccacccaaccatccatccacccaaccatccatccatacctccatccgtctacccacccactcatccacttaactacccatccatccacttatccatgcattcatccatccatccacctacctactcacccacctaaactcatctatccactcaaccatccatccacctatccacccttacctccatccatccccttactgcccatctttccactcatcccatccaactacccatccatccacccagctgtccacccaaccatccacccactcactaatttatccactcacccacgcatgcatccatccatccatccatccacccacccatttacccacccacccatccatccacttacctgcctgtccatccaccctcccagtccatggctctttcatgtattccttcagccagcataggttgaagttaaatgtactattggtgctatttgctgtggtccctgttttttgttctctgctttggaggtaacaaccagggcatcaatttgggcataaaagcaccattgtggatggaaggcctggatgtctggaggcacagagcagggactacacttgttcagggggtcagagagagttctcccaggaggggccctccctggacactgagcttccaagaatgagcagaggaaaccaggtgtaaggaagaggaagggcctcttctcagcctggtagacaagcagtaagagtgatgatggggcagctgcagttcatctcagactagaggagctgcaggggccagatggtgggcaacctctgttgccactgctgaggagtgcagatttaagctcccctgaagggtttgacgcagacagctgtgcggggacgcttaacctgcctaaggcccgtctttgggtaacagcatgcagaacaggtgggaggggctggggctatttttggcagagcgtggataagtcagtggagatagaagagaaggcacaagctattttaggagatattgaggaagttaaaatctgtaacaggtccctgcctgcagagttgaccacacgtttgcatcacatgggtaggctttaaaatatagatgcctgcatctcaccttggaaagtttctgatttaattagcctgggcatcaggacttaggaaaaccccacagatgtgtgtaatttgctgctggagttgagaactggggtgcggagctgtgctccttaaactgtaatgtgcttacagatcacctctggtaatacttgtgagaaagcgcttcaggtgggctagggagaggatcacggagggcttcctggagaaggtgacattctcccagggccttgaggggtgaatagacattttccaggttcagaaagaaggaatgggctttcatggccaggtagaggatccaatgaggcagacgaggggcccaaattctgtgaccccctacccctaccccacccccaggatgcccctgtatcagtcccatggtgtaacaaccaaattcacaagatgctgcagaggggaagagattttaaattttctgagaaagacaatgatatattttggacaccatgagaaatactgttattaacttgttttaacctaggtacacgcaatcttcatcattcagtgattctgtatttgtgacttgcctgcttactaaaatgtatttgtcatccccacatcaatattcctggcatttaatttttttattttaaactttcattttaggttcggggatacatgtgaaagtttgtgacttaggtaaacatgtgtcatgaggttttgttgtacagattatttcatcactgtggtattaaacccaggacccaatagttaccctttatgttcttctccttaccctcggctattttgttcatgcacagaacggcaaaaaaattgaactttttttttttattttttttggatggagtctccctctttcgccaaggctggagtgcagtggcgtgatcttggctcactgtaacctccgcctcctgtgttcaagtgattctcctgcctcagcctcccgagtagctgggattacaggcatgggattacagccaccacgcctggctaatttttgtatttttagtagagacggggtttcaccgtgttggccaggctgctctcaaactcctggcctcaagtgattcacccgcctgggcttcccaaaatgctgggattacaggcgtgagccaccacacctggccagaattgagcttctcaatagcacatgttctcagctgaggttcaacaaagccagaccctgccttctcgggccagcgcgtactgtcaacagggttctttgcaaggtctatttggtgtcccgtgttttgtgttttcgtgctttttgtcagtgattttgcgctttcaaatatccccaagtcggtgctgacatgctacctagcgtccctaagtacaggaaagctggcatggtctcacggggaaaatacacatttgatgagcgtcatttaggcacgagttatagtgctgttggcttcgagatcaatgtgagtgactccacaatgtctattcactgcggtgtctttaaacagaaacccacataaaacgcgcttaggtagtgattggttcatgacctctgggaacgtagtcctgtatttacgtgggagcaatagttcactattcgctaattcagtgttcgctgagactttataaaacgtaactgctttgaataacaaagctgtaattaacaaaccgagctgttaagtgtgtgtgtgtgtgtgtgtgtgtgtgtgtgtgtgtgtgtgtgtgttggcctcacatcattttacagagacacacagggctctgtgaactgctaatagttgggaccggcggaggggttatttcaagctagtccaaaactgcagggcagagaccactttgaaaggagatcagcagtcggggagtggctgggatgaagttggaaaaagtgctgaggcccctaagtcagtttccggtgtttccacgttagccttggggggtgatcactcagtttcctgtagggatgggatctgggctggcatctgcctgtggaaggggtgacagggacggagagcagggaaccccgagcagccctgccttgctgttgtctgagcctcagaactcctgaaggcggggtccttcagcatcaccctggagtttgttaaaaatgcaggctcatgagcctcaccccagaccacagaacgaaaatgtctgggggtgagacccaggattccacgtctccccaggtccctcgcagggcgattctgagaactgccggtgtgaggcgtgctcagcccagcccaaacattcacaccattctttggcctcttgtaaaacttggcgtagctcaggggacgttcccagagttatggcacacgaacaaaagaaagtttcccacttcttaccaaacatattgtaaaattacaggaaagagcttgttctttcacgtctatacccttgtgccgtcgtcctagttaggatgaagccgagatgttaccttgtaccttaggccaccgcagacaaggaagtatatgcagtttaaccacctgcatataatctttttcttttttcttttctttctttttttttgagacaaagtctcattctatcacccaggctagtgtgcagtggcacagtctcggctcactgcaacctccatctgccaagttcaagagattcttgtgcctcagcctcccaagtagctggaactacaggtacacgccaccatgcccagctaatttagcagagatggggttttgccttgttggccaggctggtctcgaacccctgacctcagtgatctgcctgcctcaacctcccaaagtgttgggattacaggagtgagccaccatgccctgcctattttttggaggcagggtctctctctgttgcccaggctggagtgccgtggtgcagtgtcagctccctgcaatctcaacctccacaagcgcaggccatcctcccgcctcagcctcccaagtagctgggaccatgggagtgcgtcacaacacctgtctaatttttgcattttttgtagagacggggtttcatcatgttgcccaggctgctgttgaactcctgggctcaagcaatcctcccaccttggcctcccaaagtgttgggattataggcgtgagccactgtacccggccacctatgtataattttcaagctaagaagacagagagacgagtttaactattgctacagacatgaagcccttccctttccatagtttgctagcagagagtgtttccagggcccggcggccactatcacccactgcgttcatagctttccatggggtgaacagattgcgctggactcagcggttaaatctaaagtgtaggatgtttggtgaactcggagttccttgcacttgtctgtgatctggcacattgtgttttctgtactcagatatgcagtcactggcacacatcctgttactgacgggaagctggacccagcactggagtatttctgagactatgacactctggtgtattcctgaaactatttatgacactattaagctcttttctgtaattttacaatatgtttggtaagatctcagcgccagatttttttaaatgatgtgtttatttcttttaattgacaaatacacattgtatgtgtttatgcggttgcacatggtgtcttgatgtatgtatccatggtgagatggatttaaatatgcatgacctcacagactttgcagcacttttttgtgtgtggtgagaacacttattcagaatgggctcctttagtcgttttcaaatattcaagccattgttactaattgcagtcgccatggtgtctctgagctttcctgaagttatttgtcctgtctcatggacgctttgtgccctgtgaccgatcgtctgcccggtgttaaatgacacatcttgaaaaagaggacaatacttccagagcgattcggttttatagcaacagaaaagtaagggtgttttgaccatttgaataaaatagtaaaatgaaatgtatcagctgcctcctgctattcccacacaggaggacttccggtgcttgctccaatgtggaggcattttctcttgcagcattctgagctacaattatctctaggctggggacccttcccgaggccccccaaacctggaatgaaagtttttagggtcagaccatgtgactggttccactcgacctccaaaacgttaaaaagaaaaaaaaaaaaagagccgggcgcggtggctcacgcctgtcatcccagcactttgggaggccgaggcgggcggatcacgagttcaggagatcgagaccatcctggctaccacggtgaaacccagtctctactaaaaatacaaaaaaatcagccgggcgtggtggtgggcacctgtagtcccagctactcgggaggctgaggcagcagaatggtgtgaacccgggaggcatagcttgcagtgagccaaaatcgggccaccgcactccagcctgggtgacacagagacactctgtctcaaaaaaaggaaaaaacaaaaaacaaaaaacgctttgcctttgcttggcatcagaggactcagcagcaagtaaagagcacacacgtgccctctgcaccacctcctcctccttttctacaatgtcctgaaagtttcgtgtttagtgggctttggaaaagggtgtggaaaaccagcaggagcagatgagtactggagtggccagcagcaggtgtgaacaccctggggtgatgctggggctgagtgaattggacatttttcagcagggacacccaggccagtggcgggtcttcatcctcccacccttaatggagatgaacggcattattgagaaagctgcaggcacacacagagcactgcttaaatgatgtccctggctgctgctgttactatgtaatgattgtgttattcttatgaaaatctgaaagttacaggaatcttggaactgcctaattttttttaattaattaattaatttatttcgagacagagtctcactctgtcgcccaggctggagtgcagtggtgcgatctcggctcactgcaacctccacctcccgggttcaagcgattctcctgcctcagcctcccaagtaactgggactacgggcgtgcaccaccacgcctggctcatttttaattttatgtgaaacacctgaatgatgtgatgatggggtttaagataacccaagtgttcgggcgcggcggctcacatctgtaatccctgcactttgggaggccaaggcaggcagatcacttgatgcccggagtttgagaccagcctggccaacatggcgaaactccatctctactaaaaacacaagaattagctggatgtggtggcacatgcccatagtcccagctactggggaagctgaggaaggagaatcacttgaacccaggaggtggaggttgcagtgagttgagatcatgctactgtactctagcctgggcaacagagcaaaactctgcctcaaaagaaaagaaaagaaaagaaaaaaacagcaaaaagagaacccaggtactggctctcctcctgcgtttgccccggttgagtgcattcctgcattagtgcaagccttagtcacgttgcagaggaactcacacaccccatgtggcctcggggacttcactctgggttcgtcctgttttttgagttgcctggctgatgagaaaaagtaaacatggtttgaatcagtagaaagtgtcttgtcagactgactcatgccatctgtcgtccgttccgccttgccctgatgagccattaccctgtcccggaaacatctggagctttgagagggccgggtggaaacagcagtggcagttgggggttctgctgagggtctggtctctttgcaaatttgcagagaggctgaatgccgtaaacgtgcaacacaggcacctgagttctccaccaggctccttctctgagggcatggttgcagctcttgctgggtgggttttgttggtgttttcttcacatttgtagccccggaggtcgttttcaggagcaaaaaggcaagtgggggtgtctgctgtgagcccgcaatttcctgcctaccacctgaaagctcagggaatgtgatgaattgggagatgaatcctaggcaataaagagagcagtggactgagttaggagacgatagcttcatttacagagattcctttactgactgatgatcattgattgggtttgcttccccatgaggcttcaagccaatagcacgtgcatttgcatccatttatatacacctgggggactgccttcctcacacacacctgggggactgcctccctcacacacacctggggaactgcatcccttcacatacatagggaactgtgtccctcacacacctggaagattagcctcagaggtgtctgcagtaccagattccaccagggagtgaacgtctgattatgggtgattcagggtgcccacgtctatatgaaatcgagagcgggtcacctccctttcctccctactctctgtggggtggtgtttggggagctgtcttaagtgttagtcacccgaggagaaaatggtgagggtgggactctgtatctgggagaaaggagaccttggaggcaggggacagactgacagagccttgagcgatggaagctgaggtcgagggcccaaggtcgatgatagaatgcttggggttgtctctcctctggtgtccttgtccttcaggcatcctggagtgacattgaaattgtttcaattaaaaactgtagaaacagcacagagataagaatggaagacaagctccaagtgcggggctgaggcgagttctccaaggactagggctaagggcagagggtgggagaaggggagaagggcgtgaggggcatactgtgtcctttgccacccactctcagacttgttgtcttggacctccgtcggctgagcttggggtccggggagcagtgggtttggacactcagtggtgacgtcagccgtagtcctgaagcagaggggaagttggcaatccaggcttgcctgggggtgacactggtggcgggagggcctgtgccctcccctgtaactgggtttgtgtggggtccatgggggcattggggtcagtggaaggaacatgaagtgagccagagcatcgtcactgtggcctctgagggcaggtggagcaagaaaaggaggaagcttctaagtgacacctggtcccagctcagtggctatgaccagggaagtcatgtggaggaaaaggctggtggactctgagggtgatggaggaggatgggaggggcaagctaggctggggaggtggcaggccatggacacacaccagacagacacacatgtgcatgcacacatacacaggcacatacatgcatgcacactcatgccatgcatatatgcatgcatgcacacgtgtgcacccacacagcaagtcacatgtgcacgtgagcacacatgaaaacacacaagcacatgcacatactcctgcagtgcacatgcacacccatatatgcatgcacacaggtgtgtgctcagatagcaccctcacacatatgcacacaagcacacaggcaaacacgcagacacatgaacaaatgcacatatatattcatgcagtgcacttgtgcacatatacacatgcaaacaggtgtgcattcagcacactcacaatgcacatgaaaacacgtgtgcacacacatgcagtgcaatacatatatgcatgcacatgtgtgcccacaccatacacccacacatacgtgcaggagcacacacgtgcacacacagaaaccacatgaatgcatgagcacgcgtatatgaaatacacatgtacacatgagcacatccacacgcgcacatgcatgaacatagacacacacatgcatgtacatagacacgcacatgcatgtacatagacatgcacacgtatacccaggccctgcattggaaaaaatccaaaatgtggcttggttgcaaagagcacatgaagagctgttgaatgcagaggtgcccagcaagaagcatggacctaaacccgaaggtggttgggggaagcttggggacacctgggtgggcaaatggcccccctgaggcccagggacagatgcaaaaacccagcaagccaggagggtctttgaaaaaaaaaatgtgtaccacatgtgacatttcccatgtgagggaagcatcgagatcatactgtgttttccctgtgccctgcgattttgcagctgacatgccctttctgtggaaatatatagcagtcctcatgctaggattgcgtgttctgtgtcaggcagctgggcatgggagtgcagggtgtggggtggaacctgggaggagagttctagttttaccactgtgttccggccgtggggtgtcctggggaatggaggccacctcctgacactggagtttcctgggttctgctgtgagcgaggagtgggagaagacaagactctggtcttagaaaccttccgagtctcgtacgcccttgactgccgtttctgagtatttcctgaagcttgggaaggatgagtcactttaaggggattgtcctatgttgctttgttttgtttctttagtgacggtgtctatgatcatcttctgtttatgagggtgaaattacagaaataagaagggttacacttaaaataatatctgtactttactttcacgtgtggggtttttttttgtcattgctgctgcttttttttctttaacattctgacagttctgtctgcttattattaagtcttcctacctttctaaagagaatgtctttcttgctaaagaatacattatggactcttggaatctctttgttggggtggagggggtggggacttgccctgacttgctgggaatgcccatagggtttagaagtcacgtctaccgctgaggcactaacaaaggtaagccttcaaggaagcactgtcatttccggggaagagagttttgaggaaattgaaacagttacgaattgatctagcagtccctctactaatgtatctacatatgaagatatgtagagatgactttttttttttttttttttttgagatggagtctccctctgtcacccaggctggagtgcagtggcatgatctctgctcactgcaacctctacttcccggattcaagcgattttcctgcctcagcctcctgagtagctgggattacatgcgcatatcaccacgcctggccaatttttttgtatttatagtagagacggggtttcaccatgttggttgggctggtctcgaactcctgacctcgtgatcctctcaccttggcctcccaaagtgctgagattacaggtgtgagccaccgcacccggccccagagatgacttctaaaccttcagggtattcccagcaagtcagggcaagtctatatatatataatatatatatgtgtatatatatatttgtataaatatataattcgtatatatagtatgtatatatagtatatatagtatgtatgtatatggtgtgtatatatgtagtgtgtgtatacatagtatgtgtatatacagtatgtatgtatatagtatgtgtatatatagtatgtgtgtgtattatatatatatatagtatgtgtatgtgtgtatatatatatatgtttatttgggataaggaaaggaaatcagtatgtcaaagagacactcccctcccatgtttattgcagcaccattcggagtagccaagacatgcagtcaatggaagagcccatcaagggatgaatgcagaaagaaaatgtgctatatcaactctgtacattcactaaaagccattcatttgcacagtgagaataagtgcctttcatgctatgtaaactatgcctcaataaagctattaaatgaacaaagaaaatagggtatattcacaatggaatggtattcagctttaaaaaagaaggaggttggctgggtgcggtggctcatgcctgtcatcctagcactttgggaggctgaggcaggtggatcacctgaggtcaggagttcaagaccagcctggccaacatggtgaaaccccgtctctagtaaaaatacaaaaaattagctgggcatgatgggcgggcgcctatagtcccagctactcaggaggctgaggcaggagaattgcttgaacccaggaggcggaggttgtagtgagccaagatcatcgcactccagcttgggcaacagagtgagactctgtctcaaaaagaaaaaagaaggaagtcctgccatttgcaacaacatggatggaactggaggacatgatgttaagtgcagtaagccgagcacagaaagacaaataccgtctgacccaaacacgcttacgtggaatctaaaaccactgaactcacagaagcagagtggaatggcggtgaccaaggggttgggagtgaggggtgggggaaatggggaaatgatgggtaaagggtacaacatttccatcagataggaagggataagttcaggggtctactgtactcagggtgactgtggttagtaagaatgcgttgcatacttgaaaatgcctaagacagtagctttgaactgtttgcaccacaaataaataggcgaggtaagatgtaaataaagaaaaaaaatacttcaaaaaatacaattacagatttctatggaaacatatgaacatgagtgcatatatatatttatatgtgcgtgtgtctgtacctgccttatggtttattctggatcagtaggatcctcccttgctaccgtctaaagatctgccgcatgctgcaggaggagctgtaattgcatttatgatgtctggcaagtgtcctgttgtggaaacagccatttcagggctctgaggttgtggaaacgactccactctggttgccggcatggggcccacagagctgttccgagcgttttgtctactttctacttattgttgacacacacagaaacacacacgcagccatgagtacacacacacacagacatacaagcagacgtggacacacctacctgtatgtacatactcaaaacacaccttcacactatactcacctacccatacacacacgtgcacacaactacatgtgtgcacacaaacacatgcatacatgcacctatgcatatgcacacgtggaaacacacctgcacactacacacacctacacatacacacacaaacccacaaatgcacacacccacacaggcacaaacacacaaatgcacacacccacacatgcacaaacacacctacacacataaacatattgacacatgcacacatgcacatgaaaaacacatatacacactacatccgcctacacatacacacacaaacccacatatacatgcacctacacacatgcacacataacacctacacacatgcatacagaacccacacatacatgcatccataggcacacagaaacacacctacacactgtgcacacctacatatgcacacacaaacccacatgaacatgcactgacacatatgcacacaaaaaacacactacacacacagaaacccacaaaatacacctccacacttacacaaaacacgcctacacatatgcacatacacaaacccacacatacatgcacctgcctatatgcacccacaacacatacacatatgcacacacagaactcacctacacaccccatacatgcacacaaaacccacaaatacatacatgtgcactgcaaatgcccaaatatacatgcacactcacacacacatacccctgtgacatatgcatgcacgcttcatttatacatgcaggagcatagcctggtcgtttgcacctgttgtggaactggacacacttccggtgttcacagggctcctgcgggttgttcttggacccctcgccacccaccgccaggtgcttcctgacggttgagagatgttgtatgcctttggtgctgaggagtggggacgctggatgttgacgattatcctaactcttcctccagttgaccaaacagtccaagtcgacttttccaaattttcctgaatttggcttttcttcagtgcgccagagatggccagccacgttgaagtagcattgaaattgttgtaattaaagactgtagaaacagggtagcctatcaataattcagcatgccagtttcctcattccgtgggattccatgagatttttttttaatgcataatgcacgtgtctttctgggttgtctagtgtttctactatattttggtttgtaattacaggaaagttgccaataaaaaagggagaattttgttccccatgttgttttcagtacatattcaaaattgttattcatctgtttgaaaggaacgacctgttaagaataatacacaaaatgatcgtgtttttacactattttaatttctactaagcttgaaggtcatcatttatttaaaacctaggctaacatattcttacttttaggcatggaagtgaatatttagaatgagaagagaaatcacgcaccttgtaaatttttttaagttgctgttttaaatatcacaaaaagaaaaatcgcatatcttttttatctctataatattcaaatttatttttatttttcttgtttctaagttgactctttttttctctcttagatggtggtttcgatttatccgatgcccttcctggtgagtatcaacatcattttttaaaatcccgtcaatattttatgttaacatagtatatacaggcatatcccagccatttccagctaggttctagaccaccgcaataacaggagtcatagcaatttttggcttcccagtacatataaatgttatgtttactctcaactgtagtctattaagtatgcaatagcattacctctaaaaacagtatactccaattgaaaataccttattgctaaaaaatgcagatacagagacaggaagtggggcacgtgctgttggaaaaaatgatgccgagagtctggcttgccacagggttgctgcaggccttccgtttgtaaaacacacagtatttgcaaagcaccttaagacaaagtgcagtgaaggaggtccgcctgtatgtgtccacctgccttattataaaaactagactcatagatgacgaggaaaagcaagatgcccttgttaagataaatgaaccaccctggtggaataattcacagtcctgtgatggtcagaggccgagcaaaaacttgccaggtccttggggaggggtctagaggaggtgagcaaatggaggtccccaggagagaggggcatccagtgctggcatcctccctctcgaaatcggcacccgctgtctccatggggccactccttccttcttctgcagctcttcctgtctcccgctcctcacccagagccctcggtgaagggcatgggaaaaggaattgaaggaattccgtcttatcactctatcagcttctgggtcttgtcatccctttgtatttgttttccggggctgccataaaaaggtgccaccaactgggggcttaaaccacagggatttatcatcttccagacctggacaacagaagtctgagatcaaggtgtagacagacccatgctccctctaggggctctaggggagggtccttcctgcctcttgcggcttccgggagctccaggtgtccctggacttgtggccgcatcactccagtctctgcctccttctccgtggggcctcctcctctgtgtctgtgtctccttttctttgtcttacaaggatacttgtcattgggtttagggccactctactccaggattatctaatctcaagatccttctcttaagcacatctgcaaagaccctatttccaaataaagtctcattaccaggttttaggctttaggatgtagatatatcttttgcggggaccactgctcaatccactgcagttatatccagttctttttggtggctctaggggaggatccttcctgcttctcccagcttttgagggcttcacgtgtccctgtgcttgtggctgcatcactgtaggctctgcctttgtgaacgctggtctcttccctgtgtctccatgtatctaaatttccttcctataagggcaccagtcattaggacctatcctaatctattataacctcatcttaactgattacaactgcaaagaccctgtttccaagtaagatcacctattgaggtttggggtgggtgtggatcttggaggaatgcttttcaacccaggacagccctcttcattttttttttttttttttccgagatggagtctctctctgtcacccaggctggagtgcagtggcacgatctcggctcactgcaacctctgcctcccgggttcaagtgattctcctgcctctgcctcccgagtaactgggattacaggcatgcaccaccatgcctagctagtttttgtattttcagtacagacggggtttcataatgttggtcaggctggtttcgaactcctgaccttgtgatctgcccgccttggcctcccaaagtgctgggatgacaggcatgagccactgagcccagccaccctcttcacttttttatgttttacttttttttttctgagacactgtctcgctgtgttgctcaggttggagtgcagtgttgggatcttggctcactgcagccttgaccgtctgggctcaagcagtcctcccacctcagcctgctgagtagctgggactacaggcatgtgccacctcacctggtacagtgagcaacacggggtctcactgtgttgctcagattggagtgccacggtgggatcttgtctcactacagccttgaccatgtgggttcgagcaatcctcccacctcagcctcccaaagtgctgaggcgtgagaggattgcagacacgagccactgcacctcgccagcttttaattttatgtcctgtggtgcagtgcagatggtttgagcggaaacagtgctgatggggatcatctctttcctgaccacctaccccttcttggcccttgggaacaaccattccctgcagtgggaggtgcccttagtcttacagcctccacctgatttgcctgattggcttccattctcagagggggcagcctaggcagaggcctgacggggccaaaagtgtgtttcatatgagaaatgtgaacagcctttcagccatcaatccggtgtctctccttctcatgcatagatctcgggctctgaaaagggcagtttttctcctaactttgccattctcctgccttcctggcttatgtctcagtcatagtcccattcaacgtcaagaagtggagaagggctgggcacggtggctcaagcctgtcatcccagcactttgggaggacgaggtgggtggatcacctgaggtcaggagttcgagaccaacctggccaacgtggtgaaaccccatctctgctaaaaatacaaaaaattagccgggagtgatggcatgcacctgtaagcccagctactcgggaggctgaggcaggagaatcgcttgaacccaggaggcagaggttgtggtgaacggagaccacaccattgcactccagcttgggtaacagagcaagacttggtctcaaaaaaaaaaaaaaaagaagtggagaaggggctcctggtctctgtggaaaccatggccggtagcagcctctgtgtctgtcttctgggctcaagagtcgttgtataaacctcagctcggtgtgggcaggtgagaaaaaacaatgctaaaaacattctccgactgtttccaagaaaatgaaacatccttaaccacaaaagagttgacacttgttttcccagctgcaacttttactaactgaaatatcttatctctttagacaatgaaaacaagaaacccactgcaatccccaagaaacccagtgctggtgagaagggcttcttcctagtatgcaaagaaaaagagcaaatcattttctcggacagcaggacgggacttaggcaactagaaagaagacagaagtgatttgagtgctccggctggagtctggttaatagttaatactggaattgtgttatgatgttacatttcatgtagtgattccagtaaaagaatggttgctgatgtgaaatgtttcggggccatttggacaacatctctgtgtgcttttattctaagggtctgagttactctgtctttagattttcttccctttttttttttttttttttttgagatggcgtttcattcttgtctcccaggctggagtgcagtggtgtgatcttggctcactgcaacctccacctcccgggttcagtgattctcctgcctcagatgcctcagtagctgggactgcaggcaccagccaccacacctggttaattgttgtatttttagtcgagacgaggtttcactatgtcggccaggctggtcttgaactcctgacttcaggcaatctgcctcccaaagtgctgggattacagcggtgagccaccatgcacggcctgtgtctttagatttcaacttcctaggagagagagcatttggtgctgagatctcccccatgatgaccaacaagtgaactcatctctcaacctgtgggcacacacctcatttgttctcagtgcttgctgttctttctttctttttttttttttttttgagacggagtctcgctctgtcgcccaggctggagtgcagtggcgcaatctcggctcactgcaagctccgcttcctgggttcacaccattcttctgcctcagcctcccaagtagctgggactacaggcagcggccaccacgcccagctaatttttttgtatttttagtagagacggggtttcaccatgttagccaggatggtctcgatctcctgaccttgtgatccacgcgccttggcctcccaaagtgctgggattacgggcatgagccaccacacccagccctcaatgctgttctttcaaacaaaagtcagaaacgaggtccacgtgatggaattgcccaagggtcaaccccactggcggataaacagagtaaaaatgatgctaaaacttatggcatcagtgtcttacagctaagacactgtcttgtcttagcacttctgagttttctaatataaaacattaatagctccacttcattattgggcttcctgtctagagtgtcagctcatgagcaaagggaccctgtgtccccagatccttgaactaagcaatcatgcagatagcaccaatgagtaggtgttgagcgtctgaatttatactatcatagtctccttgaggaagggactggaaattcccatatgtcactcaggatggctcagtacatgctgttgggtggatgccagcaaccattcctccatcttagttgggttttcaaaatcattcttcatactagaagacaagatctgaggccatggtgaactgtcacatcagttgcggagcacatatgggttgctagagccatgttttagacaccctctagcctaaatctgatcacagtcatctgtccccttctcttagggtctacctttccaaagttgttagggacctgggaggagaggatgatgggatggggagtcaacaggagaaaatcatgtgcaggcagaattggaatttcaacttggtccaggcaacacaattcatttataaattactttatttctctctctctctccccactgcctctcctctgagagcttctctcctagctttttatctgtctctgtctctctgttttttcctctttttatctgagagaatagtgatgtaaaaatggtcaggaattcactttttctaatgagatcctggtcaagctgatattcagaaaagtatttaggaatgtggggccgtggtgtgtttttgatctgttcacgaggtcattccttcctcgtttctctctggaatttggtattaactgctctttcccctcttttaggggatgactttgacttaggagatgctgttgttgatggagaaaatggtgagtattttcctttaatctcttctgctgctgatctgcttattatcacccaattatgatcatttcagagagaattctcccatttaaattataaagggaaccagttttcacagtggaaacctagggaataggtgtgtcggtttgttcttgctgttgtcgttgggtttttctttacaaccagtacgtgtgcttttattttaaaactcttacagtctttggaaggacatgagacaaatgtgcctaccctggccagggctggcttcaccagcatgtgacctgtgcagtggcacaggaccccatggcatgttggtttggcatgggaaccatactggtttactgctctgttgccgccatcttggaatacttaagaaaatttgaaaaatgggtcccacctttttattttggccctagaaattctgtagctggtgtggacacccgctttaatttttattaaacatagttgacattaagaactgtggctgaaagttgatgggaggaaactggcaggagactgtgtgtgtacaggtatccccaccaggacaaaggccaaggtccaatttctgttcagggaaccatctgtgtgtaaactgatgtttcattttctttactgcaaggcacttaaaattgcaactctcatctttcacaaacagacgacccacgaccaccgaacccacccaaaccgatgccaaatccaaaccccaaccaccctagttcctccggtaagagtctctgaccctgtgggatgtcttcatgttgttcagaattcagcgatatttatgtcagctgagaggaggtgatttcagatgagtgtgtgcttactgttgactgcctgtgcagtgtaatgcccatgttcatgtaatggaaaatgtacatttcaaaaatatatatttagcttggattttatttttagtttgcttttttttttttttttttttttgagacagagtcttgttctgtcacccaggctggagtgcagtggtgccatcttggctcactgcaacctccacctactgggttcaagtgattctcctgcatcagcctcctgagtagctggaattacaggcacacactgccatgcccggctaatttttgtatttttagtagagacagggttttgccatgttggccaggctggtcttgaactcctgacctcaagtgatccacccaccttggcctcccaaaagtgctgggatgacaggtgtgagccactgtgcctggactagtttgctacttttgtttccaagttccatcttatggaacttctaaaaaattgcatacaataatttaaatgtagacttgataaagagaaaagtattggcatacacattccttgtggagaagctagtgtgttttaaatctttctgcccttaaatatttaagtcagtttttctgacatatcacagcattttcagcgtaattcgaatagcaccagttttttttttttagctgaatggttgtcgaaagtttatatgtttaggtttttttgtttacatatttaatttttaacacagaagaatattaatgatgtccatatcttgttgacattttgatggctatttgtgctagtattttatatatcttttttttttcttttttgagacagggtctcactctgttgtccaggctagagtacagtgctgtgatcatattaaacataagagcataccacagcctccaactcctgggctagagagatccccctgcctcagcctttcaagtagctggggctacaggcacacagcatcgtgaccagttagttttttcattttttgtagaggtggggtctcagtatgttgcccaggctggtctgaaactcctggcctcaagcagtcctcttgcctcagcatcccaaatctctgagattacaggcacgagtcacctcacccagcctatatattaatctaaatgaaataaattttaaataaagttccaagtcttttgtttgtactgcattgtaacattactttttgcttactgatagtccatgaacattttttcatgtcatgtaatcatttctatcgtatgagttttactgataatcatgtactattacatactacatatataattatattcttcctgtaactaatccctaattctgaaaatgttatgtttcttctggcattttagaattatgaattaacaaagcaaatctgagtcaactccatgcgctatttttattcctttgaagacatttctagcattcaaatagtttagatcaacgtatatgagtactttcgtagcttttgacctggttgttaatttgctgcagatttttaccaatttattttgatgccaggggtgtgtgcaaatgtccctgtcttcacaccatctccaatattagttatcacctaggaaacctttgcaaatagtgtgaaattttctatcaactttctcctggtttcatgactttacttttaaaattaaaaaaaaaaaacaaacctgcatcaattggccgtggatacttcttattttgtgtattgtatgctttgccttttattcttacattctgatatgacattattgatttataagccttcttcatttatttacagacataaatattgccagcatgcaatattatgctcacgtttttccactttatttatggttttttgttttgttttgttttgagactgagtttagctcttcttgcccaggctggagtgcagtggtgccatcttggctcactgcaacctccacctccagggttcaagtgattctcctgcctcagcctcccgagtagctgggattacatgtgcctgtcaccacatccagctaatttttatattcttagtggagatggggtttcaccatgttgatgaacaggccggttttcatgagtttttcctttattctaagacatgaagacccttggaggagttccaggttgacaggtgatgctgtattttctttcctaggtagcttttcagatgctgaccttgcggatggcgtttcaggtggagaaggtacagttatcttgttttctgtctcttttctctctccatcccatgatgcccacctgctctgtagaatcactacagggtctaaactgtcagctctctgtgaactcacagtgaaatgttcagccatctctgtgggaactccgcctgtttgctgaggcttcaaggatgtgggaagtaaaggctgccccgtagaggttcggtcctcggagaagagttcagggcccaggcagctgccccacttttctgagggacagggcgtgatgaatgggcccttgtcaccacctcctcacccatccgttcacctgtgtgttcttgcaaataactagtgttgtttcagcttcattttattaggctgttttctgtaatttaaggaatgtgaatattaaagccctgagaatagtgataatgcctgggagtatgcgttctcagagtacccctagagtgtaacaggcagcacctcagctctgtagctgtgtaacatgcacccttagagtgtaataggcaggaccccagctctgtagctgggtaacatgtacccccgtagagtgtaagaagcaggaccccagcctcttcacggtcctggctgtgaatttttccttgaccccaaaccttcccattgcagacgttgtttttgtcttgcaggaaaaggaggcagtgatggtggaggcagccacaggaaagaaggggaagagggtaggtgcacctggcttctgtcttcttgtctctcccacgtggtgttgagaaggggaagcagaatgtctgagagctggcggactgcactggcattggcctcctaaagctactggcaggaggcacgggtgttctgtgccaagtgctcccaagtgatgtagctgcagaggtcccccagcaaaccagccctgctccgggtgcccacgtgacgcggattttatgtttggtcacctgcccacgatgccctggctggcgacccgacccctacatcacgcttcgccttgtccttgtgtttacaaaagctcctacactcaccctaacgatcagaggcttgtgacgcagtatcctcggttgcgcttggcccttgagaacgtcagtaaccaggtgggaggtgggaatgtggatcgcttccaccctggctgtaacaggcattgtgttctccatggaagtgccggtgatgtatctcctgtctcctttttcataaccttttcccttagatgggacaagaaaataatgacagacagaattccttttaaaactgtaaagaaaacaaaatgaggtaagaaagagaaacagagaagtagggaggaagaaaaaagggaaggagggaaggaaagaaggaaggagggatggagagaaggaaggaaggagggaagaagggaaggaaggaagggaggaaaagtgggtagtctacccttgttttaggtatttattatttttatgggtacagttcttgaattctaggctttctttgaagaggtagtaatctgtagccctcacctaggactacaaggtcattttttaaaaaatagctaagaaaacacatgtctggcatgtttatctcaggccatcgttcttggccttctagagagttaatgtctactatgtcacttcatcagggaggggtagttaagcttgaaaaatctttctatgacatgactgtgtcctgcacatattaaaaactggccgagtgaacacaccaccgacaggccatgtttggagccagtgtttttgctgaaagtcagacaattctccttccccgtcgtggagggcggagaagattctatctggagaagggtcctctgaagctcacatctggcatttggaatgaataatctcttcaatggccaggcacgctggctcatgcctgtcatcccagaactctgggaggctgaggcgggaggattgcttgaggccaagagttcgaaaccagcctggccaacatggtgaaaccccttttctacaaaaaatacaaaaattaggccaggtgtggtggctcacacctgtaatcctagcacttcgggaggccaaggtgggtggatcacttgaggtcaggagttcgagaccagcctggccaagatggtgaaaccccatctctacaaaaaatacaaaaattagctgggcgtgtgccatgcacctgtagtcctagctactcgggaggcacaagaattgcttgaacccgggaagcagaggctgcagtgagctgaaatcgtgccactgcactccagcctgggtgacaaagtaagactgcatttcaaaaaaaaaaaaaaactagccaggggtggtggcacacacctgtaatcccagctacttgggaggctgaggcaggagaatagcttgaacccgggacgcagaggttgcagtgagccgagatcgcaccactgcactccagcctgggcaacagagcaagactctgtctccccgccaaaaaaaaaagaattattgctggaataacataaaaaaaaaaaaaaaggctgagtgtggtggctcatgcgtgtaatcccagcattttgggaggcctaggcagcaggcaggttgctttaggctgggagttcgagatcagactgggcaacatagcaagaccccaattctataaaaccacagtaattaaccaggcatggtggtgcacacctgtagtcccagctactcggaaggctgaagtgggaggatctcatgagcccaggagtttgagattgcagtgagctgtgattacatcattgcactccagcctgtttgacagagcaagaacccatctcaaaataatacacaataataataattaattaaatagagatagatttaaaatgtctgcattgaaacccaaagctatcttcaaggggtgaaaaaggagcattctaacgatacaaaacgcattggcaaatgccccaagcattgcaggtctttgcttctttatcttctgcccctgcctgggctccttcctccaggtttgatgtccagctctctctttcttttttgttttgttttgttttgagatggtgaattgctctgtcgcccaggctggagtgcagcggcacaatctcggctcactgcaacctctgcctcccaggttcaagcgattctctggactcagcctcctgagtagctgggattaaaggcacccacccttactcccggctaatttttgtatttttcgtagagacgggttttaccatgttgaccaggctggtctcaaactcctgacctcaggcgattcacctgcctcggcctcccaaagtgctgggattacaggcgtgagccaccacgcccagccccagctctctttccatctgtctttgtctttttttgtctctgccttggttctgctgagcttctgcccgtacctcgctggcctctcttcatgtctcttttctcctgctccactccctccatggtctgaccaggtctgcccagcacgtgcgatgggagattgtgccttgctttgccttcctgtgtatcattctcggcatgcttcctttgcaaatcggtcagctcaggcgtctgagatgttctgaggatcttggtgctctcagactgactgtctctgccagccactgccccctgggatcttctctgcaccgtgcgtgtctcaatcacgatgctgtgtgcttcctcctgcagccgacgccccaggcgtgatccccgggattgtgggggctgtcgtggtcgccgtggctggagccatctctagcttcattgcttaccagaaaaagaagctatgcttcaaagaaaatggtaagtctcagtccgccggtgcctctccttcatgccttgctgattggaaaactgtgctttctttaaaaggcagaaaccaaactcgggctggcacgaaacaggtgcacgatggctgatggttcgtgaaactgctaaaattctggaatcgaaccttctggctttgatttcagggctgttctgccttgtgttttgttgtgtgaaagtttacaagttccccactgctgcagtgcttgggttgtttacgtctaccaagtgggaaatggttggtacatatgccgcggaattgttgctggggttagagacagtcctgcaggaaagccgctacaagttaccctgcagagagcaaaggtggaagacacttagctctgatcattcctgccctgttatttacaaccgatgtcatcatcaggaggagagccgtgaccagggggccgccacggtcctttctccactgagagttaagttaaaagccggcacaaggccggacatggtggctcacacctgtaatcccagcactttgggaggccgagacgggcggatcacgaggtcaggaggagatcgagaccatcctgggtaacatggtgaaaccccgtctctactaaaaatacaaaaaattagccgggcatggtggcgggcgtctgtagtcccagctactcggaaggctgaggcaggagaatggtgtgaacctgggaggcagagcttgcagtgagctgagatcatgtgactgcactccagcctgggcgacagagtgagactccgtctcaaaaaacaaaacaaaacaaaaaccagcacagcggattccctttctgttagtaccgaaaacccacaggcacccaggacctgggaagtttcttggatcgggactaaaatttacaggggaattaggaggaggacgtactcaccattgcaatcctcctaggtcagctggcaggctctttgggaccttgtattgggatccgccgtgaagctgggaagtaagccctgctatttggaacacagctaacgtgcatgcatcactgggcacttacatttagctcttgccttccctcttgcatgaccaagcattgtggtttgcaggaatcccatcgaccgggaacagctactcttattttttatttcttgagacagagtttcgctctgttgcccaggctggagtgcagtggcgcaatctcagctcactgcagtctccaccccacaggttcaagtgattctcctgcctcagcctcctgagtagctgggattataggcacccgccaccacgcccggctaatttctgtatttttagtagagatggggtctcaccatgttggccaggctggtctccaactcctcacctcaagtgatccacccgcctcggcctcccaaagtcttgggattacaggcgtgaggcaccacacctggccaacagctactgttttatggaggagcccctggggtccctcacgcctctgggtgtctgaacttctcaccctacttagatcttaagtccttattcattcttggtcactgatgtcattcactcaaagcactgcctcctgaagattttagagggattcctagaacatttgaatagatgctggtgtggacaaagttagactgtaggggtggagtttccccgtaatctcccatcattccagcatttgacatccacaaacattatttagagcgtgaaatggagagtcctaaacagctttcggatctcaagactttaaatgagctgctcgtgtttatttccccgttcttgctgtggggttttgggcagtgcgtggaagacagttgcctcctacctggtgggcagacgagtgggaaatggtgtttggttgtttcttttttttttttttttttttttgagatggagtctcactctgtcacccaggctggaatgcaatggctccatcttggctcactgcaacctccacctcccgggttctcctgcctcagcctcccgagtagctgggattacagatgtgcaccaccacgcacagctaatttttgtttttttagtagagatggagtttcgtcatgttggtcaggctggtctcgaactcctgaccttggatgatccgcctgccttgacctcccaaagtgttgggattgcaggcgtgagccaccgtgcccagctggtgtttggttgattgaatggcagttttgagcgggacccaaatggacagatgaccacattcaaggagatgcctgtaagagacgtacgattagaatcacgttggaaaaaagcaaacagcataacattcttctcccctcttgcttcttctagaagtagcggaggggttaaaacagtagggactcaatggaagggaatttttgtttgcttttcaatgacatttctttttcttttctgaaactgttcaactcacagcataatattcaaccaggaggtaaggaaggcttgtttgccaggacaggatgcgtaatattctagatgttgtatttcaaactctctggcttttttttttttttttttttgagacggagtctcgctctatcgcccagaatggagggcagtggtgcaatcttggctcactgcaacctcgcgggttcaagcaattctcctgcctcagcctccgaagtaactggaattacaggtgtgcatcaccacacccggctaatttttgtatttttagtagagatgggggttcaccatgttggacacactggtctcgaactcgtgacctcaggtggttcccccccgcaatcttggcctcccaaagtgttgggattataggcgtgagtcaaagcacccggcctcttttttagaatcccagacaattgttgaacacttttgcattaaactacaaagtctctgattgatgattctctgaaaatctttaggtcaacccaaattggattcatgagttgcaaaggatgtttattaccttgtgcgtgcagacgtaggaacttttgggatcttgtaagcctatttcatattcacatcctgtattagtccgttttcacactgctatgaagaactgcctaagactggataattcatgaaggaaagaggattcattgattcacagttcagcatggctggggaggcctcaggaaacttaacaatcatggcagaaggggacgcaaggcaccatcccattatcacgagaacagcatgggggaaccttcgctatggttcagtgaccccaacctggtctctccctggacacatggggattatgggaattacaatttaagatgagatttgggtggggacacagaggctcaccatatcacatctgaagacacacaaacttgggaaagcacccaggaggcttaatagacttgattttgtcaaaaattttgaaatagaattgggaaaaggaaaaacaacttttcctctaccttatccgccccgccacccctgggtcttggtcttgggtggaagcattatctttttttattgcaggaggtggggcaggcatgaacaatgaaagctctcactgggtagaaacaattttcctagattcttcaagaacaaaagcaaatatgtcctggcgaggtggccgacacctgtaatcccagtgctttgggagtccaaggaaagaggattgcttgagcccaggagttcaagatcagcctgggcaacatagtgaaacctcatctctacaaaaaatgtaaaaaattagctgggcgtgcttgcgcctgcctgtggtcccaactactctggaggccgaggtgtgaggattgcttgagcccaggaattggaggctgcagtaagccatgattgcaccactgcactccagcctggacgacagacagagaccctgtctctagatataaaaataaaaatacctttttttttttttttgagacggagtctcactctgtcacccaggctggagtgcaatggcgtgatctcggctcactgcagcctctgcctcccgggttcaagcgactctcctgcctcagcttcccgagcagctgggactacaggcgcgtgccaccacgtccagctaatttttcatatttttagtagagacggagttttgccgtgttagccaggatggtcttgatctcctgacctcatgatccacctgccttggcctcccaaagtgctagaattacaggcatgagccaccgtgcccggcccccaaaataattttttttaaaaaagcatcctttctgaagaattggctcaggggagtccaagattcactttatactaatgagatgctaggctaattttcttctaatattttctataagtctcttattctgatgccaaattaacagaaggtccaactttcaattcctggtttgctttctagttatcctgggattgattttcttggccttttgtaaatgcacaaagcaaagggccaaaaagaaaataaaataaagtataacaaagagaagcaagagatggtgaaaccccgtctctactaaaaatacaagaattagctgtgcgtgatggtgggcacctgtaatatcccagctacttgggaggctgaggcagggaattgcttgaacccgggaggcagaggttgcagtgagccaagattgtgccaccacactccagcctggacaacagagtgagactctgtctcaaaaaaaaaaaaaaaaaaagagaaagaaaacaaaaacaaggcactcttctataaataccaagaccctacctcaaaagaggacctttccaactgcatccactcacagcttggtttttatacctgaattataaaatgagtttaatatttatctcagtgacatgattttgttagtagacatggaattgtgatgttggatcgagttatccggaagacgaaagatgtcagagccctcagcctctggggcaggattttgctttatgggttcgatttccgggatggtgattttgagatctggcaaccccataggttcatggggagcttggagatttcataagaaggatgtgagtatagcatgccctggtccttcaagaaaccatgggccaggcgcggtggcttacgcctgtaatcccagcactttgggaggccaaggcgggtggatcacctgaggtcaggagtttgagaccagcctggccaacatggtgaaaccctggctctactaaaaatacaaaaattagccaggcatggtggtgcacacatgtatttccaggtactcgggaggctgaggcaggagaatcgcttgaacccaggaggcagagttgcagtgagccgagatcgagccactgcactccagcctggggacaagagcgagactttgtctcaaaaaagaaaaaagaaaagaaaaaccatgcccagttttggggatactgttattctaccagacaggctcattttccgggactgtgtcattgcattgaaatctgtggtgtttgttaaatttgtattaaaatgagtcccaggcgagtgagtagacataggtgagtcttcggcatctttccaacaaggagatgcctttatcaaatcctgtgacttgatatagatttactgagaagctttgcagtgttatattttggggttcacggattagaaactccttgtggaatcagatggctctgtctgttataggttggtgcaaaaataactgcggtttatgccattaaaagtaatagcaacatagcaagacctcgtgtctacaaaaaacgtaaaaaaaaaaaaattagctgagtgtggtggctcccagctaattttttacctttttttgtagagacagagtcttgctatgttgccattacttttaatggcaaaaaccacaattacttttgcaccagcctccgttcctcccttcctacagatttgagtttgtggtgcttgggcttctcctggtttttgtccatgtgatacgaaggggcctgttgaagctgcttctctcatgcactcggggtctgtgacttcgcatctgggtgtgttggcttcgcgggggacctggctcagaccactaaccacacggagcctgaccacttcccacagagcccagcttccgtggctggcaaggggtgttcaggatgctgtcctttggctgtggtggctggtcctactgctctgtttgccagggtcctgggctcacagtgggtttcttgaggctttggcaagatgggcgattggctctccctgtctccttctttctctttcttcttctctgcctttcttccttccctcctcctttctttccccctccctccttcttttctctcttccttccctgcttttctctttcttcctttgccctcagttctccctctctctctcttttcattctttcttgaactctccctctttcttcctccctccctcccttcttcttttcctccttttcctttttctctcttccttttctctatctcttcctttcttccttctcttttcttcttatgtacctctttcttttttctctcttctttccttccttcctttctttccatccctccctccttctttccttttcccctctccatcccttcctcctttccttccttcctttctttttttcctctctattctttgtctctcttcatccatctctcctgttcttacatgcctcttttcttccttccttctttcttctctccctccttcccttctttccttccttccttcccttcctccttccctctctccttcccttcctccctccctccctcatttccttcctccctgcttcacttcttcctccctcccttcctccatacctccctgcttccttttttccaacctccttccctcctcgttccttccctctttctgccttcctcccttccttcctcccatcccttcttcctgcttccctcctgctctccctgttccctgcctccctccctgccttcctctgtctctcccttcctccactccttaattttggtttccacttcccactctcacactttgagcctctatcccattacttccttgctcagagcagctctttctaacacctccctgctgctgggagccccagcgcacagcaaaagcagacccagcaccagtttactttttgtattattattttttatcgttttcaaccttccatttcagatggctgaagacctaggggtgagcagagaacccagcccaggcctgcggagcgtcctgaccgtaatcgttttatctgctaagacatagccttaaagcaaacccttccatctgccgctcccctcgccctgctggcaaattcccaccacgatgggattctcaatcacatggcggattctctgccttcagttccatatgcttttgcctttctggatgcacagaagctcattatagcaaatcatatttctgcataagagcttcagaaaatgaagagaaatgcagatattttcttttaaacatgaatctaacagaaacagggcagtgacttccatgttttaatgagttttgtccctaagtccatccctgccaagggaacaaactggggcccagggtggccaccctcttccctgcagtgtcctaggttaagctcactcacgtcctaaggatttgaccttccaggtcatgcatggatttttaaatcttcaacgtttttggccgttgacttgcatttctcactgcacttcctatgaagcagttcttaactctttctgtgatcagtgttccaaacaggtacacaccttggttcctagaaaaacaaaattcatacgttgaggaatcacctaaacatctcctgatcttcacactgtaaggcgtgttgggaattggtgggtggtcaggtccctattcacacatttgagcacggagcctctgcggccgtcttccttggattctctcatatccctgaaaaacacaaattgtacctggattttccttctgtttccaaagtccaccaacttgttcttcaatgtaattgattttaacttgttttctttcttttacttttcttatttttttctttcttttcatttttttcttatttcttttccttctatttattttacttttcttatttgttatatgttatttctttttcttttcttacttttcttcttttttcatttttcttttttaaattggagtctcactctgttgcccaggctggagtgcagtggtgcaatcttggctcactgcagcctccacctcctgggttcaagcgattctcctgcctcagcctcccgagtagctgggactacaggcacacaccaccacacccagctaatttttgtatttttagtagagacggggtttctccatgttggccaggctgatctcgaacttctgacttcaggtgatctgcctgcctcaaccttccaaagtgctgggattacaggtgtgagccactgtgcctggccctttttcttttttctttttttttttctcttatttcttttttcttatttgttttcctttttgctttttctttttatcttatttcttttacttatttttcttttttttacttttatttcttctccgtttttcctcattcttttcctcttatttctttgacttttctgatttctttttttttcttattttcctttttttttcatattccttttaattttttcttacttcttttacttttcttatttgccctcttgtggaaatgaggcacagcctcccttatggttgagccgtagttctagctgagcacggatggtttgatcctcctgtgttggggcactgtatggtgtgagggcacaaaaccttgacccacatgggtctggtcaccttctcacagaggtcacctttacagccccccaactctttgaaggatgtgtcccaaggtgtctcaagtctgatgcaatgaaagctgccccccattgaccacaggactgagtccagaatgtcctgcgtgtttcccagagtgtctgtcctaacaccgcttaaagattagccactgctagacagtgatcctcaggtatatggtctcaggattggccccaagcacacggtgtgtgtgtgtgtataaatatatcttcacaaagcataggtacccattaaagccatattgctttgctgaatggttctaatagctacagatgatttctagcctgaaagaaaagcaccacgaattgtttgaagttgacttgtcagatgtggcatgcttggtctaagttttgacaggaagggtatgtgggtaggggtgtacggagcatctcatgagaccagttctcctcctgagaggtccgtgatgttggaactgttgccccagatggactttgcccttgtgagactttatacttttcaatgcagtttttccctctttaaaactcgccagcttttatgtagtgttttataaaattacaggaataaaaagaatatcttttatgctttttaaccaatgaggggagagggagaaattatttgtcctctgaaatgaatgcaggttttcaatttctagccaggacagtttgctgcaaaatgcacccgtgttgacaacttgtgactggcagaacaaatgacatttgtggtgaacattttcggatcatttcgaatgttcttctcttcagggggttttcctctctttttcttaaatcaaagaatttggccctttatgtgggagtcatttagtggttagggagaacagttgaaactgtggagttcacgtagcgtaaactggcgaggctgtctctgctgctgtcattaaaagttacgctgctggcttggcacggtggttcacacctgtaatcccagcattttgggaggccgaggtgggcagatcacgaagtcaggagatcgagaccatcctggctaacatggtgaaaccccgtctctactaaaaatacaaaaaattagctgggcatggtggcgggcgcctgtagtcccagctactcgggaggctgaggcaagagaatggcgtgaaccctggaggcggaggttgcagtgagccgagatcgcgccactgcgttccagcctgggcgacagagcaagactctgtctcaaaaaaaaaaaaaaaagaaaagaaaaagaaaagttacgctgctgcaccatacaaacgtgttcctttatgaaggcatttgaaccacagatggggccgttttacaaatagcacggtctttgtgagggggaaacgcatggccacagattcgatgagcttctgctgcttccctttgtgttgaaaacgtgggtgttccttcacaccaacactggaaataaataaatacctattgatctgtgcatctcttacgcgtttccaattctgttggcttatgctgtgggtcagaaaagaagcgacaccgacaacatttggggacttgaccctgtttgcattgcggcatgtttgaaacattttttaatggaaatttgggaatagagggccgggcgtggtggctcaggcctgtaatcccagtactttgagaggccgaggtgggcggatcacaaggtcaggagatcaagaccatcctggctaacacggtggaaccccatctctactaaaaatacaaaaaattagccaggcgtggtggtgcatgcctgaaatcccagctactcaggaggctgaggcaggagaattgcttgaacccgggaggcggaggttgcagtgagctgatatcgcgccactgcactccagcctgggcgacagagcgagactctgtctcaaagaaataataataataataaataaataaataaataaataaatttgggaatggaaacaagactgggaaaaaatgctggaggaggaagaaaaccgggtacacaagacgccttggctgtcttgtcctttgatggctggggaagctcttagtgctcggagtcctcactcacctctctgcattctgagggaggtagaaggggggacaggagagccaattcaacctgagaaggatgattggtggaggtgggtaaaggaagaaagtcccctttccctaggtactgaaaagatgctaatctgctgagattctctgtatttatttttatttattttaatttttattttgagacagtcttgctctgtcacccacgctggagtgcagtgccacgatctcagctcactgcaacctccacctcttgggttcaaatgattctcctgtctcagcctcccaagtagcggggactacaggtgcacgccaccacgcccagctaatttttgtatttttaatagagacggggtttcaccatgttggccaggatgggctcgatctcttgacctcgtgatccgcccgcctggcctcccaaagtggtgggattacaggtgtgagccaccatgcccagcctctgcatttatttttatttatttatttttatttttattttgagacagtcttgccctgtcacccaggctggagtgcaatagtgtgatctcggctcactgcaacctccacctcctgggttcaaacgatcctcctgcctcagcctcccgagtagctgggagtataggtgcacgccaccacgcccagttaacttttgtattttttagtagagacggggtttcaccatgttggccaggctggtctcgaactcctgacctcaagtgatccacctgcctcagcctcccaaagtgctgggattacaggcgtgagtcaccacgcccagccgtctgcatttgtttgatgagtttgggggcagttataaataagaatcttattttcacagatgcacgtactttttttttttttatagaaagagcttccatgtgcgtgttcctcagtgtttagggagaagaaagcaacccttaaaatagaggaaaatgaagctgcttggattaccctgttgaagttcatctctgcctgtgccatgcatgaaaaaatactggcaaagtcttcacttacatgagtgttagactccatgttcccagtgggtctcggggttcagaactgagtgctctcatccaagcaataggagcgtcgacctcaggaaagcccaagtgttttgtgtgtattttgaggagtgggttatctgttgcactgagcctctctgtgtattttcttcttcttttcagcagaacaaggggaggtggacatggagagccaccggaatgccaacgcagagccagctggtaagaaggacggggaacgatggcttgcacacgtggccagtgttcccattttatcttctccatcctctcccatcttgctgtcctgctcacattctcaaatttggttgcatggctttgaatgtcttcctttatgtctcgttgctttggagggatactttcaaaagacaatgaatgtgtaaacttcctagggcctgggccttcagagaagacctatatgtgcctaagtctctgtttaacaaaatattaaggaagttttcccaggagttcgagaccagcctggccaacatggtgaaaccctgtctgtactaaaaatacaaaattagctgagtgtggtggtgggcgcctgtaatcccagctacttgggaggctgaggcaagagaactgcttgaacctgggaggtagaggttgcagtgagccgagatcgtgccattgcactccagcctgggcgacacagtgagacatgtttcaaaaaaaaaaaaagttccaagtggcacacgattggtgcatagttgggaagtccacagctggctggtgtgcactgggaattaaaagcccatctcctgaaatataactcgttaagttttgctgtcaactttttttttgttgttagagatagggtctcactctgtcgcccaggctggagtgcagtggcacgatcataacttactgcagcctcgatctcctgggctcaagggatcctcccacctcagcctcctgataagctggaaccacaggcgtgcaccaccgtgtccggctgatttgttgttgttttttttttattttgtagagacaaggtctcactaggttgcccagacagggtctcactatgttgcccatcctgagctcaagcaaccctccgacctcagcttcccagagtgctggggttctaggcgtgaactaccgcacccagcctgctatcaccttctaaaaatcctctcaaccaggtggaaaatgtggttaagaagagactttaattcgtgagaaacttctcagggtaaaaggcaggcattttgccatcagaaccacttttgaaaatggcaagaaaaaaatgtgtgtgtgtatatgtgcgtgtatttttttattttgtttgtgcatacattggaaccttctcatttgcctgagagatgcagtgcttatttttaatagcagctgtcaaattgagagggatttttaatgaaatgatttaaaatattttaattttttttctttttgagatggagtgtctctctgtcacccaggctggagtgcagtggtgcgacctctgctcactgcaacccctgcctcccagtgtcaagtgattctccttcctcagccttctgagtagctgagaccacaggcacccgccatcatgccccactaattttctttctgtttttactagagacggggctttcgccatgttggccagagtggtctcgaactcctgacctcaagtgatctgcccaccttggcctcccaaagtgctaggattacaggcatgagccaccgtgcctggcattccattttaaagatagagacttctacaaagttagtgtctcgccagacgcggtggctaatgcctgtagtcccagcactttgggaggctgaggtgggcggatcacctgaggttgggagttcgagaccagcctgaccaacatggagaaaccacgtctctactaaaaattaaaaaaaaaaaaaaaaaaaaaattagccaggcatcgtggcgcatgcctgtaattccagctactcagaaggctgaggcaggagaatcgcttgaacccgggaggcggaggttgtggtgagccaagattgcgccattgcactccagcctgggcaacaagagcaaaactctgtctcaaaaataataataataataataaaagaaagttagtgtcttgttgactgctctttcgagtcagggaaagatgtttagaacaagctatatcttaaagagaaaaggaagattccttctgcccactgcaatgaagttgtctggcttcattagccagtacattggtatatgtgtgtggagccctcgtgacttgaagggcgtggcattccagtgttttctgccaccattgttcttaattccttcttccaaatcccagcttctccctccaaaatagttttaagactgacatgcagaataaagtttccaaaacttaaatgaatggaccagaaaatctcagcccagcatcattgcaaatcaataaaaactgcacactctcatttagaagatttattcttccatttggtaagttataggcatttgttagtgtctctgtgacgtcgttagtggaaattgccttctgctgttttccttctgctttttctgcagcatccattttttttaatgaatggcatcattcaatgaaattgattgaattgattgagatttagggttttgctttctcgtgatgagttttgggcccatttttcttatgcagaaataaaaccactggctcctgaaagttgtaggaactgtgtccacgtgagtgctcagggacctgggaatgactttcttttgtctctgtctcccacagttcagcgtactcttttagagaaatagaagattgtcggcagaaacagcccaggcgttggcagcagggttagaacagctgcctgaggctcctccctgaaggacacctgcctgagagcagagatggaggccttctgttcacggcggattctttgttttaatcttgcgatgtgctttgcttgttgctgggcggatgatgtttactaacgatgaattttacatccaaagggggataggcacttggacccccattctccaaggcccgggggggcggtttcccatgggatgtgaaaggctggccattattaagtccctgtaactcaaatgtcaaccccaccgaggcacccccccgtcccccagaatcttggctgtttacaaatcacgtgtccatcgagcacgtctgaaacccctggtagccccgacttctttttaattaaaataaggtaagcccttcaatttgtttcttcaatatttctttcatttgtagggatatttgtttttcatatcagactaataaaaagaaattagaaaccaa

SEQ ID NO: 42 - DNA, 84977 bp, Homo sapiens
aaccttttttctttccccgccccttccctccctccctcctcaacccgtcccctccctctcccccatcagcccccccctcggcacttcagtccggggaacagcggtgcgagctccaggcccatgcactgaggaggcggaaacaaggggagcccccagagctccatcaagccccctccaaaggctcccctacccggtccacgccccccaccccccctccccgcctcctcccaattgtgcatttttgcagccggaggcggctccgagatggggctgtgagcttcgcccggggagggggaaagagcagcgaggagtgaagcgggggggtggggtgaagggtttggatttcggggcagggggcgcacccccgtcagcaggccctccccaaggggctcggaactctacctcttcacccacgcccctggtgcgctttgccgaaggaaagaataagaacagagaaggaggagggggaaaggaggaaaagggggaccccccaactggggggggtgaaggagagaagtagcaggaccagaggggaaggggctgctgcttgcatcagcccacaccatgctgaccccgccgttgctcctgctgctgcccctgctctcagctctggtcgcggcggctatcgacggtgagtgagattccgcgtcccccttggacccctgggggcaccctctccccagcccccactcctgcatacggatggggaagggagacgcgggagggggtgccttttgttatcccagtccagctgacacagcagcggcccgactgggggcggggatggggtccgatttgggggatgggggccctgggcaaatgatgcttccggggccccccagcacaaacaaagaccagaggcctgggtagagagaagagggctccccatttttctgatcctggggaggagaggccttcttttcctatctctgttcggggagggcctccgcctcccctacatcctcacaaccccccaccccccatctgaattgtgaaggaatccggatttgcaatgttcggctgcaaaagggggtgggggtggggggggtggcttttgcactggcctctgtagctcgaaaggggagccaggccaggggtaccctgccgggcagagggcaggcaggcccgggaaggctgtgggtggggagagggagggccccctgcttgggcgtggaatcgaccccagagccccggctggaggcctgggtgctgaagtaggctcttccccctctcagggcctctgtcagtagcctggggtagggctgtgttggggggcagagagggggagctcgccatactatgtgactttgaattttccttcttaattcctgggagctttgagatgaaaaaacgtcagatgtcatcactggggaaggggactggagaatggcctggaatgctggggtaggagggtgggggaggctgccttcttcctgacttctggcttcatcacagtttggattggaaggagagttggaggttggatggggattatggctgtgcccccacactcctttagtaaatctgtttattccctgcacccctccaagcccaaaaccccatacacacacactttgtatattgcagagttaggcttaggctagaactgcatccttttggggaaatggggtgcctctcttccctttttttgtcagctgtttttttctcctacttgtgagtcactggttcaagtcttgcccaagctttaagcattaagctggggtcatggggttgggctgggctaggtccctgatttgagaaggggtgggatctcatcccctcctgtcatcttagccctctcatccaaagacaaaactgggctggataccatcatacaccccctcctctgtcttgccagattgggattgggaaagtttttctctgaaaccagattatctccctccctctccctaacttgcttcaattgggggaggagacttacagggtcaggaagcagctgtgtccccaaaaaacatatttagtgtccctcagttgtgccatcttggggactctctaccccccacccccaccccaccaattagctgccccggaggaggagaggggcttttcctgaatatcctccagatgccgcacagccggcttctgcctataactcctgtcattatcatgtgtttttctcttgttctcagccctgtgaggtgagaagggaaatcgaggcagggagattggggttgcagccgcttctgggaggaatagaaaaaaaatttgagagagagagagacccatcaggagccccttgaaggagggtggctagagttaggcagaagcaagagggtttctgtggagagcagggaaggtcaggaagggaccccagatagcatcactcccagggctctaaaggagttctatttgccacaccaagttagtggaagagagagactggacatgttctccttaactatctccctaccctttcttaaaatgttcacccacgccccctctgtatctccagctcagatcaaactatccaaagccccaggagaggacccctccccaaacacacaccaatatttctgccttgggagtgggaatataaataatcagctccaccccactcttgggtacagggtggtgagaaaggggaattgcatagaaatgtaagttcaactctatccagaggcagcctaggggatcccttatccctaacccctgccctcttgcctcagggtccatcaacattgaactttcttgtttactttccagagaatggagatgacccagctcacctgacttagtatgttaccttcctcctgctatcacagccttgctgctttctctccagggcagcaatcctaggggctttcccacctcttctgctttctcttctatgcctgaaactgcctctggggtcccctgccctttggggagtaacgtcactccccactagcgacaaaattgagtgtacctgctgctggagaggttgcagaaagatggggtggagaatgggactattgagggccctgctgagattggggaacattttctagtggggagggcacccccagacaaatacagctcacagaataaggctgacttcctccctccctttttcctgaccttcctccacacacccccttgagccggcatattaccagttactagagtaggtacagtggaagtgagttatgaagctggggtgttagcttcctggatccctgagagaaagttctaaactcctttctccctgatcagactcacatcctaaacgtctccctttgcctcgttgtcttttaaagcaagaatgtgtaagaaattcattttggggttggagggatattttgatgtttagggctgcttcactagacatctttttcttctgatcttgttctctctcctctcttcattttctcaaccacccttccaccactgagcctcccaaaggatgacagcccaggtcctggccagagtcagttcctgtccagatgcccccattcttcaaaaccccttccttaccttttgggaagcccttccttactcaagtctatctctctttcctcctgctgcagtgtgagcccttgcacatcagaacccccaagcctaggtttattcccgcccagtactctcttctcagggtcctcctcactcctcagactctttacctttcaggtcctccagctctgcgtgtgggctcattgctcttggggcatctgggtgcagctgaatggtactgcaggaaggcccctgacttggtagtgctgggtatgagcgatagagaacctgcctccctcttctgtcccagatttcagcctggttagcaggatcctgcattgtttggagaaggaagcagttggctttggagtgtttccggtgcaatggcctcaggcaccaatataaaccctccctgggaaagaggtgaggggtatatgtggagagttgtccctcttgctcccctaggggagatgaaagcctctccctctcccaccaggccttagcttccctggctgaagagctccattttcctccctcctttctaccctcctgactccaggggtggtagtggtccctattctgggtctcccttgagtcaggcactgcctagggccgagactctgtctctccaagataggacagatcttgctcccaccctactctaggctcagcggggtagtcattctctgggttcatcccaggacaactgtgtcatccccttggcaatctctggactgagcccccttcctggcttttctggctgtctgtctgtctttctgtctgtctgtcattagtgtgcgctgtcttggctttttagaacctctctgtctctcaccctctcagttcatctcttactgccgaacctttgtgacattctctgccctgctttctgcgtctctgtcacttgtcttatttttctctgcctgtctccatttacccccatccaggcctcttggtatcccaaaagcttcttgggagcaagagtctctctgggctttcccactcaccccctggctccctcccctctgttttggctatttttcccccttcctggccagacccagtgtccagttcagcaccaaaagtttcctctccactttcctccgacttcctctttcttcttccccctccactaatttggggaatgggttttggagagaatgtttctggaagaaaggaacttgataccctttgtgggctaagagggagaaaggaggtatttcagaaggaaggagggaggttagacttctggcagaacttcctcctgaccaggagcctaagaactggagaaagatgtaaggagtgagtcaagaacttggagcttttactctggtgagcataagctgtgtgtgtggctggggtggggggagaaggagaggaggcttagaaatgcctggtgagtgatatggtgacctctggaggccttctgggggtctggcttttatttgtggggaaaggaaaagctggtgggggaggtcacgggtcaggctaatgtcctgctgcatcaatattgactcagaatggaagcggagacccttcccctcccctggctgtccaagccaccctgtctgtctgtctgtccaggccgcaaagcagaggcccagactcaggaatgacaaaaatgtgtctgagcctcaggaaagagccactgggcaacacccaaaatacaaaaaattcagtgaaaacctctcggtttgggtttgggaggcccttgctgccccacccccataaggtcgaaaattcagattcctgcaggctctgtccccgcgccgcccccccaccccaccccccgcaccttgagcatcctcctcccactctgttcccttagctatatcatgtggttccctttagagaacccccctctcacctagctcagaggggagcctatctctccttctgctgtgtccactcttaaaaagggccccaagagtccctgtcatgcttttgcagtccctgagtctccttgtcctttaagaagcacctctaaggtcttagctctcttccttgctctcgctccctcaagggggtatcaaaggatgggttcccctcctctggagaagactccttcagggttggacttcgctgtcaccctctctggccaggcattctcaccccacttccccacccccaaggtcccagaatgggacacagaatgacagccaagggtcaagcagggcagtggggtctgtgttgtgtctggacgcacacccaactctacacctcctgccctggctccagcttggtggccctggggaccgtggctgggctgggtgcctgggtttgggggggtggggcagggtgttggccaagttagcatggcagtcacattcatcttcaggcaaagccgagaacagacggcccctgtgtcctggtgttcttcctccaaactcgctctctctccttcctctctagatctctccttcttcttctcctgcctgtcttccccttcttctgtcccattcttgctcctctctgtctcccctatgcccttccctcctctctgaggagccctgaaggccaccccttaaaatcctctccccactgccagggccagagaacgacagcgttctccctgcaatttcccttccttgttttttgtttttgttttgttttgtttttgagacacagtctcactccatcacccagactgaaatgcaatggcgtgatctctgctcactgcgacctccgcctcctgctaatttttgtatttttagtagagacagggtttcaccatgttgcccaggctggtctcaaactcttgacctcaagtgatccgcccatctccgcctccacctcccaaagtgctggtactacagacgggagccactgcgcccatctggtttcctttctttctttcttttttttttcttttgagatggaatctcgctctgttgcccaggctggagtgcagtggcgcgatctcagttcactgcaagctccgcctcccctggttcacgccattctcctgcctcagcctcctgagtagctgggactacaggcgcctgccaccacgcccagctaatttttcatatttttagtagagacggggtttcaccgcgttagccaggatggtctcgatctcctgacatcatgatctgcctgcttcggcctcccaaagtactgggattacaggcatgagccaccatgcccggcctggtttcctttcttaacccggctgcatcccatgacctatgaggaaaccacctgctcagttaccagtcaccctgtgcctcagctcccccatgtgtgagaggggggccgcaagggcacccacctcacagggttatagtatctaagtgagttaatagtcaccgtatttccaatcagtggctggtggttagcaaggtgaaaaaggttagctcccatcggtcagggagacctccgggttctctcatgcgggccaggaggcggggaaggccttagttgcttttgaccttagggcaatgttgttctctcatctaaactgcaggccacaaaggtgggttttctgggtgctggattcagacacagaaggctctgctgaggggagtggggttggctttccctctaagcagattataagggtcctaccccgctcccaactcagctctctcccagctctgagtgaggcttcccttggctgtgtagactgtcccaaagtagtttatttgtttctttcttccctctccccctgaaggaaatcaaagacaggcctcagccttctcgctccagattcctgggcccttcaacaccagccctgacaggaagttctttcacgtatctctctgcaatccttgtgctggccaggccctcgggagatgtggccccctcccccggtgctgctgtgggataggggcctgggccctcctcttcctttcacttgtcccatcccccatcccctccctgcaagagcacatctggtttgtgaatctctctcattccagcttttggagtttgccagctgctgtttcctctgtggagttcaggccaaaaatgggggtgggggacagcgggggggactcagtgagggctaaaggagggggcaccatggctgggatgtggaatggaggggaggttaggtgaccacccggtgacctcaggccgtggctgtgcgctctgcccctgggaggagcagggcatggaccaagtcccaggtgggtggcacgggggtctgtttctgggctccaaacatctcatctgcctctgagtcccattccagcccccctcttccccctcagccggccacggctggtcaggggaagcggacggttctccggcatgctaactaggctggcgggctgtgtttcccgggaagacctcacagctggcccagtggggcaatgaactcagcattatccacctcctcaaggggcctttattccaggctcagggtgggggccaggggagggaggctgaagggggagcctggctaggccatccttgatgtgtttcctgaactcggtcattttggccaggggcctgagtgccgtctcccctgccagcggtgggggttaggagggaagacatctcagtgaggctcccatcagactccctccctcctaagagccccccccccccgccattttccttatacttctgtctctgccctgcatttgcattagttgggtacagctgtcttctcaggcgactctggctcctgcagggcagagggtcatctcaccctccttggcaccctgatgcctagtgcagtgcctggcatagagctggccttcagtgtgtgccagcagaatagaaatgtgatggcacagtctgaggaaaagccacgaaaggccaggagactgggagctcagccttgggtgggggagaaggggtgggtgactgttcctcctgtggaggatgtggtgatagaggttgggaggagtgggaattcggaggactggtgtggatttcactggttcagagcttggagtcagcttagctggttttgtcacttgccagctatttgaccctggccaagtcacctggctcaatttcttcatctgtgaaatggtggtattagttgtccctatttgtcatactgtggagggaattaaatatgatgatacatggaaaaaactgctttaccacagttcctggcacatactgagcccacaataagagttagttgtcagccgggtgcggtggctcacgcctgtaatcccagcactttgggaggctgagatggatgtatcagatgaggttgggagttcgagaccagcctgaccaacatggagaaaccccgtctctactaaaaatacaaaattagccatgcgtggtggcgcatgcctgtaatcccagctactctggaggctgaggcagaagaatcacttgaacccgggaggcaggggttgcagtgagccaagatcgtgccattgcactccagcctgggcaacaagagcaaaactctgtctcaaaaaaaaaaaaaaaacaacagagttagttgtcaccattcttaattcctccttgggggatgagggaagagaatggggtaggagtggaagaagcctgattggggtgggagggtagggccaagaggtcctgaatatagtagctaactagttggactggactgaaaccagttcctagagttcatttcagccatccccctgcctctgctccccaattctgatatcttgaaaatctttaggtgcttcttaactctaaggatgtctactgaaagtctccctgaggtctaaccaagggaggctgtgtctttagagaatggagaggacaaggcaggtggatcacctgaggtcaggagtttgagaccagcatggccaacatggtgaaaccccgtctctactaaaaatacaaaaactagctggacatggtgatgcatgtctgtagttccagccactggggaggccgaggcaggagaatcgcctgggcccaggaggtggaggttgcggtgagctgagattgtgccactgcactccagcctgggggacagagtgagaccttgtctcaaaaaaaaaaaaaatagggaatggaaatggaagcaaggctctctaccctgcccattcctgcccagccttgccctcctgtgcctctgctaataccatctccaactactactgtgtgtgccaagggcatccctccccactgctcccatctgggggcctagtgattaggggttgggaaggatggggtgatgggtcaggggaccaggagtgtcccagaaggcagggaagcagagaggttagataagaccagctcggggcctctagtagtaggagttagaggaagacaaagagaaaacatgtcaaggcctaaatgcaccccccttcaccatcactctgtcatcaaagccagggggtgctggtgtctgatgagagtaaccaagaatagcaaaggctttgaccctgactcccaggaacaggcagcctagaggacttggaggggtgcagtaaaatgtgcttctggatcctccccacccccaccgcagatacacagtgtctaggaactacccaaagccaccccctgacacccccaggcacatagaccatggctgagggtctgggccagatggagactgatgctagggaaggaagagcagtactaggggactttgggttcacagagttggcctccatccttcatttatatccccttttctttccttgccctagcccctaagacttgcagccccaagcagtttgcctgcagagatcaaataacctgtatctcaaagggctggcggtgcgacggtgagagggactgcccagacggatctgacgaggcccctgagatttgtaagtaccttttctggattcttctccccaaacccttaacttatccctcttcctttggcagatgtttgggaggaggacagctgatccctagcctgatgtggaccttgctcagtgattgtatttgtccatgacacagctaaaactgtcctttacaccccttcaaaatgcttggcatggtgcctgttgggcttagaaatggcacctcagatttctccctcaagtgctgcaccccaagacagtgttctctgggctgacagctttgctagaagatggcccggcctccctttccttccagctcttcccttattccacctctcagcctccctgacccttgatgattggccccaggtcttgtcggatcctcagatcttcctctgtcctttggctcccaggccagaggccactggcacttgctcagccccataccagaagccccacccctgtgctcttcccgctacccccgccttcccctgcccccagtaagtggtgtaatcggaggcagctgttttaactgggagaaaggtccccgcccagcttttgccctgccaagggaagtggagaacttgttggtgggaccccagagtcctgggtagctggcacagtcctggtggctccacttttagcctctcccctgcttggttaatctgggccagggtcaaagcgcccctgcattcctaggtccgtctctgttctctctcttgggctttatcctgctccagtcccatctggtgtcctgtccccacacccccacccgtaattatcaggggtaattttagggctggaaagggagccactagtgggctctgcctcacccctacactctgccctggagggtgggggccaggggtattcagcaagtatatctacggcatggtgcttcagcctggagtctcttcttgtctggtgccacctgcacccccacacttttgaccctgatgcttgggcgttagaagtaaagaaagccatgcagaagggtcagatctgcctctttttgttcattcttccttcaatttgctgtaaacctcaccttatatgcattaccactctgttcacactcataccccccggactcataacatcacacacagacccacctggcactgatgagcccacctcccacccaaaggcacaaacacattctcacagtaacacagagtcacactcaaatgtggatgcagaaacacactctatactcagagagatgtccccagacacacataccaacatagagacacacacacacaaacccagattgattcacatggaaactcactgaggccagatacaccagcatacagaaagacacacagatacactctcactacctaccgctgcatgctatacagccacaccatcagttgtgtaagcagactcccatccaggcacacatgggtcatagacactgtcactcacacaccgtgtccaggcttgggggccaatagacagtggtctctctatctcatccatcctcttgagcaacaaaggaagttgcagagatgatatgaccagttggccacaacctttttttttttctttttttgaaaggtgggatctcactatgttgccttggctgatctcaaactcctgacctcaagtgatcctcctgacacagcttcccagagttctgggactataggcgtgagccaccatgcctggccagaccacaacctttgattcttcccaaatccttctatcaggcttgttgctgtggggttggaagtctagaatagtgctgtccaatagaaatgtattgcaagccacatgtgctattttgaaattttcgagtagccacttaaaaaaggtaaaaatgaacagatgaaatgaatttgaatattttatccaatggatccaaaatattatcactttagtacagtgtattcatataaaacctttagagatcttttgcatttttctgacattaagtcatcaaaatccagtgtacattttatacttacagtttgaacttgccgcctttcaagtgcttgatagccacatgtgactgggctacgtattgggcagtgaaggtctagaagatttggcaccactcttggccctgggttctgcaacctgggagctatgggaaggagtttttctttatcattggagtttctctgccatggaccctgcttccctcagctcatcaaaacctttttttttgtttgtttgttttgagacagatctcgctctgtcgcccacgctggagtgcagtggtgcaatctcagctcactgcaacttctgcctcctgggttcaagcgattctcctgcctcagcctcccgagtagctgggactacaggtgcatgccaccatgcctggctaattttttgcatttttagtagagacggggtttcaccatgttggccaggctcatcttgaactcctgacctcaagtgatctgcccgcctcagcctcccaaagtgctaggattataggtgtgagccatcactcccggcatcatcaaaaccttttactgacctcagtcgtcatcaaaaaccaggctgtcttcagcctgtctcctgagcatagaatgttgaggcactggggtccatgggaatggggcatttggagggtggactctactgaaggcctagtttctacctccacctgtttgcctacaggtgtgtggctactgtggggaatattgtaaaagagttccaggtggaagagtctaactagccccgaggcctcctgagatctgaaaccccagttttatctcccctcatccccagtgaacagctgaccagagagccaccatagccagcttgttcatgcccacccttctgtctgccctcaggtccacagagtaaggcccagcgatgccagccaaacgagcataactgcctgggtactgagctgtgtgttcccatgtcccgcctctgcaatggggtccaggactgcatggacggctcagatgaggggccccactgccgaggtaaggacttttccactctctactctcccgtctggatgcagcatattatcagcccaccttccgaggactgtcctggcaccttcagtggggatgaggccttgtcctggtcccctgcctagatttaccttcagagagcagatgaaattgatgtgccccttgggcctggagcttggtcagacagccctgtgggcctcagccgtgggctgtagcctgggcacttccctctggctatgtgttcttggactagtcactacctctctccaggtggcagtttttcttctgtaagatgagagatcagtgttttcatacttttttaaaaatagtatgatcctttcttcaaaaggttttctgcatgaaacctgagtgtgaacacagggaggagcagaggtgctgtgactaaagcttagccatctagtttagtccacctgccgcccctacgggtgccctagaaggcatcccccaggagctgcagatctttgaggggccctaaatctgccttggtccctccctctctgacagtctagactgtctgaggtggttgataggaaagccatccaggccgaggtgggaacattaggatgacaagtcagactgcttccagcctgtggctcaggtcaccagctctacagtctttcccccaaagggccctgtgggccatggagagtccggtcacagcgtgagcatttaagagtcgtgtccggggaggcagagcctcaagcctgcgtgttagggaatagtggcttctcccttctcttttcttcggggtctgggcccggagcaagaggccagctttgagaggccatgagcgtagccctaggggaggggctgtgcttgggtgtgggggcagtgtcctgtgctgtgtgcctgagaaaacatctgtctgtgggaggagactcatctggatcctgttcactaggagcagggaggatggagcaaaggagtttgtggaagatttttctccctttctttggttgattttgcatgttttcatctgaagctcctgggacgggatgcagaatgcgggcctgggggctgacttaaatgaccacgcgcaccccttcctctcgtgtggtgtgtgttcaagcttacttccttttgagtacctttacagtctctaaaacaacagagaacttcaaaaacctcaggtctgaatttccttctctgatattacagaaatcggcctcctcattccctcaccctatatccagaaaagttactcttttctaggttttccagagcaaatgatattttccccctctgtggagaaaggctgggcaggcagcatgaatggctctcgggtggaagtggggaggagaaagaatcgctggggcctggccccccatcccaactcttcctggcaggcttagtgcctctaaacgtcttagcatcttgggcggctctctctcctaggtgggggtggagtgggaagccagggtgtgaggccgctggacaaaggggtctttgtggccaggctgcctggccccacgcaaggccattaactgggtcgctggtctgggggggcaactgctctcccacctctcccccctcctgtctcattcccttctgtctcccctgtggaagtgggtcagtggcaggagaaagattagaaaagaatccagaggggaccagttttgctcctccttcctgtcctctacctgggccttaggccttctctctgaggcctctagggctccggggatgggttagacaggtgcttccaggccagagctgggatcctgtggggacagacacgattccatgcccacttttcagccccagctgaagccaacattgtaatccccaggcagtgtagatgagaggcatatcaaagggataagactcaccatcccctcttcctgttgaccccaacaaagtgccagaacccctctccatggggacagaggtagcccagaacatccagaacagagacatgtgggttctaagccatcactggctgtgtgaccttgggcttgtcttatagcctctctgggcttcagtttcttcacttgtgaaatatggtagatgcttcctaaggcccttctgtctctgacactgcagcccttagaagtggtttctgaaggttgactgggtttaggggaaggttgtggcctgcgtggagctgccagatctggcggcctgaatatgtgtctctcctgcccccacacagagctccaaggcaactgctctcgcctgggctgccagcaccattgtgtccccacactcgatgggcccacctgctactgcaacagcagctttcagcttcaggcagatggcaagacctgcaaaggtatgtgagtgcatgtgcctgtgtgcatgtgtgtgtgccagtagccagttgaggtgggcagggaggggcagagaggggtagggggcctggctggaataagaaactagaaggaaggtgcaagagagggggtgccaccaccccagggcatgactgtgagccctaaccatttgcttccactagacttctaaaaattcaccttaaaattatagtttatatgtaaatttttctgttgtaaaaaattagagcattaacagataaaaccaaagtcccctttgacaaatccccctcaattccggtccccttcccatctccctggagttcaactctattatcagtttgctctctctctttcaggcccttttttgtgcatttgtctctgggtattcacagaaaatctaattggaagtactgctcaagagtactgcgtgctcttttttacataaacaatagtatactgtgtatattattttcaatgtttttcactcatcagtatgttccacaatttttttttctgtgttaatatgtaaagatctacatcattcttttagaaaccactatgacgtatgacttttaccacagtttacttggtcacctccctgttgatgagtgagatgttcccaatttttcactgctacaagcaatgcaaacttttctgttttaaatttgcctccctcgggtctttgtgcaaatgccaccttctcagtgaagccgtcccccgacccctctaaaactgcatccctgccatctgcattctctatccctgttctcttttcattgcactagcacctctaatgtatactttatttactttgtttcatatgttattatagtaactatatttcatttattatctgaatataagtttcatgaggacagcaatgtgggtctattttaaagttcactgatgcacccctggcacctgacccatagtagggactcaataaatcttccctgcgtggatgagtgatatgtacacgagtgtttctctagagtggattccaagactggacttgctgggtgttaaggtttgcacatttcatgctgtaatagattctgccgaactgtccttcaaggtagctgtaaggatggacatgttgatcatgtctgatgatcacccacttcgttgcccttgtcacactggaaatgaccacattcttgccctttcctcggcagattttgatgagtgctcagtgtacggcacctgcagccagctatgcaccaacacagacggctccttcatatgtggctgtgttgaaggatacctcctgcagccggataaccgctcctgcaaggccaagaacggtgggtggggttgcctctggccacagtgctaactaagccccctcaatgctgttccctggtgggtggtggcctgagaggtggtcctagagccctggctgcacggactcttctcttccccattcccagagccagtagaccggccccctgtgctgttgatagccaactcccagaacatcttggccacgtacctgagtggggcccaggtgtctaccatcacacctacgagcacgcggcagaccacagccatggacttcagctatgccaacgagaccgtatgctgggtgcatgttggggacagtgctgctcagacgcagctcaagtgtgcccgcatgcctggcctaaagggcttcgtggatgagcacaccatcaacatctccctcagtctgcaccgtgagtcacctgctctcagcttggagggctggggagggtaggggagacagggaaggtggaccctatcttgaacagaggccgggagttacacaggatggtcctgtctggggcaggagaagcaggaggctggatacaatggtgtgtgtttgaggcaggggcagagccaccggcacgctccctcccagctctctgagcaagtgtctggatggcccctgcatttctggccaagggctgagggggcagtgaatggtcaatctccagagaccagggactgtcccttctctgagaggggagtgttgactagactgcagagggactttccggtgcagtgggagccaaggctagggaaagaaggagcggaagcctgaggtgccctgttaggctgcagctgagggtaaaggagctggggcccagctgctctgtctccatgggccatcgtttccctcggggaccattgccaatggactctctgctgccatcgggggagggcagtactgaggttatttctctgtggctttgtggcagtgaatgaggctgggagaggagcgtgagccacatgagattttagaatatcctggatgcttccattcaggcttctccctaggctacacttttgctatcctagttgtggaagaaggggtgtcacagaaaggggcacgagcatagctgggtgtagacccactgccgggaacagccctgcccatctcagaggctgttacaccagcaaccttaaaagtcaacatctggcagcatcacatttccaaagaaatgcaccacagggctgagaggaagaatctggcctgtggttgatctgaccccctaagggagattaacttgatctgtaactgtttagtaaaccagaattcccatctctgccttggtttcctaatctgcataatgggtttgagcttgtctgtctagatcagattaactggagtgaaagccagtggtaaaggacagcacactttgaagttgaggattgtgaaccttgggcctctctagaagatcttcaagtttctttatttggttcttgtgatgaaaagaaagatcccaggaggttacaagggattcattctgggagagagaaaggcccctccccgggatggtggcgagcaggggttcctctgagagccctcactctccgtggcctcagcgtaaggttcacatttctgcctttggctcctccagagcatccctgatagcgtccttgggctgctgctgtccacagctcacctgtgatcagacatgtgtcctccttggggtgctgagctgggggctgtcaagcctggttggctgagctcttaacgagtgggcgactcagggaaccccatggctgatggggtgggattggtgctagaccctcttgtgcagctgccctccccctgttccttgtccactgacctactcaacaggcctgtctgggcagacagcttgtcagtttcctccccagccctgcatcttgccatacagtgggcttctgggtaggtggctatggggtgtcctggaggtaaccttctcaacttctactctggcctcatctccttatctgacttcctccccaggagaagctggtacccctcccttggcaaacagatttgccttgcctcccagtctgctaaactcactgggcctctcaggggcagagtccaggaggctagaagagtccaaggggaaatgcttgtggggtaaatgagtgggtttctctcatcccagcttctgtcccttcctccctgccctccccctgctccacgtccctgccgcctgaatgtctggctgtcaccctgaggatggttgttttgctctctcccacaaactaattatgggtcccaaactgaggacgtcagtgtctctcccctagcccctcccccagtttctgggtcatccccctccccaggagatgctgactggcctgccctggtgtgtagggtggctggtcccaggcactcacctgcacagtggctgctggcctgtaattagctccccaaggaggacgaagaagaaaggctgcagctttcccctgctttcactctgccctccagggcagccctccctgcaagccttccattctgtgctgtgactgtgacctctgttggacccctggggctgagcctcatgcagcaggggtgcacacagagggaggagtctgacaattgaggggtgttcgagccagcgaggccagcccgctggtgcaggcagaagggggagcctgccccagagaaaactctggaagcagaaatagaatagaaagaaggaaggaggccaggaaatgagcctggttcacatgtgtcctgggccatgtgagtcagacctgttgtggagtcctgagagcccccgagggcccccctgaggccctgcagtgtgtgaacattcctcttcaatgccccagggctgctgaccctcctgcctcaggcccagtgttatccccctggattgggtgggtcatctcttttcctcccacctgagattacctccccctcccctctgccgctggcccagtggtttggggaggtctatgaggctcgaattccaagaccagagaactccatggtgagagccggaagagaaggcaagacccttggccagtaccaagagcagccctggctttcactactgctttctcaaaggggctatgcattgatttgattttagatggtacctggacaagctttttttttttttttttaactgttatagttacgtttttatttgatatgcattaggaaactcctgtaactagcacatcaaatctgttacttcagcaattgtttagcatgcagcgaaataagaaaagtaagttaattgaaataactggtaataaacagtagcgcaagctgtacataagcatggtagacattttgaaagtgatacacaaaagactaaagttctgaaaattgaggcccagagggatcaacaggcctgatagtcccttagtcaggaaccaggcctgcgcactctcacccccacctctgaccagtctctcagctccagaggcctatggagcctgtaacccagctttgtccagcctcctgccaggctgcccctgggcaggcctggtggtgcagtctaccgaccccagcccagccctgcatttcctaagctgagctcctctgatctgtattcccttcaccttggaggatgccaccactgtagaaagaatgaggcagactgcaagattggggtcctgggaacatgggtgtgtatggtgaggggaggttctgaggttgtaaatagaggccttgaaggaaatcgggtttgctgaagtcactcaggagtttggactgtgtgtgaaaggatggtctgaaggggctctcagaggtctcagggttcccctccctgcaccatgctgcatggggaagaaggaggtggctggggagctcagcaaagggcccctaggctgcaggcagcaaggttgcgaaatgggtcccaggtccagctggccaacttcacttttcccttcctctccctttcttttatttatttatttttttagtgtgtgtgttttcgaaatcacaacaggaaatggggtagtgatttgtctagaggggaggcaaagaaggggcagacagcagtccctctgagtctaatgaactggctgctgctgctggaaggggtgctacctccccactgtgctgggcacccctggaccctctcagcctcccaccctgcctacaaagcacttccagacttcacatgtgaaagctaaccatgcccatccttggcctttctgacccatgggatgccaggctgtttggggaggggtggctctagccaccccactctttggccttaggccccctgcatcctggcacttttgcttcccattcctgttctgagtttcctaatcatttaacagctcactcttgctcctcctctctcctggcccgggccagccctgtgtctcccggcccagatccagccctgtcctctcctcccccgctgtctccttgaaattgcctctccacccagactgctcccagcactccccttgctgttttcaagccaaaggaagtaacttaagcaagagagatgtgttttagagcccggcaaggatttctcaatagagggaagaccctaagatgggctgagtggaatccaggcatcatccctgggatctaggtcgaaatgcctcttggggacctaagccaggcaggggaaggtagcaggacataaccacaggctggaatcacaggcaggagcaggaagagagcccaggagaacgaggtgacacaacacggctaagctccagactggctggtggaaggaagagctgaagtcgggacccagcaggaaacaaggagcatgaggccacatcgtttagcagagcttctgccaggctcgccaggaggtctccttcccaccttcgaagtcctcagactctccgccatctctcccaggcccaggcgagatccctgagtaggattactagacagactgtcctctcccactgtcttggagtgtcccaaggccagagaggcaggatcctggcagtagaagagagggggaaaatgatgtcccagctctagaacaacagactcagtcttcaataaatatttgttcaatggatcaatacatgtgtgtcagacgcctgagacaaagacaaaaggcagcgctctccttacagtatttgcagtcaggtgaagaggccatgatcaaagaagctccagaggcctatggagcctgtaacaggaaaacttccttcttttttttttttttttttttgagatggagtctcactctgtcgcccaggctggagtgcagtgatgcaatcttggctcactgcaagctctgcctcccgggttcacgccattcttctgcctcaggctcccgagtagctaggactacaggtgcccgccaccacgcctggctaattttttgtgtttttagtagagacagagttttaccatgttagccaggatggtctcgatctcctggcctcatgatccacctgcttcagcctcccagagtgctgggattacaggcgtgagccactgagcctggccttgaaaacttccttctaatagggcaagcttccttctgggagcctgagccgagtcttgacgagtagtaggtgttagccccaaatggcccacctggagggcccacctagagtcaggaggccacagggctctggctggaggcacagagggcgacttggtggaaaaggtgggaaaggatgggttcagggaggggaggacatggtgggaaccgcagcccccatgtggggagtgtttatcatgcaccaggcctcatgctaagtgcagttagtgtaccatccagttttacaaatgaggaaacagagactcagaggcattaagtaacttgctcatagcctcagttggaaggtgacagaaccagaattcaaactcaggctgtcagtgtctagggcccagttggacccagggcagagcagaatgatatgaggagaggtggggaggttcctggaacaagggccagaatctagtgtgctccctggggatgtggatagaggtccagggacctctttggatgtgtatacactcttgggtgtgtagatgtgttgggtgacattttctcaggacataaaggcttcttccttccttccgatttccttattttagagcaggtgactagaatcctgcagctgaagctagagtctttttgggcatggggtgggtcccatgtgtttgggaaagcagccaccatgtatggaaatgcctcttgaacaatgggaatgatggagaagttgagaaaagctggagttgtagtgagtgcagatgctgagcagtgggatggggtgccaggacaccaggtctattctggggcctggaactgaaagtcctctgtgccataatgggcagctgtggtctctcgtctgactcctgcacctcttccctgcttcctagcctccctcttcatgctggaatcccctgcccctctgcccctagaccacccccaactccttccacaacacagcctccctctctcccctttggtttatttgagattctcctgtcctcaggattttcggcctttggccagagcctcttcagaaggtgcgctcaggtggttggcccttagaaggctgggcgacaaggggacggctcccctcagggttggtggagccagaatgctcaggatctctgggctgaagcccaggactccacctggaccccaattcataagacagagaggggtggcccagatactgcctatagggcagccctggaggcaaggttcctcctctccctttgagcccatctctctacactggccttggagtggtggccaagtgtatgtgtgtgtgtgtgattgtgcgtgcatttgtgtgtgcatacgtgcgtatgtgcgtgtgtgtgtggtggggcaggcagaggaatctgaactttaggagagagaaaaataatgtggtgcagggggttggataacaaaggatttttgcttgcaactaatagtctccagctgcaaaaataccaaaggggaggccaggcaggccgaggactccagttcttgccaactcctcaccggcctgctgagtggggccctgcctggcctttggggaggtggaagggagaccggccaagggtaaatatctgagagcagggatgatctctctgccttccttcccggaattgggagggaatccaggccacatcctgaggctgggggggctgattgtggagctgcacctgggatagcggcatcagatctctgcaggtttcttccttctctctcttgccaagagaagggtggatagggggagcaggggcagggtattgccagccctagggctgggcagtgactcagggaagcctcaggaagtcggagagaaggccggccgtagctgcgccagctggtgctgggaaaacagctttcactgatgaagttcatacacatgccagcagcccccagacccctgccgtgcccaccaagtaaagggcacgcagccctgtttgacttccagccaccctgctggctgccaggggatgcaggcaggtccctgctttgagacttcgatttcctttggaggcagcccagcagcattcatttgaatctgttttctctgtggttacagcgtgtggggcaaagaatttggttgccttacccctgcactaggccctcttcctacagggccttggcctcctcaagctactcttccccctctctccaatcttgtgaggatgggacagtactgggggcccagaggaaagagtggctgggcttggggatgcatgaatacttacgggggtaatacctcgtctctgtggccttgttctccaggcattgggatgggatttagcagagaggacctgaagaagaaactagtttgatgaagccctcagttggctccttcccttcctgtcctgtgactctgagtcagtgtcagggcccagccaagttccttgagagcggcgttcctgttctttttgcccccaccccaccctcacccactgttagggagcagcccctgaatccctgtggggaggagggggaattagggaggggtcaagcagaacagcaagtcattatacctgtagctgtgtgggggcagaagaatccctactgggttgagtatgggtaatggaggatgagtttcagcccaaagcaggtagcccaaagatttctttacttgttggggaaactgttggagatggagttccaggcaggggtcccagaaagtcactgccttaggagtttcccagtttgcaagaggcaccatctctgatggtggtagttgaagggggtagtgagtagatggaaggaagccagtggtcctggagaggaggagcccagaggaggccagcatgtgtccctgtccccagacttcctgcctccttgacttccggccacccttgccctgcctctctttcctttggctcttcttggcttcttccatctcctccagaaccatgcctgaaactgagtctaggcagctgggctccatctccttcccccactcccatcatccttaagccccatctctttctgagccatgcctcagtttgccctgaggattctttcatggccctcctcctagactctctctcctccagccctatgacttattccccacctcttctgaccctccccaggacatgaggacattgagcaataaggacattgcaggaacaggggactggggctgagtagaggaagtttggcccatgtcactggtgcccaaccttttgcccccatggatcttccctttggcatctctgtagagttcatattttgaaatacttttctcccaaactgggtttattagcgtgtaccctgcttttccactttaaaaatttatgccatatgtccagcttccagtcagtgcttctggttagcatgagataactagatttactgtagatggtagataaaagtccagtgaaaagcaaagatgtgtaatgttttggtagcctcagtgctcttatcccaagtaaaagcaaagttaaaaaaaaaaaaaaactggactgagctagtggacctgtgctctctaccttttggtgccccaagaagatggtcccttttcaaggatgggctagaattgggaagtctgtcagtcaaccagccagccagcatttacgcaagccctcctgtatatccactctgagctaagcatgggggtgttgggtgggagggcgtccagagaaggtgggcttccaggtgtgggttctcaccagcaaagggtgggcatctctgcaagagggcctaccccaccccatggctctttcattcgtactctccagacgtggaacagatggccatcgactggctgacaggcaacttctactttgtggatgacatcgatgataggatctttgtctgcaacagaaatggggacacatgtgtcacattgctagacctggaactctacaaccccaagggcattgccctggaccctgccatggggtgagagtggcaggcggggttctggccctggaaggtgggaggctgaggctacagtggtaaggagggtgcccaatgtccagaccccatttaacatgcatcttcccacaggaaggtgtttttcactgactatgggcagatcccaaaggtggaacgctgtgacatggatgggcagaaccgcaccaagctcgtcgacagcaagattgtgtttcctcatggcatcacgctggacctggtcagccgccttgtctactgggcagatgcctatctggactatattgaagtggtggactatgagggcaagggccgccagaccatcatccagggcatcctggtgagggagctactgtctgaggttttgtgggggaaccatgatccagggccttctggtgaggggggaagcctctgtaggggaaccgttctctgagtctcctggtaaagagcgtggatgccccaggcctctagtgggagtggggtgggcttgaatactgcagagaaaggacaagatacgggttccactgtgatgggaacagtcattttagaaacaccacttctgtttacttcctgtttctcatttgacccttataataacccctagctgatgaacagggaggtggttcagttccctttcagcagatgaaaaagcaggatcaaagaggttaggtgatttgcctgtgtttacaaagccgggtgatagcactggaacttgttctagaagccttgctggctcagaggtggcatctccattgtgggataattagtgtgagcaaccagcccagtttgcctaggactgtcccagttttagccctgaaagtctggtaagccagcaaacccttacctttgtcttaggcaaactaggacagttggccaccgcagataagctatgtgggtagtcaggggtgttacaggacttgcttggggcaagtgtgtcctcttagccctcataacagactaagaatgtcctctgtggacagagtttagagcccatctctaattcagtctaaaatcactaaagtgtctaacgagtgcctaattctgtgaaggacagggtttctgccctcaaggggtctgagtagagtgggtgagataagtccacaaatcactgtgccagacacggatagatagcagtgtcacggaggatgtatagaaggagaaaacatctctggttagaagattccataaattctttaaagacatgctctgtagaggatgagtgggatcttggtaagcaaaaatcttcagaataggttagtccagccagaggagacaggagtaaagcattgagttaaaaaatggtggggccaggcacggtagcccacacctgtaatcccagcactttgggaggctgaggcaggagaagtgcttgagcctcggaggtcgagaccagcctgagcaacatagggaaaccccatctctacacaaaatttgttttaattagccaggtgtggtggtatgttcctgtagtcccaactactcaggaggctgaagcaggagggccgcttaagcccaggaggtggagactgcagtgagccgtgatcgtgccattgcacttcagcctgggtgacagagtgaggtcccgtctcaaaataaataaataaaaattaaaaactacaggatgaattggggaatgcaggtcatgaagtctggaggaagctgaggggatctccaggacagagggaggaacccctgtcatctcatgctgtccattcttgcctgcccgtctcagattgagcacctgtacggcctgactgtgtttgagaattatctctatgccaccaactcggacaatgccaatgcccagcagaagacgagtgtgatccgtgtgaaccgctttaacagcaccgagtaccaggttgtcacccgggtggacaagggtggtgccctccacatctaccaccagaggcgtcagccccgaggtgagcagggctccatggcccctccaaagctggctttaccccatgatggctctgggaccttgggatcacagcccctctctgggccctcctgtggggaccctggcttctttcatgtcatgaccgattctcctagccagccactcgggctacctgccctggcccctcagcttcccctgccagcccccatccacccactcagcctccagatcccactctgtccctcccattccccttgccagtctggagcagtagcacctggccatgggcaaccctggaactctcttccctgactactgaagcccccactccaagagtttgaaggctgggttgttggggggcagagggtttccacccctgtggcttccaaatcctaaaatgggatagcaagcacaaagaccacagcagcagggggtgtggtcagattcaggaagccttctcaaggcctggcacaggggctctgaggggtcctaacagctcttcaccctgcccccagtgaggagccatgcctgtgaaaacgaccagtatgggaagccgggtggctgctctgacatctgcctgctggccaacagccacaaggcgcggacctgccgctgccgttccggcttcagcctgggcagtgacgggaagtcatgcaagagtgagtgacagggaagggggtgtgtgcccattgggaggctgcgggagggttcctcaggtgtcccccacagcccggctgcctctgtctgacatgcagggagatgaaggaagtgtcccagagtgtacctgctagtgagggcagagatgggacttgaatccatattcgaaaaaagtgcttttctcactcacccaccggactctgcagaaaactaaactgattcattcagcaagtgtctagtgagcagtgagcactcactacatgtttggcactgttctggtcatcaggattaagcagcgaacgagatagatgttgtccctggcctcatggagcttatagtctagttggggaaacaaataaatgtaactttaggtggtaataagtggttatgaagaaaataaaacagagaatagtcaggcgtggtggcttatgcctgtaatctcagcactttgggaggccgaggcaggcagatcacttgaggtgaggcgttccacaccaggctggccaacatggtgaaaccccgtctctactgaaaatacaaaaattagctgggtgtgatggtgcgtgcctataatcccagctattggggaggctgagacaggagaatcacttgaacctgggaggtggaggttgcagtgagctgagatggcgctaccacactccagcctggatgacagagcgagacttcatctcaaaaaattaaaaataaatgaataaataaagcagagaatagagttaatgaggagagcaagggcctctctgaggatgtggtgtttgagccaagctctctgtgaaatgaagagggcaaccatgtaactccctgagggaggagcatgtccggcagaggaaatcaacagtgcaaaggccctgaggccagtgtgagtgtggcaagccagaggaacagcacgaaggccagcggggctgagtggtgtgagggcagagaaggaggcaggggttggattttattatatctgggataggaagctcatagtgacttttgagaatggaagtgacatgattggattcacatttgtataaaagtcacgctgctactgggtgggggatgggcagtagggaagtagccagaagactttcagtgtagtgggcaagaagtgatgtggtttacactaggatggcagcagaggaagtggtaaacagtgatgtgactccaacatattttgaaggtactccttttataccactgatttcatgactgatcagtgggcacttagctgaaaacctgctattcttccctcatttcctacccttggagtgcagaggtcagaccccagggtattgcggccaggacccatcgtcctgtatgttagcgtgtgcgtggtctgtccatctgacccagagcctcgcatccctaacgtctcctgacccatcacagctagggcattgcagccccttggccgcagcccctgggtggggatgatggtcatgtgtgtgtctgactgtaccctggcttgtgcctgctctagagccggagcatgagctgttcctcgtgtatggcaagggccggccaggcatcatccggggcatggatatgggggccaaggtcccggatgagcacatgatccccattgaaaacctcatgaacccccgagccctggacttccacgctgagaccggcttcatctactttgccgacaccaccagctacctcattggccgccagaagattgatggcactgagcgggagaccatcctgaaggacggtatgggctcctagggatgtggcccatggggatggaagggggctggggcccaggcatctgtttctcggtgccctctcagcaggatggtcccctgctgactggctggctgcactggttggcatggagatgaggggatagacagattgacccctgtgtgacccccttcttggctgagccaaagaggcagggttaggatgggttaggcagcatgggccgtccttgccagcccttgggaaaactcagggtctgtctgcattggcttagagccctggagctgcacacagcacacagccaggggacaactgaggtcttgaattggagacaggcctgccagatcaaaacagggcacacccacatgtatgtgcgcacacagggtctgtgcagctgaccttgcagtcgccaaaaactgcatgctaatgtgtcctgagaaaattgtgttttgtgagttgcatccaggtcttccctctgagctgcttgggcaggttcacagtgcattgtctttttaatgtctatgtgaaggattctgagctgtacgagttctgccccaaatctgcacttgggcctcaggatcaggccgcctccccatcaatctggtggatgccagttataacctttgccctgcaccccatccacactgtagttcagagaaaatcaacagtcagcaatcatatcacaagactttggggaaatcaaaagtaactcatcaggaaaagattaggggtccctataccaagggaactgctatttaaaggacacttggagtgaaggctttggctaagtgaaaaatcacttcctaatttattcattttgttagttcaggatttttaggcctaggatatgatgtcacacttgtgcccagagccacatgcccgttgtttcagctctccatgcaggcacgggccagatgccctcacacgagagcccacatcagccatgtagtttaccatctgccacgtgtggttttgagaggctagccctgatacaaatggcagcacacagggctttcccctattccttttccagcctcctgtccctacccccacccatctgtctagggccccagagggtccctgcacccctctgtagcccagactgctcaaaggtacctgagtccgggagggccagaggcaggcagctttgaacttcctttgaagctgttcatcactggtccctcttcccccaacaggcatccacaatgtggagggtgtggccgtggactggatgggagacaatctgtactggacggacgatgggcccaaaaagacaatcagcgtggccaggctggagaaagctgctcagacccgcaagactttaatcgagggcaaaatgacacaccccagggctattgtggtggatccactcaatgggtgagtcctcccaggccttggggtgggaggagctgggagtgtgtgggcctcagataactggaggatgaaatggacagggaagcaggggaaggcaggtgaggcgggatactttagcaggaatgagagtctgcaaggggagaaggagtccctgtcttcagggaaatgggagtgattccttaaacatagaagaaatctgatcctgtcactcccagttcagggccttccaccagctccccttaccctgagaatgaggcccacgttcttgtcaggcctgcacagccccacagtgtctgcctggcccttgtctgacctcatctgcatcccgcttcccacacttgaagttctgtccccactgcctgctgtctgtttctcaaacaagcaccccggctcctcctgcctcagggcttttgctcttggagttcctcagcctggaactcccagatatttgccggactggcttcttctctacatcaagtctcactcatgccacctcctcatggtggccttctccatcactcccctgacacccccacctgcagcccggtcactctccaccccatcaccctgctttatttccctcctggcctttatcgctctccatgtaaccttgattgacctgtttcttgtgggatgggagctccgtgggagcagggaccttggctgccttggtctccactgcatccatgaatgccaaaactgtgcccaacttacaggcactcaacaaatatttgttgaatggagtgaatgaatgaaatgtgtggtccagtgatgagcaggacaggagacccctgtgaggagctctgggacagcactcatggattgggatcacaggggaggctgttgatggcgggggtgcccaggtgatgctgaccagtcgctgcccacaggtggatgtactggacagactgggaggaggaccccaaggacagtcggcgtgggcggctggagagggcgtggatggatggctcacaccgagacatctttgtcacctccaagacagtgctttggcccaatgggctaagcctggacatcccggctgggcgcctctactgggtggatgccttctacgaccgcatcgagacgatactgctcaatggcacagaccggaaggtgggcaggcatgtgcctgtgtgggggaatctgtgtgtgttgctagaccatgcttgggcgtggatgaggttctgtgtgagtatgtgggtatctgtgtgtgtccaggcctgtgtgcctctatagatgtgtgcatctatttttctgtgcatctatagatgtgtacatctgtgagcttgcatgtcttatgtattgtgttgtttgtttgaggattgcctccatttgcgtctctttgtgtctattcgtgttgtctgtgaagttgactgtccatgtgccagtctctgcatacacaccatgtgcgcctcctcatgtgtgtgcatagatacacggcatgccttggtgtgtgtctgcactctctgcaagtgtgagggcctagggacggcatatctctacacttggtcatttgggttgtcatgtgcttcacgagtcatgtacgtgttctagtatataaggcccttcatgatatggcccctgaccccctctctggtctcttttctccccacttccttcatcccaacactctttgaacaagcagcactagacagcttgctcctcccagcacacgtcacagagcatctgccctctgtgccattactcatgcagttcattccacatggaatgttcaccccagctcctcttcccctggcagactgctcaggggctacctcccctaggatgtcatctccagacccctcttcacactggatcacccgtatgtgccctatctgagacagtgggaagctcaagggcagagatcgtgtcgttttcacctcttactacctactacagctcagcccctaacagatcctggtaaatgttgaagaaatgaatggatgaatactgcccgtctgctcattagtgtgtgtgtgtgcgcgcacgcatatgagtgtgtgtgtgtgtgtgtgcacgtatgtgtgcgtgtgtgtgtttggggactatgaatgaataggaatgagcccaggagaggaccatatggacaacctcaccatcagcatccttgctggatcactcgatcacccgctggcttcaggatctaccatcccactgtgtgcaaaactatcactctctggggctcccaggctaatgggggaaacaaagcaaaacccatgcccaggacatagacaaatgaatgtacaaaacagtgatctcacaggcctccctcaattttcttccaactccttagtaacatcctctccatccctagattgtgtatgaaggtcctgagctgaaccacgcctttggcctgtgtcaccatggcaactacctcttctggactgagtatcggagtggcagtgtctaccgcttggaacggggtgtaggaggcgcaccccccactgtgacccttctgcgcagtgagcggccccccatctttgagatccgaatgtatgatgcccagcagcagcaaggtacctccttggggctgggggcagcgtgggacctggaaggggtggtgggacttaggcattgatttgagacttccctgggagtgaaggcacttcccagggatcctaggctctgacttttgaggatcctgagaagagaactcccccaacacaatctgattctctgttccccatttcccttcctgccccatgtctgtgtctcctgttcttcaacatgatcttcttcctctccatatttcctctttctgtccccacatcttaatgtgtctcctcccctatcccttctctgacctctcctcacctcttcctccctttgcctttccccatggcccttccccacagttggcaccaacaaatgccgggtgaacaatggcggctgcagcagcctgtgcttggccacccctgggagccgccagtgcgcctgtgctgaggaccaggtgttggacgcagacggcgtcacttgcttgggtatgaggtgcctggctgggtgggagtgggaagcagaccccatcaggaggatgccgaagagtggggaggggaggatccagggtcccagtcagagattaaggaggcaatgaggggcccttagggggccaacaggaagcaagggagggggagagcaaaggctctgggggctaggagggagtttagggaagatgggaggctgggagggacttgtgaggggatggcaattaggggaaactgagtgaagaatggacagctatggatggaaggaggaaattatccttcacttcttttaaatgtatttctccattactaaagtaaaataataaatagttccaaatattggaaattactttgggaggccaaggcaggctgatcacttgaggtcaagagtttaagaccagcctggtcaacaaggcaaaaccccatctctactaaaaatacaaaaattagccaagcgtggtggcaggtgcctgtaatcctagctactcgggaggctgaggcaggagaatcacttgaagcccggaggcaaaggttgcagtgggccgaaatcatgccactgcactccagcctaggcgacagatggagactctgtctcaaaaaaaaaaaaaattaacattaaaaaatacatataatatatatgttggaaattagagaggagaaaaaagcccaaatcccaccagtgagcaccatatattgttagcattgtggtaaagtgaacaccattcttttttcctcaggggggttataattgttttttacatagctgtaatcatctgtttataaaatgtcttctgcccttttcggttcaagtgtcacagcattttctgtgttgttattgcatgattttaacaagccttgttttttattcaaaatgggttgtgttcattgtaaaacggagtaagtaaggccgggcacagtggctcacacctgtaatcccagcactttgggagcccaaggcgggtgaatcacttgaggtcaggagttcgagaccagcctggccaacatggtgaaaccccgtttctactaaaaacacaaaaattagccaggcatggtgtcacacgcctgtagtcccagctatttgggaggctgaggcaggagaatcgcttgaacctgggaagcggaggttgcagtgagccgagattgtgccactgcactccagcctggcgacagagcaagacatcatctcaaaaagcaaaacaaaacaatgaaataagtaaacagtatagaaaaacacaaaggagaaagcccaaatcatcccagattccaccacctgtagataaccactgttaccatttgggggaaccacctcccaaatgtttccctatgatttactttcacataaatggagtcgtgctgcacatactgttctgtttcctgcttttgtcacttgacagtatgtaacgagtacataagcagcatttttaatggctaaaatatatttcatttgataaatttcacgtaatttactcaaccgtttctctactgttggatgtttaggttgtttccagttttttgatataatcacaacccatgtttgttgagcatggactgtgtgctcagcactgtcatggacatttcccttgcagtaatttgtttacccctaaaaacatcctggtgggaaaagtggttttattatccccattttacagatgaaaaaactgaggcccaaagttagagcaggatttaaacccatgaagtttgacccagagcctgttttgtaatcatgcctctgctatttgtcacatcatcatgcctgcccatattctggatggtttccttaggatagaatcccggaagtgaaaatgggtcagtgcagccatagtgtacacctaggagggagtggctggggtcaggagagggcgttggctgagagggttaaggaatggaggggccaaggtaatgggaggatcatccacatggaagttgaagtcaccaagaactgaaccaggagtgattttggagaaagtgctggtgagccaggagctaaaaacccttacagatgacagggtgcagcctgggagccttccagaagtagaggttggtacagaagcatgatgtaaggggaagaacagtccagggaacagcagtgaggagcaaggaggacacataccagcctccaggtccatggtccatgggatacgggaggggaaatcgccacccatggggccatgggaagtttcagagattagagaggggtgggagatgagtcagaccaggcaagcgcccagctgtgaggtctggagaccgggctcacacaggagcctgcacttgtggaggttaccaaggcacagacaaaggacgtcgtgatttagctgctaatgggccaagacagatagtgatggtgaggcatacgttctggggacaggatgggtggagcctgcgcggatgtggtgccatcttcacttctgctggtgggaccgatgaaactgtgaaataaaaagtccagggaccggggcagggccctggggttcccggagatgacttccaaggggaagttcatggagaagtcagggaaggagtggggagagcctgttcggtggtgacagaggtatagaggccatgggctctcttggacaccatttgattctcaggtcacactgaagtacagtaagcattaagtagagtaaacatcactattgttgcttgggaaagaattgcagtttccatccagataatttgtttcatgaggaattttgtactagaaaaaattactttgtattattaaaaaatagtaaaacaaacaaaaatggtgcaaagggcttagtacttgtcccacgaccggggtctgactttccccctcacgatcctgtggtgcccacagcgaacccatcctacgtgcctccaccccagtgccagccaggcgagtttgcctgtgccaacagccgctgcatccaggagcgctggaagtgtgacggagacaacgattgcctggacaacagtgatgaggccccagccctctgccgtgagtcacacgccctgccccaccctgttggatggcaggcctgcagggcagctcggctctggcagtgcctatactggagcgggcaggaagctgggggcacccaacttctcgctgacccctgactcattccctccccagatcagcacacctgcccctcggaccgattcaagtgcgagaacaaccggtgcatccccaaccgctggctctgcgacggggacaatgactgtgggaacagtgaagatgagtccaatgccacttgttcaggtgtggagcggggctcagatcacacgaggcacccctcagtcaaggaggcaggggagacgagggggccaggttcagtggctcatgcctataatctcagcactttgggaggccaaggtgagaggatcacttgagcccaggagctcaagaccagcctggccaacatagtgagacctcccactctttacaaaaaaaatttaaaaaaactgccgggcgtggtggcgtgcacctctagtcccagctacttgagaggctgaggtgggaggatcacttgagcctgggaggttgaggctgcagtgagccatggtcatgccactgctctccagcctagacaacagagcgagacctgtctctaaaaataaaatgaaaggagcaaaagaatttagggcagaggggatggagccctgagcaggagtggggtctgctatccccttcccagcctgggaaactgagagggctgagcttgcaggggacagagcatagctctagactggagaggaggaacaaggcagggtagatctcctcctgggaggataccagagaccccttgagagaaagagtaaagcatccagtgagaccagagagatggttttgaattctctaagagaaatggttttggatccttggaaataagggacaccaaaggcagagaataatagggaagaagaggcagtgaagagagggtcaggacaatgagtactcacacccatccctgccccccagcccgcacctgcccccccaaccagttctcctgtgccagtggccgctgcatccccatctcctggacgtgtgatctggatgacgactgtggggaccgctctgatgagtctgcttcgtgtggtaagagggatgggcagagggagtcaggctgggcctgggggaggggcatcctgagagcatgccagttgggggtgccggagacacctgcaacccagcacttgggtggccttgagtgagttaatctcggtggcctctgtgagaggagagccccatcatcacagcattgtgtctcagcaaactcatgcaggaaaagcactcagcacaggtcctgtgtctgctgactcatggggatgagtgagtggagtttccagccgaggcactgctgcggggccttccccacccttcctgactgggctaagggctgctggttatgggagggccgctgcactcacctgcccagtactgtgatgctgtgtaatcgtgaaggccctactcagctactctttcttcctcacagcctatcccacctgcttccccctgactcagtttacctgcaacaatggcagatgtatcaacatcaactggagatgcgacaatggtaagagcttgctctcctcacctgctgattcctaagacagctagaggctacagccaggccctccagggaaggcaaagggcttcagaatccagcagggcctccctccaggacactgaatccctgctgggttgcctgggagaaaacaggagaagtcagaaatgcctggagggagccacgatggaccaaggggagaccatcaccttttagtgtcattcctaccccaggcagggcctgagctgcccaccctctagtagggctcggaggccagggagagatgagtgagatgggccagagaggcagagcaaggagaaaccggtgcctgactcctttctccttgcaaacccccatttcctggagtccttggtgcacccctcaggctctgggcttcaggctcagaagcccacctggcagatagccatggaccaggtgatgtcagccttgagccaccagggctagtatgtgtgtaaatgtgcgggcaggtgactgccgtgtgtggtgtctcagggctctgttctgtctgtgttgtgttgtgacgtgctgccccagtggttcctgtcccagctgatgtgtgagcggatgtgttgggtcagtgccacgttgcccctcactttttctgtgtctcgcatgccaatggttgccccggcggtttctgtgtttcagagaaggattgtggggacggctctgacgaacagacctgtcctgagcctgccggtcagtgcatagaagcacatgcaccatcacccagagctcagctggccccagccccctgcaggttctccaggcccctactccagagctgctaggatatgaagaaaaagcaacagagaggagggagagcagaaaacagagggagaaagcaaatagtggtcaggaaagaagcagagacggcagagggagcctctgaggaaaggagatgacagagaggtggtgacaaaaagcccaagatgcaaggggaggagagagttagagaagcaaatccagttggaaaagaggcaggaacataacccaaaccccagtctccaccacatgtcccataaatacagagggtcaagtcaagcagcccccacccaatgctgagaaagcaggagcttccttcagccagcctcagcgagcttggtccagaagtggcccccactcttgccagccacaggcagggcccctgtaagccaggcacccagagcatggtattcagcagtgccagcctcagggcaggcctgtaaagcttgtctcaagccggccacgcctgcaccccacctacctctctccctccaaaactagagaaacccctgcctttcccccaaaagcaagcagacccctgttcccacacctgccagaaaggggaaatgaaatgtttaatgttccctgcacccagcctttctgagcttcagtgaggggccctccaggagccttctcctcctcctcatcctgaccacgtgggccatggtgcatgctgcagtctatgcagtttctgtgtcttttctgtttgttattttcccagtgggggggttagggtgggctgagggtgggttctgggcagggggcccaagctgggatcacagagaaggctgctccaccaactcccgctttgcctctccccttcttcccccaccgccagacaatgactgtggggacaacagtgacgaagccggctgcagccactcctgttctagcacccagttcaagtgcaacagcgggcgttgcatccccgagcactggacctgcgatggggacaatgactgcggagactacagtgatgagacacacgccaactgcaccaaccagggtgggcaccaggggcccgtggggtggggatgagatcgagccccctgcatcagacacccagcctatccatctgtctttcagacccacggtgtgtcggccaccatctgggagccagaggtagcctaggcatggctcttgtccttcaggagctcccggtcctgtgggagagggaggttgccgaaaaatcattgccacacgctgttaatatcatgcgctttgcagttggtggccttgggtttgagctccagctctgcagcttattatctgggtggccttgagcaagttacttaatctccatgggcctctgtgagtttcgtctgcaaagtggggtaataatagcaccaacatcacagcgctgatgtgggagtttagtgagatcacgcacgaaaagtgctcagcacacggcctgtgtttggtaaatagtagcttgagaaaaggatgctgcaggcagggatgaatgagcctgaagagacagaggagagagggcctggctccacaaggctcccagtgccctggcctctggggcccagcctcgggggcggtggggacctagttttctggagggatgggccctctcaaggaatgctggcttcctagctctggaagatgtgcagatttttatgtgaaaactaccaaatttttaacactacagtattagtttctctcgtctcacagttctggaggctggaagtcccagacccaactgttggcagggtgggttccttctgaggccgtgtgggagattctgtcccaggcctctccccagcctccgcggtttgctggcaatctttgcagctccttggcttgtcgaagcttgacccgatctctgccttcatcttcacacggtgtcctccctgtgggcatgtctgtcaccagatccccatttcccctttctgtgaggacacctgtcatattggattaggatacacccttatgacctcatcttaagttgaccatctgcaaagacactatttccaaataaagtcatattcacaggtattatgggataggactaatatctttttagggaacacaattcaagccataccaactggcagttgattttagaagttttaaaaggctgggtgcaggccaggcatggtggctcatgcctataatcccagcactctgggagggtgaagtgggaggatcacttgaggccaggggttcaagaccaacctggttaacatagggagaacccatcttgaaaaaagaaaagaaaaaaaaaaaaggctgggtgtgttgactcacacctgtaatcctatcactttgggaggcaaggcaggaggatcacttgtttccaggagtttaagaccagcctgggcaacatagtgagacccctttctctacaaaaaataaacaaaattagctgggcatggaggcacatgcctgtagtcccagctactcagaaggctgaggtgagaggttgagcccaggaggttgaggctgcagtgagctgtgagctcgccactgcactccagcctgggtgacagaataagaccttgtctcaaaagaaaaaaaaagtttaaaaaaaactacagaccaaactcttcctgcaggcctcatctgacccatggaccactagattacagcctctgccttatagagttagggcacattcccaccctagtaggagaagactggacagcgttgagtgcccaccttgagccctgccctgagagggaggacagagaaggccacaggaagcttgggaaatagtaattgcgtctccagggctatctctgtgaaggggagggtgaggggcacaggtgatatcccttagggttctgagaaggggcctctggaggctgtgtggtgtggtgagaagagctccctgccgctcccagataagctgggcaaatttggacaagttgcttcccctgagcctgggcatcctcctttatgaaatgagctgaggtatgtgaggcctggcgtggaggagcagggtgtcactattggtagcagttgttaactatggtatgagctggatggtctgggaccattcaggaggagttgtgtttagactgcaggtaaatggacaggagggagggtcttccagtggggatggcatggtccggagaatgctgtcgtcaagacttagagggtgaaactgagcacttccgtagggtgacagtggggccaggtggagccgttcagaccgagggaaaggctcgtgcagggacagtggggaatgaggctgtcctcaaagggggcagatgatgacagcaggtgtaaatcgtgagaggcttgatttgggaggcactgggaacctttgaaggatttccaagccggaaggtgctgtgatgtaggaggtgatttcggaacacagccctagaggaagattagattgagaagaggttcaggggccccaagaaaggaaaatcagttcagagactgctgctgaaagtcccggcatgagatgagagcatcagctgggtccagggtagggaagggggaggagcggggtgtctgtggcagcatgagtgtatgagtgtggggctccaccaggcagtgctcctgctcctctcctggcctcctgagtcagatctcaggacagcagccagagtgatcctgacaacataagtcagatcatgccctggccctgccctccagcctgtactggctccctgcacccttggaacaaatgccaagcccctctgcacggcctgcagggcccccacccctacccctctgacctgcattcctgccctcccctccccctgcactctactccagctgtggcgttttcttttttctttttttttttttttgagatggagtctccctctgtcgctcaggctggagtacagtggcgtgatctcggctcactgcaagctctgcctcccgggcagctgtggcgttttcttttctttcttttttttttgagatggagtctctctgtcgcccaggctggagtgcagtggcgcaatctcagctcactgcaagctccgcctcccagttcacgccattctcctgcctcagcctcccaagtagctgggactacaggtgcctgccaccacgcctggctaattttttgtatttttagtagagacagggtttcaccatgttagccaggatggtctcgatctcccgacctcgtgatccgcccgccttggcatcccaaagtgctgggattacaggcgtgagccaccgcgcctggcctgtgtgctgttttctgaagtgctggcgtagtcctatctcggagatgagactttgcagcggctgttccccttgcctggagtgtgcctccagggatcctctgggctcactcgctcttcatgcaggcctctgctcagattccttctgcccagaggtcttccctgaccatcttacctgacagatcacccccatccctctcagcttctacccagctttatctccatagctttatcaatacctgaaattacagtctagatttatgggttatgtcttgtctctcttccccattagaacctaagctccatgagggtagggactttgtctggttcagtgctggccccaggacagcgcctggcacacaggaggcactcagtaaacatttgtggcatgaatgaatgaaatagaggctaaggaggtgggcatttgggctcaggccttagcaaattgcttctccagctgagatctccggtgtcaatggggggattagatgaggtgattgtggggcccttggaggtgtgatgcctcctgactctactactgagttggtgcttccaaggagtgtcagcaaagcttggcagactctccaggcctgcctctgctcatatccccaggctgggcttaccggggtggcagggcacagggatgaggagggctgacctgggcaacccctccctcctgaggccctccactgtccctctgcagccacgaggccccctggtggctgccacactgatgagttccagtgccggctggatggactatgcatccccctgcggtggcgctgcgatggggacactgactgcatggactccagcgatgagaagagctgtgagggagtgacccacgtctgcgatcccagtgtcaagtttggctgcaaggactcaggtgaagaggatggttggagggcgtctggaacagcacaatgtgggcaggaggagaccgtgttgagagcagagtagcggcaaaggggatggcactgtgctgtgtggagtggtgctggggacagtgcaaggcaaaaggcagtccagaggaagcttgtgtgtcatgggtgggggaaggcatgaagggccagagcctgcacagaggacctgagaagccaaaaccctaccagagttgagcttcagcacctcctgctgcagattcctgccttgtttgttgcctatgtgaatttgacccaaaaagcctcggggttcctcgtggaccccacagcgttgcaatcctgaccctattagagaagcccacagggtctggaaggaagggcagggggagccccagtccccgggcctgggccctcatagtgcacctgtccctcagctcggtgcatcagcaaagcgtgggtgtgtgatggcgacaatgactgtgaggataactcggacgaggagaactgcgagtccctggcctgcaggccaccctcgcacccttgtgccaacaacacctcagtctgcctgccccctgacaagctgtgtgatggcaacgacgactgtggcgacggctcagatgagggcgagctctgcggtgaggcctggtcccaggagaagggtagggagggtggctgggtaggagtctgggccaaggacagtctttgggggacctgagtctaggagagagcagctctggcagccgggcaggcgagcagcacccagagtggtcaccagcagcctgtgtggacctggcgctccccatggcgctgtgctgagtgagccacgccattagagcagtttatccacaaggcatccctgggggccaggtgctctgttttctccgtttgacagatgggagcactgaggcatggaggggttccatagtggtcccccagacttgggccaaggtagtacagctcctaaactgctgtggagactcagaccccttgcccacatgcataccacagagagatgcggagtgctcttgtggagacaaaggcaccagggttgactgctgatggtcagggcaggcttcctggaggatgtggggattgcatggggttcccaaggacaggcagtacttgcagagtgagtgagaaggcatgggggcaggcgcggtggctcacacctgtcattccagcactttgggaggctgaggcgggcagatcacttgagctcaggaatttgagatcagcctggccaacatggtgaaaccctgtctctgctaaaaatacaaaaattagccggacatgtctgcagtcccagctacttgggaggcagaggcaggagactcgcttgaacctgggaggcggaggttgcagtgagccaacatcctgccactgcactccagcctgggcgacagagcaagaccccatcccaaacaaacaaacaggcaaggggaggagggtgcccattcaagaccaaaagagatgaggttgggggagtccaggagtcagggaggaccatgtggtgtgacttggggatgaggagcagagcagccttatctggtcctcttagccaggcagagcccccagttccttggaagggaggagtggaagataaggccacagggactggctgggagaactgccgacaggctatcagtcaggctggcagtttccagggtgtgccagaggaccaagggtggtataggccctgctgcaccccaccccaaacccctccaaatcaggagagatcagcacaaggggactggacctaaggacctcccagggtccctcccagggaggcaaaaagctggggcccccgccctgggcccaagaaggcaggaacatatcgagaccagacagagatattgaggggtgctccctgtgggaaggggaggtatggtgccagctggtgggtgcaagggtcccaactctggtcctgagggagcccaggaagtcctgggctgaagctcagcctgaagctcagcaggaatggagacgaatggggccgtgggcagggcacaaggacttggtccaggctgcccaggacttggggcccagcagggccgtggtcttgcctcctctcagcttctgaccctgggtctgttccatgcctgcccctcccctagaccagtgctctctgaataacggtggctgcagccacaactgctcagtggcacctggcgaaggcattgtgtgttcctgccctctgggcatggagctggggcccgacaaccacacctgccagatccagagctactgtgccaagcatctcaaatgcagccaaaagtgcgaccagaacaagttcagcgtgaagtgctcctgctacgagggctgggtcctggaacctgacggcgagagctgccgcagcctgggtgagacaacagtgaggtgtggtggggcaggccgaggcaggcctctgagctgcagtgggttgggcttggtggccaggtgccaaaggctgagttttccaccctagcccccagtgcccggaccagcagagacctgcctgcgccaggacgggtggcacacaggcagctagccccttgctgaccccatcacatccctcccatcccagaccccttcaagccgttcatcattttctccaaccgccatgaaatccggcgcatcgatcttcacaaaggagactacagcgtcctggtgcccggcctgcgcaacaccatcgccctggacttccacctcagccagagcgccctctactggaccgacgtggtggaggacaagatctaccgcgggaagctgctggacaacggaggtgaccaccgattgctgccaggcaggatgcacacaggcggagcgctcaggcgctaggggccacaggtcccatccaagtggccccaaagcagaggcttggctcccccatcccccacacttctgttcattgggttagattttgctgtgggtctccatgcctgacgccccgtaattatcgtcagcagaactgccagcctgataattaacaaaatgatcagccttacctttgaatggcctggagctctgctccccagatctagaattgcaggcttgaaagaaaaaagccacttaggagtggcgtacctgaacgctgctttctgtcccaggcagcgtggtgcaccccagacttccttcagtcacacacaatagtgagtgcccactgtacacactgggcagtgggcatgcagcagtgatcaaaacaggctgttttcagttgtgtggtcaaggaaggtcccctgagaaggtgacatctgagcaaaggcttctaagaggcacattttactagagaagtttgtattgtttgtaataatacaaacttgaatttgaaaccattacaaatgtccatcaacgaggggggaggctaagtaaactgtgatgatatccacactgtgcaacagtctctaaaacaatgaggcacacacataatgtattagcatggaaaaatctttatggcagtcacttgagctcaagcagttgaggctgccgtgagccatgatcatgccactgcatccagccttggtgacagaagaccctgtctcaaaaaaaaaaaaaaagttggggagacaataggagtcctactcttgaatatgggcacatcagaaactttggcagaagtgccagggttgagggtgggtcatcgagggctcccaggatttcacacattcatgcacagctccccaggagacgctaacctttcactgccctctcttctccagccctgactagtttcgaggtggtgattcagtatggcctggccacacccgagggcctggctgtagactggattgcaggcaacatctactgggtggagagtaacctggatcagatcgaggtggccaagctggatgggaccctccggaccaccctgctggccggtgacattgagcacccaagggcaatcgcactggatccccgggatgggtgaggaccttgcccagccttctcctggccccatggcccccctgaagtcccattcagcctggccagggacaccttactcctcagtgccatctgcctcctcccaccctctacctacgatcccaccacagtcgctccctgagggccctgactttagccctcctgacccctccccactccccaggatcctgttttggacagactgggatgccagcctgccccgcattgaggcagcctccatgagtggggctgggcgccgcaccgtgcaccgggagaccggctctgggggctggcccaacgggctcaccgtggactacctggagaagcgcatcctttggattgacgccaggtcagcaccctctgtgccctgagaaggcccaagtctgtggcaccaggacggggtggggaggaacctgtggtgatgagggtgatgagaaggaccaagggatctagaactaggaacggtggcaaaggactgggcacaggaggaggaggacggaggggcgtggggaggccagggccgaggggagggggcaggtagaggaggcggaagcagggccatcagctgtggttattcacactgtaccatcctctccactcacctgtcctctccactctgttccctctgctggggctgtgtctgcccagagggaggggaaacttctttctaattggtctgcccagggagggtgcctttttcttttctttttttttttttttttttgagacagagtctcgctccgtcgcccaggctggagtgcagtggcgcgatctcggctcactgcaggctccgccccccggggttcacgctgagggtgcctttttctgactttcatcaaagccctgagtgctgacagcagccctggggagaagtgaccgaaagattcccttggggcttgggaatcggggcctgagaggtgaaacctggacctgttgggttctcacaccttggtccttctgtctgtctgctctggccagcaaggcttaggggagggaatggtcccatgctcttcgctgggagggctgtggccagggcccagagggtgggcacctgggcagagctctgagggctgagatcccagctggcatcctcattctgctccatcatgctcttaggtcagatgccatttactcagcccgttacgacggctctggccacatggaggtgcttcggggacacgagttcctgtcgcacccgtttgcagtgacgctgtacgggggggaggtctactggactgactggcgaacaaacacactggctaaggccaacaagtggaccggccacaatgtcaccgtggtacagaggaccaacacccagccctttgacctgcaggtgtaccacccctcccgccagcccatgggtaaggggctcggggcctcgagcagccggaagggagccagcagcctctttagaagctgtagaagctcttaggagaggagagggcagtgagaacaggagcaagtctgtgctgggatggcaggggtaggccggctgttgacagaggcactgtctagcagcagagaagggtctagtagtagcggctgctggaacagggggaggagagtgggcgaggaaggggtggtccatgtagggagcagcaagtcacaggatgctctggcttcttctcttctccaccctgcccccagctcccaatccctgtgaggccaatgggggccagggcccctgctcccacctgtgtctcatcaactacaaccggaccgtgtcctgcgcctgcccccacctcatgaagctccacaaggacaacaccacctgctatggtaggagcccctccctccagagccagtgagcaactgaggctggagggaaggccgcaggccccaggatcccggttgtcagctaaggcagagtcccagtcgggagggtcccgataggagaggctccagagacagccactgtgagaaggggctgcaggtctgccaggggggctgcacccagcggggtatgtccacggagccaagggccagtagcaaacagacggatccagaagaaggcagggcctgaaaccggattggtgggaagcacagaggcagggactgccttcagtgaccagcccatgccccacagagtttaagaagttcctgctgtacgcacgtcagatggagatccgaggtgtggacctggatgctccctactacaactacatcatctccttcacggtgcccgacatcgacaacgtcacagtgctagactacgatgcccgcgagcagcgtgtgtactggtctgacgtgcggacacaggccatcaagcgggccttcatcaacggcacaggcgtggagacagtcgtctctgcaggttcttcctggccctggatgcccaccagtggacatgggcacctccacccgccccttgctcccaaccctggtctacttggtccgagtggtccttctcccagtcctgttccccctcagtgctccagcctggtttcctgatcccttttctccagaaggcacactggctcccctcctgacccactgccctgcagacacccaacaactgactccctacttgtgcccccagacttgccaaatgcccacgggctggctgtggactgggtctcccgaaacctgttctggacaagctatgacaccaataagaagcagatcaatgtggcccggctggatggctccttcaagaacgcagtggtgcagggcctggagcagccccatggccttgtcgtccaccctctgcgtgggtcagtctagggcccagggccggggagcatggggtgtggggctgggaagaagaggaccctgacctttccctcttggcaccctccccccaggaagctctactggaccgatggtgacaacatcagcatggccaacatggatggcagcaatcgcaccctgctcttcagtggccagaagggccccgtgggtacgagcttccctgcccacccccacagcccctccctaattccttgaccagcaggtgcttgcagggtccttcagttgcccctcagcctccccagagccctagcttagtgcctgttctcaccatctgctcccttccctggatccccagccctgggccagactccccggcagtgactcccccttttccaggcctggctattgacttccctgaaagcaaactctactggatcagctccgggaaccataccatcaaccgctgcaacctggatgggagtgggctggaggtcatcgatgccatgcggagccagctgggcaaggccaccgccctggccatcatgggtgagggctgctgggcgaagcagagatgacgcagagcaggccaggccagacctactgggagacaggggctggcttggggcagtctctcaccatgtggggcgggcctgatgacttagggccaatgggcccttcaggagagctgggtgtggggccttcccaagggtctcatcccctcctgctgccccaggggacaagctgtggtgggctgatcaggtgtcggaaaagatgggcacatgcagcaaggctgacggctcgggctccgtggtccttcggaacagcaccaccctggtgatgcacatgaaggtctatgacgagagcatccagctgggtaggtgcgaggccgggcggccgctgggggctcaggggcaacaggggagccgtccagagctgcaggctgcagggccatggggcaagggagtaagtgggttaggctgtacccaccacccaaaggggctccttgtttccttaccacaaaggcgccttgtaggctcccagcagccctgttcacaaggccaggggcccaggaggacagaaaacctgagagctgggtagggtggtgacccccattaggtccagggtagtcagtgaccatcctgtttctgagcagcccaagcctgaccctgaggtcccaaggagggccacctaaccctttccctctgcctcccacctgcccccagaccataagggcaccaacccctgcagtgtcaacaacggtgactgctcccagctctgcctgcccacgtcagagacgacccgctcctgcatgtgcacagccggctatagcctccggagtggccagcaggcctgcgagggtcagtgcctggctttcctcccagccttgtcccagctccccaaccctgacccctcctaccctacagccccaccttcctcttcttaccttggggacaagactacattcgtcgtgtaggggacactggactatgaagtggctatgactctccagtgcctccagtaggattttggaaaaatagatgtcagcaggcagatcggggcagctgcatggaagaggcatgctctgagctgggttttctaggacaagtaggatttggatgcattgttcaaaggagagggaactatacacaaggcaaggtgtgtgcaggagccccagccaagagtggtgggcaaagtgtggggaagtcctggagataaggctgtgagctaggcggggctcctgtgttctgagccaggagtgcctggaaagtgatgtttggggaagatcaacctggccgcaatggtggtggggaagaaacagaggcggttaaaccagttaggaggccattaggagtaatcagagtgtgagatgatgggcctgggctgggctcagtaagggttgaagaaaagaaatgaaacccagacgcatttcacaagaacctgctaactgatttatgagcttgctgggggacagcatttcccaaaagtgcattcctaggagcctccctctttgatgtgggtagattttaccaaaagaaactctgagttgaacaaagtttaaaagtgttttgtgctgcagaacttctcagagccttgaatatgtttatgtgtgccaagaatttttcaagcgtttggggttttccaaaactcacttgaccattcatttttttttcactgagtctgagcaaccagggaccatgtggggattcactttgggatgtgctgtatcaaagggataaaggcaagggaggattctgaggtgcatgggtagtggtgcctcaagacatgggaaaactgggccaggcgcagtggctcaagcctgtaatcccagcactttgggaggctgaggccggccgatcacttgaggtcagaagtttgagactagcttggccaacatggcaaaactccgtctctactaaaaccacaaaaattagctgggcgtggtggtgggcacctgtaatcccagctactcagaagacctaggcaggagaatcacttgaaccgggaaggttcaagggttgcagtgggccaatattgtgccactgaactccagcctgggcgacagatcaggactccatctcaattaaaaaaaaaaaaaaaaaagagccaggtgcgtggctcatgcctgtgatcccagcactttgggaggctaaagagggcggattaccttgaggccggggttcaagaccagcctgaccaacacggagaaaccctgtctctactaaaaatacaaaattagccgggcatggtggtgcatgcctgtaatcccagctactcggaaggctgaggcaggagaatcacttgaacctgggacgcggaggttgtggtgagccgagatcgcgtcattgtactgcagcctggggaacaagagtgaaattccgtctcaaaaaaaacaaacaaagaaaaacaaaagaaaagaaaagaaaaagaaatgggataactgggaatgagactggcttcggagtgaccttagggggttgagtttttgatgttggagagagggtgtggcatagaccagacagagggaggacaaagaggaaactaggatcaggctgagcaccaaactggaagtctagattttggagtcacctagtcctgattgtctggtctgaactcccagactttccctaaggaacttgcaggggtgcagggttgggttgtgctgggtggaggccggcagagcacagggtgagaaatccgagtctctgctgccctctcatggtggctaggggtcctgcaggtggttccccagagctaccagccaggtgcgcttcctcccggcccatgctctggcctcaggctagggtgtgtgtgctgggtggaggatagggatgatggtggggggggatgatatcaaaggagaagcagagaacagttggagggtgacaggaaccaagtttaagggagtgttggcgatacccatgccttaagtttccttgtctttcaggcgtaggttcctttctcctgtactctgtgcatgagggaatcaggggaattcccctggatcccaatgacaagtcagatgccctggtcccagtgtccgggacctcgctggctgtcggcatcgacttccacgctggtgagccatttggtggcagagggagttgggcgtggcgtaggagctttaggggtggtgtggtgtgccctgagggtccagtgagaggctgcctgaattggcctgaggtggggcacttgctacagctgccaccctgactccacctccccttcaagcacctggcccctccggcactctctcacctctgtcttgagccttgtgagattttgacccctcaccttacccctgccttattgggcatccccatgtcacctcctccacctccagaaaatgacaccatctactgggtggacatgggcctgagcacgatcagccgggccaagcgggaccagacgtggcgtgaagacgtggtgaccaatggcattggccgtgtggagggcattgcagtggactggatcgcaggtgagcagtgggcaggtttgtggggcttggggtgtggcagaggactgggggacgaagtgagaggaggagttggcgggagcaggaagaggagctgtaggggtgcctgggagcttggagacaccaggtccacctgtcctcacctaacctccctgagccccaccaactccctccttaggcaacatctactggacagaccagggctttgatgtcatcgaggtcgcccggctcaatggctccttccgctacgtggtgatctcccagggtctagacaagccccgggccatcaccgtccacccggagaaagggtgaggagctggaaagactggccttgtcattctgcccatggcccatgctgatgaggccctgtctcctccagggtctgaggactgacccccacttccacccccaccctacaggtacttgttctggactgagtggggtcagtatccgcgtattgagcggtctcggctagatggcacggagcgtgtggtgctggtcaacgtcagcatcagctggcccaacggcatctcagtggactaccaggttcgcacgccaacttggccttggatccgatggtagacccctgacccaggctcctgttccctgtgatgagcccattctgggaggacttggagcccaggggaagtcacagggtctcccagcccagccctccacccagagtaggactcctgctaccacagagatgatgggcaggggtcgctcagaagtggggagtgggggagtggagagatgcctggaggtcaccttatcagcagggcagtgggcaggagtgtatgcaggaggcaggagtgagttaggggaggctgaactgagggcctcactctggcccaggcactccctgctgccccagacatggggctggcagcgagctcagccctggaggtgaggtgggtgcctctggcctgtaggatgggaagctgtactggtgcgatgcacggacagacaagattgaacggatcgacctggagacaggtgagaaccgcgaggtggttctgtccagcaacaacatggacatgttttcagtgtctgtgtttgaggatttcatctactggagtgacaggtgagggcttctgtcctggcctcctcagctgatctcttccttccctcctgcctccactgatgccctgcttgtgccctgtccttccctcaggactcatgccaacggctctatcaagcgcgggagcaaagacaatgccacagactccgtgcccctgcgaaccggcatcggcgtccagcttaaagacatcaaagtcttcaaccgggaccggcagaaaggtgaggctggggctctgggctggggtggagaggtgagggggactctggcctgggagagtgctccccagggaacccagtgtgagagggctgggagacaagttagacccatggggcaacttccgatggcccgagagacccagggatggggaggaaaggctgaggtgctctgggacagatcttggcattggactctgggccctggagggtcattcaagctgggaataccgaggcagagggcagagctttcgccaaagcctggatgacaaaggcaccagtgagcctttcccaaggcaggccctgccctctgtaccctcccctcccccaggcaccaacgtgtgcgcggtggccaatggcgggtgccagcagctgtgcctgtaccggggccgtgggcagcgggcctgcgcctgtgcccacgggatgctggctgaagacggagcatcgtgccgcgagtatgccggctacctgctctactcagagcgcaccattctcaagagtatccacctgtcggatgagcgcaacctcaatgcgcccgtgcagcccttcgaggaccctgagcacatgaagaacgtcatcgccctggcctttgactaccgggcaggcacctctccgggcacccccaatcgcatcttcttcagcgacatccactttgggaacatccaacagatcaacgacgatggctccaggaggatcaccattgtggaaagtgagcccagaccctaagtcttcccaggaagtgggacatggggcggggagcagcacagactcttagaccccagccaggcactctaccctaggtctgaatcccagcagctacaactcagctgaatccaactgcacccccgcagttacatgactcctgatttggagtcagcgtcagcccccgacttcctcccgccactggtcctagttctgccttcagagctgcacagaacaagcgagaggtctctgtggagcccaacgctcacaaacccaggctgcagacatggggctgagctccagtcacttgggctttcaataacttgggtcagtttcctgctcttgccaagcctgagccttctcatctgcgtggatgagtgtctcatctgagacaggattcctcgagctgctgcgcaggaaggcttagctcagtgatgctggggacggagtgtgtgctctggaaagagcagttacagtgtcagggctgtcatcacaggacagcctttcagctctttgaaaactgcatcctgctacattttctcttcttcagcctggttaccaccgggtcccttgactcattcatttgctcatatattcattcagctggtccataaagacctgccaggcaccgaactaggtgctacgtatacagacctgtcctttcagccttttctgggacattttctgctgcacatagtccagcctgcatgtctgtctaaaaatgtagcatccgaagctaaactcggtactccatgctcgtagcttgatcaggagagactggcacatcaatccccagacccctggaagggatgtcccctcacctccggctgtctgcagaccataccacagcatggccctttggcagccaccatcgcttatagccactaacactctagtcttttctcttacactgctgttcggctgtgtctctcactgtgccttggttctttaacctgagtttaagatgtctgctttataaaataatcaatccagctcagggtctttttaagtagggggctccccagtacagcccaagcaggatttgatttacagaaatctacattgcactcagctcagcagaactgcagctccaggaaagtgcaaacacaccagaaagcccgattgccctcagtgggagagggttgagaggtgaccacaggtcatttgagtgaggacagcagaggttgggggcactgagtcagaccctggtgcccccgagccctctctgctgcacctcttgcactcccataccccacacttcgccttccagccaggagagcacctgccccaggctgtcccccacggctcctgtgcaggctgccctctgggccctcctgacaaatcgctgctcctgtctcttcacagacgtgggctccgtggaaggcctggcctatcaccgtggctgggacactctctattggacaagctacacgacatccaccatcacgcgccacacagtggaccagacccgcccaggggccttcgagcgtgagaccgtcatcactatgtctggagatgaccacccacgggccttcgttttggacgagtgccagaagtgagctgctgcctggggatgggggtagcagggagaggtgggactcggggtggcagaaactccccaggcagatccaagcgggggtgcaggagaggcaggccctcacttgagctccacccttccctgctgtgtgatctggggagaggtgcaaaagcttcctaagcttcaggttcctcttctgtgatacaagctggctaagattccagctgcctgcaccaaagggagcatcaggactgtgggggacgctctgcctttgtgattgattcattcatcagagcaccatgttggaggcacagggtagggcctctagctctgggatccaaagcttcaggcaaagaatgtttgtcgaacccttcgtacagaagcctaaggctgggcctaccaagccacctagctgggttgagaagtcatacttgtgggaagtaatggtaactggcacagggctgtatacgggtgaccacaggtgtcatgaaggcagtagattggcccagagcctggaactggaaaagacaaggaaggccagctcggacaggggaagtgctttgagcaaaagcctgaagaaaggcaaattcaaggcagggaggacagagggggacctctgcatgccatagagcataggcaggcctgagcccagccaggaagtgaggtcagggtgcggaggagttaggagcacaagccaggacaggtggcagaaagcacccgggggtgggtgctccccctggagggttcacccgcagtcagcctgctctgttctcccgcaggggcagccctcatcccggctgtttgggcctctagtgagccaccccctcgccttagggatccaggcccacatgttagcaacatttttttcccaattcagcagtgcttggaatgtttttcaaaagctttactaggaaactagtaaacacaacccaaagcagctgtatagatacgtgagtgtcccgaacccagattccccccaccagtcccccaatgtcagtcacctccaacctggctcaaggaccctctgtttcctcctgcctctgtcatctggcacatctgcagctgatgatgaaggtccagtccccccttccatgaccctcggctgcctcacctgtctggggatggcctcagagcctgtccctcatgagtctggagcttccctggagggtccagcaaggctgcctggccctcgtcccagaggacgtgaccccctggctgcccaccaagctcctttcttatgaggccaggggattccatcacgcattcagcgagtggcttttgagggcaaagaaggtgcagaggacccagtggggagcgcgaggggcgtcatgaagagcttcgtggctgtgtgctgaggactggccccacctggaagtcagggaacgtgtccttgaagaggcggcatgttagccagcgtctgaggatggcaggagtggctgggtgggagcatggtcccagtgcccaggagaaagagctgagctggcaggaggggccctccccctggccacaaggagcaggcactttcggggaatcagaaggagccagtgtggaccccagtggagagggcaggggcaagtggagactccaacaacccagcctcctcctgagccctccccgcgtcagcactggagcactgatggccctgtagagctcacagtaggatagttagaaggtccgccatgttcctggacactgagcacctaccccaggaaagcctctctctccctcctgccccattcctgggaagcaggttcacccagaccacagttgtgtcacatggaggagtttgttgacgccaggaggaaaaccacttctcactgcaggtgtgagtagtttcacctgaggtgtaggagttcctggtggggactgacaggccaagtccaatcctgacaagccaggaagatgactggccactgccccaggatacccattttcccttatggaggctagaaggacacgccgcctccctcccaacttacatcccgattccagagccaccgcaaacccctgctctcctccaggatgaggcccttaagatcagagcttctcacgagctcgccgaggctcagggcagccagtgtctccagaggggcagagcagcaccattttcctacgtgagcccagcagaaggcgggatagttcaatggtgctggagacgctgggggtgggcaagaagggtgtgacctggagaggtctgaggagacaagttcacaggccagaggacagatctgtggccagaatggtgaggggcagaggtaggaggaggccagaggcactggggtgggggcgggggcaggtcctgttagggaactggagaacggagctggcttttgtgtggcttggtggtctcagactccactgtgcctaaggatcgcctaggagcaagagaatgtggagtcccctgccccgccctgggcctagctgagtgacaagctctgggaccgaggacccagggctcaccatccaatgccggtggtccaaggaccactctgtcacacccagggtagtgcatgaccagccctgaggccttccacagcccccctccagcctcagcaccaccccacaaggagcacggcataattgggggctggctgttcccattgcctcctttactgagaggaaaccagggctcagaggggcgacaggctcattcaaagttggagccgttacgaggcagaacggtggctccaaccccaaacatgcaaaggcctcaaagtacggagaaggggactcttgagagctgcttgaggataggacccacataccccaggacctgggacacatgccacactcagctccacaagggcttcctgaatgatctggaagacagccagcctccctgcacagaagagagcagttaagaataaactcctgggaaatactcacatagtgtgtgccatctgtccttaagatggagattaacttcttccactctcacatcctgcgaggcaggtggtgctaccatccccacctcatagaggaggaaactgaggcacagggcagttgagtaagttgcctaagggcacctagctggtgggtggtggagccagggctggaaccccagggcctgtctcacttggctgcaccggctctcttctcagcaagtagacggtcactgcccagatactgcaatgtgaatatctcacacttggccctcatcccctcacactcagccacctcgtgtgtgaactgtctgtgcaatagtggggcccttcctgggcattggggcactgctggcctctatggctctggggtggctttgccctggcaggcttccaggttccaggtgcctacgcgtcctggcctgtgccctctgttgtggattctcaggctttgcctcctgatctctggaccctcttcccccagcctcatgttctggaccaactggaatgagcagcatcccagcatcatgcgggcggcgctctcgggagccaatgtcctgacccttatcgagaaggacatccgtacccccaatggcctggccatcgaccaccgtgccgagaagctctacttctctgacgccaccctggacaagatcgagcggtgcgagtatgacggctcccaccgctatgtgagtctgcggggtgggtgagctggcgggcggctgaggggaggccagggccagggtcagccgtcaaccaagaccgtccaggcacagacatggtgggaacagctgggaggaggtgagtgcctccaggccccagcctcggtcaaccccaccctgtccagcttgctcctcatcagctagacgagggagatagcaggatgcctctgcgggccctcattctgtagctgtcagaggccaggccaggctgtggtccggtggagactgggcaagaggcctgagcgatgctgtgacggtgatggtgctgtctccacaggtgatcctaaagtcagagcctgtccaccccttcgggctggccgtgtatggggagcacattttctggactgactgggtgcggcgggcagtgcagcgggccaacaagcacgtgggcagcaacatgaagctgctgcgcgtggacatcccccagcagcccatgggcatcatcgccgtggccaacgacaccaacagctgtgagtggggctgccgccagctgcctcaccctcctgcctgtcgtgcatggacatacaaacacacaccccacacacacatcgcacataccacacgcaccctacacataccacacacacacatcccacacatactacactacacacaccacaccacatacacacaccacacccctcccacacactcaacacatacacaccacaccatacacaccccccacacaccacatacacatacacccccaacacatacacacacatacacaccccacatacacacaccacacatatcacatgcacaccccacatataccacaccacacacataccacacacacaccacacaccacatacacaccacacataccacacacaccccacacataccacatacacacaccaccacacacactacacataccacacacacaccacatacacacaccacatacacacaccacacatgacacatacacaccacacataggacacacatacacatgccacacacctaccacccacaacacacatcacacacacaccacacagcacacacacacaccacacaccacacgtaccacaaacatgccacacacacacacacacatctcacagacatactataaacaccccacaccccacacaccacaccccacacacacttgcctggtcctgctctccctgggcctccattacacagacacacacagctgtacacacctttggaaccgcaaaacccccagtgctcctgtaccccttcccaccaaggcatctacgcacacagatggactctgcacacgcctggcatctcctccacgttgcacacacacattcatgtcacacccgcccctcagggctcatccatgccctcggtgcccctaccctcaccctggtcactctcctcacttggagccacacagacagccgagagcctgggtgcacgtgccctcagtgggcacgagtacatgccccagcgccccccaccacagacctgcagctttcccaggtgtctcccatgcgccctggggctcactactgcacccgtgatctcagggccctcagactcgaatctctcagaaacactcctcaaagcccacggtgccctgcctaaaagcacacacatcctcaacggcacacctgccgaaaaccccatgcacctggccctcccacagcagccatccccatgccctccccactggctgcaagccgctgtgcctgccgtgactgagcagaggcttgggagctccatgaagtcagtgaatgggtgggtgcactctgggtgcatgcacagcagagaacactctccagccctgcgcccaccctgtccctgctcaggtgaactctctccatgccgaatcaacaacggtggctgccaggacctgtgtctgctcactcaccagggccatgtcaactgctcatgccgagggggccgaatcctccaggatgacctcacctgccgaggtgagagaggcgggggggaggggctggcggggaacccaagcacacaccagggatggtgaccatctcccctacatgctccagcccagccccccaaagccttttgccaagaagacgctgatgatgacctcagctccccgggggaggaggcgtgggcactggggcccacagcgctggctcagaaagctccctccacctccctccccagcggtgaattcctcttgccgagcacaagatgagtttgagtgtgccaatggcgagtgcatcaacttcagcctgacctgcgacggcgtcccccactgcaaggacaagtccgatgagaagccatcctactgcagtaaggagccccctgcagcccctgcctcttccaggcccagagcccaggtcctcctcccccaggcccctgcaggatggagcaggatcaggacccagcttcctgaccatgagttttgggagctcatgaagggcagaaccactgttagcctggactgggcctttgggtttgggggtggccagctggacacgtgcatgacgtctcagggaggcagccctttccctgtgcctgtggctgacacgcagcctactcctccatttgcagactcccgccgctgcaagaagactttccggcagtgcagcaatgggcgctgtgtgtccaacatgctgtggtgcaacggggccgacgactgtggggatggctctgacgagatcccttgcaacagtgagtgaggcgcactggcataacccatctgtacctcagttcctgccccacccctccctggccaagctttgtccctgggccccgtggtgtctggttcaaggcactctgtgacaggccagggcaggtgctgtgggccaggagctctgtcctgcgtccttctggcccccacagagaaaactctggcctgacgatacggggcgggcactgttctagagacagcctgtggtgtgggcgagttccgctgccgggacgggacctgcatcgggaactccagccgctgcaaccagtttgtggattgtgaggacgcctcagatgagatgaactgcagtgagtgacgccctttgctggcacctcctgggctcctccccatcgctcactgcatctcccgccttcaggccctcctgcacctgcccacattcctctctgccttccctcatccccgctgacagcctccatctccctgaggccctgtccccatcccgctcctgctcctgggctctcgtggggttccgagagggggcagtgagcagatggtgcagacagtgccccaccagaagggcaccgttcaacttttggaaacacatgaaggctccatagggctggcagctgccccagtcgggggtgatccagggggaaccaggtatcaccctcacccctgcccccaccaggtgccaccgactgcagcagctacttccgcctgggcgtgaagggcgtgctcttccagccctgcgagcggacctcactctgctacgcacccagctgggtgtgtgatggcgccaatgactgtggggactacagtgatgagcgcgactgcccaggtgggcgggggcaggtgtgtggtgggtggtggcctgcggtgagcagggccctcacacctgcctcgccccccaggtgtgaaacgccccagatgccctctgaattacttcgcctgccctagtgggcgctgcatccccatgagctggacgtgtgacaaagaggatgactgtgaacatggcgaggacgagacccactgcagtgagtgaccactgcacccactcagtgctccaagagcctgctgggccccacttcttagtcccccccagcaaatgcccccttggaaaagggcatccagagccttcaaccccctgccccacaccccaactcttgaggtcagactcagagactctgcctctagctgctgctgagcccccccacagaggggtgctgtgggcatctctcctgtccttcccatggcatcagcctccccaggtgggtgacccccacccttccccatctaactgtggcttctgactgccccagacaagttctgctcagaggcccagtttgagtgccagaaccatcgctgcatctccaagcagtggctgtgtgacggcagcgatgactgtggggatggctcagacgaggctgctcactgtggtaaggaagctgggattgggccgggggaggtgccccagggagggacagaccccacccaactccaccccacacacagacacccctgcagacgacggcgaaccatcacctccactgctagacctgatctacccgctcctaagtctctcagtggccctctctccccctacagaaggcaagacgtgcggcccctcctccttctcctgccctggcacccacgtgtgcgtccccgagcgctggctctgtgacggtgacaaagactgtgctgatggtgcagacgagagcatcgcagctggttgctgtgagtggcggggccacgtggagcgggtggacagcaaatggccacagtctcactttgcagatggggaagccggggtgcaggagaggaaatgcctcagcggggtccactgggggcggagccatagctgtagcccaggtgtccagactcctcatccagtgccctgcccactctaccaggagaaccacaggaggttagagtgagggacggtcggccgctggccaggcagggctgaagggctgtgtccacctctgtccacagtgtacaacagcacttgtgacgaccgtgagttcatgtgccagaaccgccagtgcatccccaagcacttcgtgtgtgaccacgaccgtgactgtgcagatggctctgatgagtcccccgagtgtggtgagccttcggcggtggtgggaggaggccctgccctctgccgggccagggcatcagcctcacaggtccattcctcccccagagtacccgacctgcggccccagtgagttccgctgtgccaatgggcgctgtctgagctcccgccagtgggagtgtgatggcgagaatgactgccacgaccagagtgacgaggctcccaagaacccacactgcaccagccaaggtgggccccagacctggctcccctctgccccctccccagactgcctgagaccccgctgacctgccgcctccgcccctccgcagagcacaagtgcaatgcctcgtcacagttcctgtgcagcagtgggcgctgtgtggctgaggcactgctctgcaacggccaggatgactgtggcgacagctcggacgagcgtggctgccacatcaatgagtgtctcagccgcaagctcagtggctgcagccaggactgtgaggacctcaagatcggcttcaaggtatgcccagccctggggaggagcttccacaccccagacgtgccaggaacgcctttctccactgccttattcattcattcatcccctagacagtggggatacagcagtgaatgagacagaaatctgcttggttggggtctgcctctatctggcaggtagagagccagcagatttgctgacagatgagatatgcagtgtgagaggaagagaggagtgaggcatcaagtaggcaagagatacacaggtctggagttcaaggagaggcccaggctggagagggaagtctgggagttatcaccatagagatgctatttgaatctgtgagcctggatatgattcccaagggagcagtgtaggtggagaagagaggagtccaaagtctgagccccgagctgagcaacagccaggagcagggaagtgaggggaccagcagaagagcctgagaaggagcagctgctgaggcaggagaacagccacgagaagaaagcatttccatggggagggcacacgcagctctgtcaaatgacactcgggggcacacagaaggaggcctgcactgtgggccagctgggtgggctcagtacccatatgctgctgcccctagtgaggccgggtagagggaattggagtctctgagccaggtctccagggtgggaggcccagaccctgccacatgcccagcccaaggctccctgtgcctgcagtgccgctgtcgccctggcttccggctgaaggacgacggccggacgtgtgctgatgtggacgagtgcagcaccaccttcccctgcagccagcgctgcatcaacactcatggcagctataagtgtctgtgtgtggagggctatgcaccccgcggcggcgacccccacagctgcaaggctgtgactggtgagatgcgcgcttggagggcatgaggtgacccaggctgtgtgggactgcccgggtggcagagctccagacaggcaggagaccagggccgctagaatgtgccaggagctgaggcaagatcctctgtctgcagacgaggaaccgtttctgatcttcgccaaccggtactacctgcgcaagctcaacctggacgggtccaactacacgttacttaagcaggtaccaaacccaggccctcctccccgctgcccatctcccagacccagcacagcctcccttgcaagtctccccgcttaggtccaaccatccctcccccagatgcaaatgtggcccctgttgccacaaccgacttctgctgtccttcactccccaaatccagggcctgaacaacgccgttgccttggattttgactaccgagagcagatgatctactggacagatgtgaccacccagggcagcatgatccgaaggatgcaccttaacgggagcaatgtgcaggtgaggcgggcggccctcggcgaccaacactggcccgcctcagatgactgttttcagatcgtctctccttcccgccccaccaacccaaattgcttccttctcactccactagtcactatatgactgcttgttctagctgctcactctcctctgggcccagacagcaaggactgggagattcctcttgcccttcccctcgctgccagcctcatgtctccttaatcatcaggaagttccctgtgaggtctggccaagcactgtgaggcttggggcgtggtcccattcacctagagccccctctcctagagcctctgctgacacctacacagtgtcaggcccaggactgggcattttacttccatggttctcccaccagagctgtcagagggagctctaccccattttacacgaggggaggctgagcctcacagaggcttgcaggtcctcccccaggtcacccagagctctccctcccctgccccttcctgcaggtcctacaccgtacaggcctcagcaaccccgatgggctggctgtggactgggtgggtggcaacctgtactggtgcgacaaaggccgggacaccatcgaggtgtccaagctcaatggggcctatcggacggtgctggtcagctctggcctccgtgagcccagggctctggtggtggatgtgcagaatgggtatgtggctgaggagggttgggggagcccctgaaagcagcatccaagcccagcctccctgcaggccactggtgcgatgggttacgggatctcccagggctcactgcctacccatcgccaggtacctgtactggacagactggggtgaccattcactgatcggccgcatcggcatggatgggtccagccgcagcgtcatcgtggacaccaagatcacatggcccaatggcctgacgctggactatgtcactgagcgcatctactgggccgacgcccgcgaggactacattgaatttgccagcctggatggctccaatcgccacgttggtcagtgtgccagtgaggctgtccaggcacagcagactcagtggggatggaggtctgaagcgacaggggatcaagttttgggggcaagagtggacataaaaagcggaggatatggcctgaggacaccactcactggggtgtggggttcagagcaccccgggggcttccccagcctggccaccacccagctcccttgggaaggaagaggagaggcccttcccttgtatacacagttctggaggactggccccaaggagggtgggggtgggaggcctgcgattgagaactgcagtgctccccacttcccgaggggagccatacactggcagggcaggaacttgccatgaggcagtctaggtttgaactccagctctgacacttgttagctgtgagaccatggggggtctgtaccatgaaccatctgtaactggggctgacacccacctctcagggtggtggtagggcttgaggaggtggagtgggccggcaccctgtccgagctccggctgactggcactgtgcctgccccttggccctgcagtgctgagccaggacatcccgcacatctttgcactgaccctgtttgaggactacgtctactggaccgactgggaaacaaagtccattaaccgagcccacaagaccacgggcaccaacaaaacgctcctcatcagcacgctgcaccggcccatggacctgcatgtcttccatgccctgcgccagccagacggtgagcaggcaaggggtgggagcaggcgaacggtgagccaggcaccggggtccctgggagttcctgctcatcccttctctagcattgaccaagccctcctggccagacactgggagactccaggagggtctagacaggggatggtctggctcccgggagcttcagcccggcctggatccagccctggagtctggcagcagcaagtccctgaggccagtcaagtgggggtctgggtgcccagcccccagaaggaaggcaggccggcccctgggagggaagcacagaggaggtggggagctggccttcaggcctggcctgatcctgggaccttagaatcctctcctatctccagcttcagctccctcctaaaagaggcagggttcagacccacccgcctctgtccaggatagagtgagtgaggcagcctttggtaggccagaaaatgtcaccatatttcacgacgttttctctggcagtgcccaatcacccctgcaaggtcaacaatggtggctgcagcaacctgtgcctgctgtcccccgggggagggcacaaatgtgcctgccccaccaacttctacctgggcagcgatgggcgcacctgtgtgtccaactgcacggctagccaggtgaggctgtcccccagaccccatcaccagtgcccgctccccaacccccaaatcctccttggaccccaacacctgctctgtcctaatgtcctcatgcatctggttttcccacactaacacccccacatttcttgcctacctcttgtctccccacagcaatacttttacccccgtcacctcacacagacacctccacaccctaaccttgaccctccttgccatgcttcagtgctgccttccccaccctatcccacgcagccccatacctggcctttccgaactcaccatagcccaacctgccccataacaccctgacccctgcctcaacttctttgaaacatccaagcccctcaaaagaaagacttctgagtcccccagacccccaccaacccctcttgcccccacctgccctccagtttgtatgcaagaacgacaagtgcatccccttctggtggaagtgtgacaccgaggacgactgcggggaccactcagacgagcccccggactgccgtgagtgcctgctgggggtgacaggagggcccccagctgtgtcggaggcctgactcctgaggctttgaatggccactggagaggctggggctgtggtgccctgcaagtggacctggccgtgtccaccccagccgctctgactctgagcctccctctctggcagctgagttcaagtgccggcccggacagttccagtgctccacaggtatctgcacaaaccctgccttcatctgcgatggcgacaatgactgccaggacaacagtgacgaggccaactgtggtaaggcgctgcccgcccaccctccctccttccccagcatcttccctgccccaggatttggggctttcaagtgcagggaagttgcagcccacggcagcttgctctccaggctggattcctatggctcaagcctgtgtcctccctgctgagggatgggcaccctctccctgcccctgagtcctcccttcgccacgaatcacctcctcctccctccacagacatccacgtctgcttgcccagtcagttcaaatgcaccaacaccaaccgctgtattcccggcatcttccgctgcaatgggcaggacaactgcggagatggggaggatgagagggactgccgtgagtgtcagaggtggtggtgggccggtggtgggagatgacacggaagcagggcaggcagaatctccccacagctttgagaggctctcaaataactttagtagatgggcaacacaaattatattgggtgtaacttgctttgctcataaaaatcatcatgcatgatatagagacatagagatccagaaaacaaaaagcaccaaaactggggataaactgttccttcctccgaagaagttgctggcaggaccaaggccagggcttggaagagagagaagacagtgatggtgaactggagtggcaggtgtaagggagggccctcattctcttgcccaccccacagccgaggtgacctgcgcccccaaccagttccagtgctccattaccaaacggtgcatcccccgggtctgggtctgcgaccgggacaatgactgtgtggatggcagtgatgagcccgccaactgcagtgagttgcctggcctggagcccagcttccctccccagtgtctgctgctcacaccaccccgacgtgtgaccccctcagtggctgctccctcactctccccaccctcccggcacactcctggaaggagtctcatcctcaccccatgcccacccgcttgcagcccagatgacctgtggtgtggacgagttccgctgcaaggattcgggccgctgcatcccagcgcgttggaagtgtgacggagaggatgactgtggggatggctcggatgagcccaaggaagagtgtggtgagccgagaccccactccaggaggaagacagtctacctgggtgggaggcatggcacccctggcaggtggagggctgggggccgcctgcttaccggtctcagcgtggccctgctgctgggcttcctgggcctgctgtggggctggggaaggaggcctggctggagctcacttccccacatccacccgtgccccatgtctcccagtttccctatccctgcccctgcccacgcctcatccacacatacctgtgtggagttttccctgcccaccctatgggatctgttcatctccttcccaaggcagctgcccacacacacacccccaaccatgtctcctgtccccaaacctccttatagaccccacgtctcaaaacaccgcctgggctccccgcggctgacccttcccaagctgggatgcccaccctccctgccaggccagcctgaccatgcctgcttggaccctaatgtctgccccagccctttccctgactgccctgacacttgcctcctccagatgaacgcacctgtgagccataccagttccgctgcaagaacaaccgctgcgtgcccggccgctggcagtgcgactacgacaacgattgcggtgacaactccgatgaagagagctgcagtacgtccccacccacccagccccgcatgagcccctcccaggcctggcccttgtctcgcggccctcctgccacaggccgcgccagagctggtggccacctcccagggtgggggcaggagccgccctcctcacccatcccactccatgtcgtgtatttgagtttgtgccatttcacctcatctcatgtttctctccattttcacactgtcctctcggggttgcagaggtaggtgtctctgatgtgcccgtgctcccaccatacccccacctctgtcccagagccccccatccctgtgctgtgcctctacccatcatccttgattgacctctccccaaaccctggtgcttgtctcagtggtcttgcccccgctcccctccccaaacacagtctgttctgagggcaaggccagggacctgtgtcctctctggtgtctgtcccatggggtaagtgcgagcccgcctgtgcccagctgttccataggagcagccagtgggctctgccaggactggctcggcctctgggtcagtcagctgtggccttcagagacacggggatgggccttgggctcgggactgtggcactactgaggcctggagtccttgtgcccaccctcctgggcctgtctccccctgtccttcccagcccctcggccctgctccgagagtgagttctcctgtgccaacggccgctgcatcgcggggcgctggaaatgcgatggagaccacgactgcgcggacggctcggacgaggtgggcagggagatgagaaggaagcagatggcctcagaggagttcaggcagggcttggggagtgccgagaggtgaccggctgcctgtgcccatgcccacagaaagactgcaccccccgctgtgacatggaccagttccagtgcaagagcggccactgcatccccctgcgctggcgctgtgacgcagacgccgactgcatggacggcagcgacgaggaggcctgcggcactggcggtgcgccccttggcttggtctccctgggtcctccctctgctgcccaccccgccacatggcccagtcattcactcattctttctcttctgtattcattcttcatgcaacaaatatttattaagcatttaccatgtaccaggcactgccataggtgttagggacgtagtagtaaacaagacacagggcccctgaatacacatttttgtgcgggttgtgcccagctcaatgccccctagtctaggggaccagttgagctgaaatccagcaaaccctgagggctgtgcccatctaggccccaccccacaagtccctccgagacagtctgctgccacaagaagaaaagccctgcctattttcccttcctgggggcagtgagacagtgcctgtccctcgctgacctgcctgggctctgcagtacagagggggcaggtgaagcccgggatgagaaaagactgggccttggagcggaaatcccaactgtgcgggcagatgtcttggctctgccttggtaggccaggcacagggatgggaacccggtcttccattcccagcccagtgctgttcccgcgtccccgctgtggaactacacagcccagtgctgttcccacgtccccgctgtggaactacacagcacagtgccctgccacataccagagaaggagtgccctctgaactcctccagacacccctgaaaaatggcctcttctcccctaaataccagagggggcagtttggccccaccaagtagaaatttaagagacctggttccaatttggctgtgccactgcttgcctggtgacccctctgagcctggaacccccacctgtggagacaggggtctgggtgggctcatggctcattctatctcttggctccccctggcaccagtgcggacctgccccctggacgagttccagtgcaacaacaccttgtgcaagccgctggcctggaagtgcgatggcgaggatgactgtggggacaactcagatgagaaccccgaggagtgtggtgagatttggggcggggctcccaggcttcccagtggccagcaaccacccccactcccaagactaattctggctctgtgtccccctggctgctgcagcccggttcgtgtgccctcccaaccggcccttccgttgcaagaatgaccgcgtctgtctgtggatcgggcgccaatgcgatggcacggacaactgtggggatgggactgatgaagaggactgtggtgagcagggggccgacgagaggcctgcaggggacgggtagtgcacagtggggtgagtctggtcctcgtgggagctgcactggggttagggttaaccaggaggactcgcccaggaaggggaggatccattgctaggagcctgggggcttttcgttaggaaagagaagcccctggggaaggctctgggggctgcctgatgccttaggtcttggaggtggggctgggaacccaaatgtttgacctgctccccctgcaagccttgtcacttaggaattgggagccactgttatctatggggttgccgtgggaggaggaggcaggggagaatacccagggcctaaagcctctgccctcctcagagccccccacagcccacaccacccactgcaaagacaagaaggagtttctgtgccggaaccagcgctgcctctcctcctccctgcgctgcaacatgttcgatgactgcggggacggctctgacgaggaggactgcagcatcggtgaggcccggcagcggaccggacgctggtggggagtggggagagccaagccctggcctggggtggctcaagggagggcatccactctctgtcccccacagaccccaagctgaccagctgcgccaccaatgccagcatctgtggggacgaggcacgctgcgtgcgcaccgagaaagcggcctactgtgcctgccgctcgggcttccacaccgtgcccggccagcccggatgccaaggtaggaaagcggggcagagcaggggtggacaccccaactgtggactctcatgaccctccctgtaacccttagacatcaacgagtgcctgcgcttcggcacctgctcccagctctgcaacaacaccaagggcggccacctctgcagctgcgctcggaacttcatgaagacgcacaacacctgcaaggccgaaggtgccggagccaccagagggcagaaaggctgggtggggcagggcgaccaggatatcaaacggggccgacttggaatggaatgtcttcctgcggacatcttgcccagacaagaagccccagactcatagttgcagctgcctgagcacagtgctggcccagcagtgggggcaggtcctggggctggctgactgaaggagtctggggtgtggcagtgctctgaattgcacacacacctcctcacccaccactgccaggacgagagtacactcagacacgcattgcacactcacagtcatgggggcctcacctgcacattccccacatgctttgatgcccaccttgccttccacatgcctgtacacagacattcacacacacccctggcacacacacccccaccatgcactcccatgcacaccctcgtgctccatgccaagcacacacaccccatgtgcctatgcacccccgagcatgtgccaggcagtttgtagcagagagcgtggtgatgccatccagcagccgtgaggaggtggaagtctctgggtctggaggggcagggacagctttctgactgaaaggagcgggtcacagtggatcagctcaggggaggagaggaggaggtccagaggctgaggttggagcctgcaaccctgagcagggagggtaagcagcagcttctggccggagcagatggtcctaccaggagatgggacagtgttcatgtgaaaggagctgagctgggtggggtgcacacctgcatcccacagccccagccctggcctcttgcttctccaggctctgagtaccaggtcctgtacatcgctgatgacaatgagatccgcagcctgttccccggccacccccattcggcttacgagcaggcattccagggtgacgagagtgtccgcattgatgctatggatgtccatgtcaaggctggccgtgtctattggaccaactggcacacgggcaccatctcctaccgcagcctgccacctgctgcgcctcctaccacttccaaccgccaccggcgacagattgaccggggtgtcacccacctcaacgtgagtgcccaacctggcgtggatggagtggaagagctccatagagcaggcggttcagagcaggatttgaaaagggcagtgctggctaggcgcagtggctcacgcctataatcccagcactttgggaggccaaggcgggcagatcacctgagatcaggagtttgagaccagcgtggcaacatggtgaaaccctgtctctactaaaaatacaaaaatttggctgagcgcggtggctcatgcctgtaatcccagcactttgggaggcagaggtgggtggatcacgaggtcaggagatccagaccaacctggctaacacagtgaaaccccgtctctattaaaaaatacaaaaaaattagccgggcatggtggcgggcgcctgtagtcccagctacttgggaagctggggcaggagaatggcatgaacccgggaggcggagcttgcagtgagccgagatcgcgccactgcactccagcctgggcgagagagtgagactcggtctctaaataaataaataaataaataaataaataaataaataaatagagactcggtctctaaataaataaataaataaataaataaaataaaataaaataaaaatacaaagattagccaggcgtggtggcgggcgcctgtaatcccagctactcaggaggctgaagcaggagaatcctttgaacccagaaggtggaagttgcagtgagccgagtgccactcggttgcagtggcaccaaggttgcagaatagcactgcactccagcctggatgatagagcgagactccgtctcaaaaaaaaaaaaaagaaaaagaaaacaaaagggcagtgcgaggggcaaaggttgagagtggggcagggggcagtcttaggattgtgttctgaggcatggccagcgggaagacagagcagtgggaatggtcagcagctggctgtgctgcaggcagcccagggcacagggcatgatgggcaggcagacagccctccggcaccaatcccccatccttgccacttcccactgtgtacgtcttagctacctcatttaacctctttgggtttcactttgtttatcaataaaattaggtgatcatcgccattgcacaggcttcagggagggctcaccagccacgtgtgagagctgcgagtctggcgcataagctccatgccggttgaatctctttaaagccagggtcctggctgtgagcctggggtgacgttccagcaggctggcagagtggtggcggggggataatggcaggaagacaaagcagtggcccctgaacctgtggcttccattcagatttcagggctgaagatgcccagaggcatcgccatcgactgggtggccggaaacgtgtactggaccgactcgggccgagatgtgattgaggtggcgcagatgaagggcgagaaccgcaagacgctcatctcgggcatgattgacgagccccacgccattgtggtggacccactgagggggtgggcaagggccctggggggaggcctctgggctggtggtaggaagcccccgggacagggttgggggctgcacccacatgcgtgcccttccctcccaggccagcctgaggacagagtccttttcagtcccttgggtcttctcggccacccctgcctggccctccccatgctgcctctgcccagggcccccagctgggcctgcttgggcagggatctgacctctgcttggccggctgtcatgcacagccacactctgccctggggaacagctctgccagcgtcggtggctctgaatgagcacactgtggttttagaggaaaagcccctcaacctgctcagaagcagactcccgcctgcttctctgtagaaggacagaatgccctcctcccagtccccagcagtccctgtccccagaccaagaagctggtgtcctgcctgggcctgcctcctctggccctccggcctgcccacactcaccccttctccctccccaggaccatgtactggtcagactggggcaaccaccccaagattgagacggcagcgatggatgggacgcttcgggagacactggtgcaggacaacattcagtggcccacaggtttgtggggcagggtgcaggagggacgggcatggagggggcccggctcgcagagcccagctgctgctgaagtcacacaaaagcaagggatgggatggggcttggactggggcagggcagattggccgtggaggcttttcccgaaagaggtgactgtgagtggcgtatgaacagggtggagctgtcccgggcatggaggcagttctttccaccccgagcctgggttggggaggccaagctctcacagtgctctctctctccccaggcctggccgtggattatcacaatgagcggctgtactgggcagacgccaagctttcagtcatcggcagcatccggctcaatggcacggaccccattgtggctgctgacagcaaacgaggtcagagcccggcataagtcgcagtccccagccctgtccccagccttgccatcctccctactgagccaaaggcctcacttcaatgcctcccatcctttgtcactgacccccagcaatgctgcagcgccttccaggcctctccagctggcctccccctgaaccagccctgcaggcctgagacccaccctgaccctctggcctacttgtccattcattggttgggttgcacggaggcagcataggtacattaggaacgtagcaaattgggggagaaggaatagaagtcagtcatgactgaccccagaagtctgggggtgatgggaccttttgccagtagtggccacaggaggaggaaccggtgtggggagagagaatttggtctggatgtgttgagtttgaggtgtctgggaaccacaggtgccagtgtcgtggacagcatggccagggcctgagtgcccctcaggtcccctctgactccacctcctcccccaggcctaagtcaccccttcagcatcgacgtctttgaggattacatctatggtgtcacctacatcaataatcgtgtcttcaagatccataagtttggccacagccccttggtcaacctgacagggggcctgagccacgcctctgacgtggtcctttaccatcagcacaagcagcccgaaggtgggggcagaggggagcctgggctggggaagggaggcctgtgggcattgagtctccaagctgtggccctgggacctggtggagagggggtcaccctgggctcacagggctcagagaagggtcctgctcagcatcctccccaccccacccatacctgcagtgaccaacccatgtgaccgcaagaaatgcgagtggctctgcctgctgagccccagtgggcctgtctgcacctgtcccaatgggaagcggctggacaacggcacatgcgtgcctgtgccctctccaacgccccccccagatggtatgcttatgccctcccagtcccagccatgcctcaggaccatctccttcctgtggctcctgacttcccctgaccttgttgcctgtccctctcctcctattcccctggctctgccccttgacgggcccttcctgcagctccccggcctggaacctgtaacctgcagtgcttcaacggtggcagctgtttcctcaatgcacggaggcagcccaagtgccgctgccaaccccgctacacgggtgacaagtgtgaactggaccagtgctgggagcactgtcgcaatgggggcacctgtgctgcctccccctctggtatgccccctcatcccgccacgcctgctccttgcccctgggccccagccccgccacccaccaccccacctcaggcaaatgcccagcccctgcctcgcctccagcctcctttccacaacccagcatccagtcactccagtctctgcttctcgcccaggtccccccagcccattcctctgctatagggccaggtggtctcgagggccacagtcgcgctcacacatcctctcccaccaggcatgcccacgtgccggtgccccacgggcttcacgggccccaaatgcacccagcaggtgtgtgcgggctactgtgccaacaacagcacctgcactgtcaaccagggcaaccagccccagtgccgatgcctacccggcttcctgggcgaccgctgccagtaccgtgagtgagccatccctgggccccagggcatgcgggagggtgacgggggaccccagagcatggggtgatgttcaacctgtgcctgggacccacaggggcaagttcaggaaagaaggccttatgcagctgagccaggcccaagctgctggcgcttccccacaaaggtgctggcacacttcccctgaggcagtgcaccccctgcaccaagattatgcaaacagaaaagctctgttcaacctatggagagccctcatgagggtggggcttgaggcacttctctccctccccaaccacagggcagtgctctggctactgtgagaactttggcacatgccagatggctgctgatggctcccgacaatgccgctgcactgcctactttgagggatcgaggtgtgaggtgaacaagtgcagccgctgtctcgaaggggcctgtgtggtcaacaagcagagtggggatgtcacctgcaagtgagtggggccctcctccacagttccacccagctgggcccctgccctgtcctagccctgccctgcccctcccttcctcagcatcccaggcacgcctctgccagccccagccccagcctctgattccttcctgcagctgcacggatggccgggtggcccccagctgtctgacctgcgtcggccactgcagcaatggcggctcctgtaccatgaacagcaaaatgatgcctgagtgccagtgagttgggcccgggcttcacccaggcatagatcatcgctcccttccccagatttgagcaggaggaccgtcaggcctcagtgcccaccccccgccctgttttcctggcagcagtggctatggaggttatacctactcagccgtgtccctcctttctgcaggtgcccaccccacatgacagggccccggtgtgaggagcacgtcttcagccagcagcagccaggacgtaggtggcaggggttggggcaggcagggccaccgggacctagagcagggggaccgtgtgcctcctgcttccctgagccttggtgactcagtgtcccacctcttccctccagatatagcctccatcctaatccctctgctgttgctgctgctgctggttctggtggccggagtggtattctggtataagcggcgagtccaagggtgagtcacagggattctggaacattctggtcattattttgccatcctagccttcccccccaataatctctgtctccttatactcctgcctttccccagggctaagggcttccagcaccaacggatgaccaacggggccatgaacgtggagattggaaaccccacctacaagatgtacgaaggcggagagcctgatgatgtgggaggcctactggacgctgactttgccctggaccctgacaaggtgggctgggaggcgggcagggtcgagtgccaagaggccgtgggtggcctaaccaaaggtgttgggttaggtgagggacggaggtgggggtggggtaacctgggctacaggcccagctcctgagccctacctgaaccctctgtcaccctgcagcccaccaacttcaccaaccccgtgtatgccacactctacatggggggccatggcagtcgccactccctggccagcacggacgagaagcgagaactcctgggccggggccctgaggacgagataggggaccccttggcatagggccctgccccgtcggactgcccccagaaagcctcctgccccctgccagtgaagtccttcagtgagcccctccccagccagcccttccctggccccgccggatgtataaatgtaaaaatgaaggaattacattttatatgtgagcgagcaagccggcaagcgagcacagtattatttctccatcccctccctgcctgctccttggcacccccatgctgccttcagggagacaggcagggagggcttggggctgcacctcctaccctcccaccagaacgcaccccactgggagagctggtggtgcagccttcccctccctgtataagacactttgccaaggctctcccctctcgccccatccctgcttgcccgctcccacagcttcctgagggctaattctgggaagggagagttctttgctgcccctgtctggaagacgtggctctgggtgaggtaggcgggaaaggatggagtgttttagttcttgggggaggccaccccaaaccccagccccaactccaggggcacctatgagatggccatgctcaacccccctcccagacaggccctccctgtctccagggcccccaccgaggttcccagggctggagacttcctctggtaaacattcctccagcctcccctcccctggggacgccaaggaggtgggccacacccaggaagggaaagcgggcagccccgttttggggacgtgaacgttttaataatttttgctgaattcctttacaactaaataacacagatattgttataaataaaattgtaaaaaaaaaaaaaaaaaaaaaggccaaaaaaaaaaaa

SEQ ID NO: 43 - DNA, 139827 bp, Homo sapiens
atttggtatctctccaggtaatacaatcttctgcagcttggttttatcacttagtctatcgtggagagtgcctatgtgagaggtaatggatctacaccattcttagtggtcacacggttgaaattcttaagtgctgttccattagagatttttatgagactcaatactctttcgggaaagtctaatatttaggtcacctttccagtaagaaatttgtaacataaaggatgtgtacacacccaccttcccatttttttttaggaatcagagtgtgaagttagttgagactgacctccaacgaagaagcctgttttccaccagcactaaggcttttatatatttctgatccaagaaggtgacttttgcaggatagagactaagaacatttagcaaagtgtgtttgtaaaatagccaaaggtttatattgaagcaccctcttctctgtcccctaatgtgcaatctgaatgaatggaagtcaagaaagcaaactaaaactataattaaaaggcacaattactcatacaaactccattatacctcatggtttgttcacatcatggctttgatgatatcatatatcccatgtgctgtgataaaataagaactagactagatcaatcaaccagaggccagtttattgatgataatgaatgaagactgcaattgcaaagagggctaaaatactcatgctgctggaatatatatccgctcctataaaaaaggtgatataagttaaaatgctattataagtttgcttggttgttacggagttaggagatgtgatatcttactcatgctttttactataggcacataccttccaaggagaccagaacagtccctctctgcaccctgaccccccatgtccccaccccaaacagtgctaaagggtacacacagtgtaatcatttggctccacttttcccagagtttacatataaactactttccttctgttaagtatctggcatacagtaggctctctctgtcatcatactctgtacctaattataaagcaaatggatgataaagtatttataaattttttcttttgacttttgacaacacaatttcagacttacagaaaagttgcaatagtacaaataattcccagatcccctctacccagatcccccaaaggttaacattttaccacatttgatttatccttctccttctgtctgtctctctctctggctctcaatctgataggtcaaaacttttgagagtgtaaatcttaaagtgacattgtattctagtccctccacagctagcaaaattgtttttttcgctcttaaagcaagaaggctgcaataagcattttcttcttttaagttcatgccaggtgaattgttcagtatcatgggaaaaataatacttgtgggttacaaataatgtctcataattctaaattgaattaggcttctaatctaattccttatattcttggtaatttgaaaactaagtctgttgtgaattaccaaaaaggagctgctctccatttgaagttttcagtattgcagtaggagtttcaacaaaatatgcactgattacttgttcttgtaactttgtaaaagcttgagaacagattgacctctgttggctcctacggggtaacagctaaggtttattcatttacttgtttctagaaacactgtatctattaggatttattccaagcaactctgtattagatggcttaaaagaaaaaagagatgtgctatctaccacttttgaagctctgtagtgaggcacactgacctcatttgtttttagattgctgtacaatttacaaccaccaaagtgtgcaaatcataagtacaaatcatggcttagtgactactgtgtgtgtatatccatgtaagcataactgtgtcaaggtatagaacttttccagctcccagcaggcctcctcatcactacctctacacaaatctttaaaccataccattcatcaatgtctgccatttttacttcattgaattccctgtaacatgactgtatcatgtcttttatcattttaaatttcagttccttggcagacacttgggattagaatggaacaagtattttaagtccttcagttaattcataaaagttatttattgttttttagtttctatcttatttcctggaccagaatattagaagcttgtgtttcatctagaagtcttttattagtctcttttgtcatctaaatttataacatagatgccattccaaatctttgtggcaacacaagaccaaacctccagtactgaaataaatgtggcatttataaaggaagttctttatctggagtgctctctcccaatctattaaccagaaatataaagtatataataaataatttaggtaaaggtgaaaatctccctgtgatagtttgcatttgccttttattctcctggagagggaagggaggacagcagatacatttgatcttttatttcctgaaatttctccaagacagcttttgcagattaattttgtcctctggttaaaataaaattcatgtcccaaagccattataaaattctgggtctccagcctttccttagggctctggttcagtatcttgaaatactgcaatatttatagtgttatggaaagttctttttcatttctgatgtttttatgtttaagaaacttgctgttattattatcctctggtaagtaggcactgaaggaaaatccctactgctgtcatcaaagccacattttcctccaagaccggctttgacttgactgaattttatttcgaatgtaaagatgcaggctgggcgcagtgggtcaagcctgtaatcccagcactttgggagtccaaggtgggaggaacctaggacttcgaaaacagcttgggctacgtagggagacctgtctcttaaaaacaaacaaaaaaaattaagagtggtggcctgcacctgtatagtctcagctactggggaggctgaggctggaagatcacttgagccagggaggtggaggctgcagccagctgcaactctgccactgcactccagcctgggctattgggcgacagagcaagatcctgtctcaaaaaaggtaaagtaggtcatatcttaataaaagtgcagattaatcactaggtaccaattcatttatcagtgttacacaccaagaacaaaagctcttcctaaacttagggggagaatttcagggctttaggaatttgaaaccgtcttcacagttccttcccagtcttatttaggccagctgtaggccacaggctagagcttgaagccgtccaccaatatctcactcacaggactgtccttaatgcacgaatacctttcctcgagcaaactgcttttccctcttagaccttgtagccagatcattttaccggcaaaagtctcagacatctcctgtgaataaaagcttacattctttccttgccagtagaaaaaaggggaacacgtaagcatacgtggcaaattgcaaagagggatgcattgtacgagctggtcagattgttaatgagggcaatccaaacagaagagatttgagtgctaagggaatacggatcagtgattaaaaggtgttgtgagagggagaaatctttgtaaactatggcgctctttagtattactattggggggatctaggcaggggaagaagcaggtgaaagcgttttaggcttcggcctcctcttgtcgtccttagctgtcccaggccagggccattctatacgccgaggcgtagtcaactctgctgccctagacttgcccactgaacccatgccccagactcacctttacccgctgcccggaagccaagtcgctaccacctgcttgagcaactcccaccgcgcaggctcagaagttaacgctctcccgcctttccccgctgcgctaccttctgagcaggcgcagcgtctccgatccgttccctcgccgcggctcgaccccggtgagagcaaaggccgctccgcgcgtcgcgtttttgacccatgacggcggcgcgcagtctgacgcgacagattgcgtcacttccgccccctcctgggaggcggcgctgggccggtggcaagcccccggagggagccgcagtagtacgacggaagatggcgacgagcggcggcgaagaggcggcggcagcggctccggcgccggggaccccggcaacgggggcggacacgaccccgggctgggaggtggctgtgcggcccctgctgtccgcgtcctactccgccttcgagatgaaggagttgccgcagctggtggcctcagtcatcgagaggtaccgggcggcggctctggcgggcgacgctgttgtggggggaggggatttcgagccggatcgtctggacccgctttccgggccgccccctgcccccttgaggatccccgccacagccacggcttcggggtcccgggcccggggagactggcttgcctgggtttccctccgccaacgcatgtaaatcacctctacctcagtttcccctctcgagcaaaactttagcggcctccctgcgggagggcgtggccggacatggttgagagtgagatgcattcgccctcttaagggaatgttcacggggctgccccttgggtcaagtcacagatgagtttgcatttctcgcccgcactcatcctcctagcctgggccggagcggagccgtacggtataatttaataacggtctccccgcggtgctgtaatcagtgggggcacgtgctatttctgtgactgaagccactagctacattgatgacctctttttacgttgcactccttgtgcattcctactgtatcggtctttgattaaaaacatttcagtgtgtgtctgagagatcattttcccagaggatgtgtggtgtgtgtgttctcttgctgcctcccatccccctcgcattaaaatatcatcacattcttttacaaacggtactatctgttggtttccttttgtgtgtttttgtctttttgcacagcgattcttagctagtgacagttatgtaggtacaaagatggtgatctcagagtgcctgccttttcctgacatactgtgctcagagcagtctttcattagtttaatggtagacttttgcttttaaagccagactgactttcatttttctagccatacctcatttcagcaactccctgcaattgttaactgggtcattttagcttcacgatgacaagggtatatctagctgctatccagaggttaaaaattgctatttgttactcaaaggaggcccacggtttgacaaattgtttttgtgctttttcttgttgtagacttgtaatcctttggatgcagagtttttaacaaattataataaaataatggttgagtttggtaacttcacagtcagctttacagacggattttgctatctaatcatcaggccaggaatgttctgaagatgtaaacaggtttcaaatatactactttcaaattacgtggctgctttttgttttaaacatttggattggcagtatttttcctgactcatactcatgttacgtagaatcagtaacgttccagtctttttagagcatttgcttttatgtttttctggacatgagctggataggttataaaatattaataatttgttgacacccttccataaatcctgtattctggggccacctttaaagctgtaatacttaaggaacaccctccaaccaaatacatcactaggtttgaattttgccatgtatgtggtagtggtctttgccataccctctgtttgtacaaataatcaagagttgtatttgtagacattaataagatctctctttatggcttagaaaataagtccaaactgatgggtctttggtaacgcatttattggaaggcaagatctctttttttttttttttttttttttgagatggattcttgctctgtcacccaggctggaatgcagtggcgccatctcagctcactgcaagctccacctcccaggttcacaccattctcctgcctcagcctcccaagtagctgggactacaggtgcctgccaccacgcccagctaactttttgtattttaagtagagatgaggtttcaccatgttagccagaatggtctccatatcctgaccttgtgatccacccgccttggcctcccaaagtgctggaattacaggcatgagctaccgtgcccagccggaaggcaagatcttttaagtcttctggtttttggagctcagttagctttgaaagcctatgtgtcctctgcaggctgtgtgagaggagtatgatctaaagaaaaatttccagaagaaatacctggcttacaagttctttacagtgagaacagctaaacgtatcaagtgttcagtttgttataaagcaggcgttggcaaacgtcctgtaaatggccagatagtagataattttgggacatgtggtctctgtctggactgtttaactctgccatcattgtgtgaaagcagccacacaccatatataaatgaatgggcatggctgtgtttaaaattatatctatgggcactgaaatttgaatttcatgtaatatttacatgtcacaaactattcttttgattttttttttttcaaccactcttagccatacaaaaacaggtgacttcctggatttggcctgcaggccatagtttgccaacccctagcttggagcacacaaattataccctgctatcattattctggttttcaaaagttttatttatttatttattttttggagacagagtcttgctgtgtcacccaggctggagtgcagtggcacgattttacctcactgcaacctacgcctcccaggttcaagtgattctcgtgcctcagcctcccaagtagctgggattatagatgtgcgccaccagacccggctaatttttgtatttgtagtagagacgaggtttcaccatgctggtcaggctggtcttgaacttctgaccgcaggtgatccgcccgccttggccttccaaagtgctgggattacaggcgtgagccactgcacccagcccaaaggttttatttatttgtctttctaaaaagtaaaggtctcagaattgtgggagtatgtcttgcataggaagctatagtaccagatgaaagccaacactgtagatgctgaggtgggccttgttgtctagctaatcagaggttgagatgtctaggctgccactttagttctgtgttgccactcccatcttctgcagtttcctggtttttttctcttgttaaacctgccatgtttttcttccttgtcaccggggaccatctgtttttctgttgcagtctactactctctgcttccttttttgatatcctggctccatcatgccaactcttactttcgacctggtagcctgcttagccattgtatttatctcttgaccattgagaatgatgacgtgcttgagactcctcagtacaccacattctaccttcttttatagttgaaattgaccttttgaagaaaaggtagattaaacgttcctaggtctaacccctgtttcttaagtttgactttgcaaccaaactgaaatagaggaggaattgatcaacatggatgagttggaaagcatactctcaagtcattggatgttttaaaagaaaaagatatctgaatttatttaaagggaagatttttctctatagcatgtagctagctagcatgtcttttagtagtaaaggctactaaaatattttttcttttttaagagacagggttggctgggcgcagtggctcacgcctgtaatctcagcactttgggaggccaaggcaggcggatcacctgaggtcaggagtttgagaccagcctggctaacatggtgaaaccctgtttctactaaaaatacaaaaaattagctgggcgtggtggcgcgcgcctgtaatgcccataatcccagctactcgggaggctgaggcaggagaattgattgaaccagggaggcgaaagttgcagtgagctgagatcgcaccattgctatggcaacaagagcaaaactccatctaaaaaaaaaaaaagagagacagggtctccttctgttggctgggctggagtacagtgggacgattatagctgactacagcctcaaactcctgggctcaagggatgctcctatttcagcctcctgagtagttacagtagctagctagactacaggctcccaccaccgggcccagcttaaactcttttttaacactgttacttattacatagtttaaagaacattttaaacacactgttacttttccaagccagaaatggagcagaactagctcaatggagcacataccgtccatgggattagttagtataatcattgctgaatgtagccttctctgttaaggtacagataattcctttcttaactctgtgcaagatacgctggtgagcatggttatcattcgacaatttgattgactctttgtagataaaaagaaatatgctccttctctctgagccaattctttctgagctgacctggcctttttaatgataaacctgttcgaggtttctgtttccagatattcactagaatttagggcaaagacacctactttggaagggggagactgtcacaacattcccattagataatgcacagtcatttcctaaaagtcttcaaaggaagaaagggatgcactaatgctgtgatcttttgaatttgtaagcagtaggatgcaaattgataattgacctacaggaaaaaaaaaaaaaaagcccgccaccaaaagatagattatgattgtgagattagtctttgtgactactgtttctatgtcttagtatcacattaaccacagatttttcaagagtatgagggaagtatctgaaagacagttttcagttctttagtcaacatgcagcagattatagatagaaagataggaataagcataatggattctatatatactagagagtacatgaaactgatgaggggaaaggagcttgtggaatttctaccatttacaaaaaagattgatagtatgatattgaagagggagaagggaggtgaatccttagtcttttatgatgcccctcctcagattccatttcttcctaaaaagctagatttttccagaccctgccagttctttttttacttacacatcaaattggatttctctgacctgtctgcttagctgctgtttccctttgtactctgcatcacatttatttggtatagagtataaaagcttcagcttctctgtctatccacagtgtttcacgctcagcggtgctgttgttgcagttcattaggagcgacaggtgattcaggaagatgcttgaccaaccagagcaaagatgtactttcacctctatctctttattttccttcccgtgcttatatttgcttccatttcttcattcttctccttcctacttaactttttgtcctttgttccatttttccatttcttattctctggtgtcttggtgtcttaacattttctcagggcatgagggtgaggttggaaattatggcagcacatccctattagctgactcatgcacactgtttctttaaaatcaagagatatgacaatgtccattacttctctatttcctccttcaagtcttcaaaaccaatttttcccaggtttatccttagttgcccagtgcacattataagtagagctgaagaccgttccatttttcctctgccaatgtctatctttccccaaaatgcattcttcctgtttctttattggaataaggatgttacgtatttctaggggaggaagttgggttcattagatcacaataggatgacactgaaccaggcaattaaatgagtttactcctatatatatatatatttttttttatatatttcattatcagaatgggtatgaaagcaataggctaagtccatcctttgggtgggcagtatttctcttagatttggtaaacctgttcagctggaaaaagtggggataagcagctctgaactttggaaataaatcaggaactttggaaataaacccagtaaaataacatcaaatgacagagtgggaaagccttagaaaaacaaataagaaagtataagggtggggccaggcgtggaggctcatgcctgtaatcccagcactttgggaggccaaggcagtggatcacgaggtcaggagtttgagaccagcctgaccaacatggtgaaaccccatctctactaaaaaaaaaatacaaaaattagccaggcgtggtggcacgcacctgtaatcccagctactcaggaggctgaggcaggagaatcgcttgaacctgggaggtggaggttgcagtgagctgagatagtgccactacattgtagcctgggcgacagagcgagactctgtctcaaaaaaataaagtataaggctggaagtaaaggaaaaactaagtatatgaggtagaaacagggggatttagtagggagttttctgctgtacatgtgagccttaaaactgtgtttagtcaccagcaacttttgagtgctgcttgttgtggaaaggtttttattttctcctttttatgtaccctgacaaatggaaaaggacccttagtgggcaggaggatccttgcacacatcatagatgctccataaatatttttttcttggtgaaggagttattctaagggactaatctttgatacatacccatttatccttgatctgcatatagcaaagtgctcgcaatgccagactctcaagtgttattcaaggtgattcatcaccgacattggcaccttccaaatagtgacttgtccttttggctcctgtgttcatttggcaggcagatagtcttgcaggcagtgaatggagtgttcactctgtttacatttcccttcttaggatgatactttttttttttttttgagttggagtcttactcttttgcccaggctggagtgcagtggcacaatctcagctcactgcaattccacctgccgggttcaagcaattctcgtgcctcagcctcgtgagtagctgggactacaggtgggtgccaccacacctggctaatttttgtatttttattagagacggggtttcaccatattggccaggctggtctcgaactcctggcctcagataatccaccagcctctgtctcccaaactgctgggattacaggcttgagccaccagctacaatgcgtcccaccataggttgatacttctgctggggattgactcactaagtaaactgttcaaccacactgttgttctttccatttaataaaatatattttagtctttgctttaccttcatgtttctttctttttttttttctctgagacggagtctcgctgtcacccaggctggagtgcagtggcccgatctcggctcactgcagcctctaccttctgggttcaagcaattctctacctcagccttctgagtagctgggattacaggcgcgtgccaccacctgctaatttttgtaattttagtagagacagggtttcaccatcttggccaggctggtcttgaactcctgatctcgtcatccacctgcgtggacctcccaaagtgctggaattgcaggcatgagccaccacacccggccagccaccgtgcccggcccatgtttcatcaattgtggattagcacctgatttgatacaatgactttaaatgtatccagcctttaaacctagttggtctctagattttttcagaagagggcatttccccagctaaggataagggatgtggttaaaaaaaaaaatcaccgactcttttgtgatctcgctttagtctacagtcagggggatggtgtaggggataactctgttatccagtgaattttggactttagcactgatcatatgacttcttatcttgagttgttgattccttttaagttactgcattacaggccagccttatttggtctaaaattggttactttagtctgtattcccactaacagtatattgagtattctggtctgcccctttttggctatcaataatgaaggcatattagctgttggtctttgccagtcagtaatatagaacagattgatatcctgttaggtctttacttgcatttcgttagttctgcttgactttgaaaatgttttctgtttgttagtctctgcttcttccctagcctgatgaccttgaatgagatatttaattttaattctctaagcttcaccttcccaatctttttttgagatgaagtcttgctctatcacccaggctggagtgcagtggttcaatatcggctcactgcaacctctgcctcccaggttcaagcaattctcctgcctcagcctcctgaggagctgagactataggcacgtgccaccacgcccagctgatttttgtatttttagtggtgacgggttttcaccatactggccaagctggtcttgaactcctgacctcaggtgatccacctgtctcatctttcccagtcttgaaggggaataggttgatgatactatctaccaggtagtaaggattaaataatgtaatatccataaaggggtatctggcacatagtaagcgctaagcagatgctggctgaattattattatttttacagtgaatcagaaatcctgcaccatgagaagcagtacgagccattctactcatcttttgttgcactttccacacactatattacaacagtttgcagtctcagtaagtattccactcttgtccttcccttctgagggcttgtgaatagggggattgtttatcctctcgttagtgtatctgaaaaagttgttaatgaagtctaggttttagcactcctaagctgctcacccaagagtagagacaactgtcagctaggatgaggctccagaggttcccttacctaggctaaccaagtggaattttaaaactacttggcttggacacctgctttataagtattaagtccacctcctttcccttcttaatccaaagcattttattgatttctcatgtaattactggtgtgttaatttccctggggggaaggcggtggtggatactgacctctggagttagcagccactcaaggctctattccttatttggttttggtgaggatgtggattctcctttgtgttctctggtatatgaagggatttcaacttcagttctccattttcttcatttttctacccccaaaatggctaatccctattttacatttctgaatttttacatttgtctaaaatcttgactcaaatagttctgaagaattctaattattttaaatttgcttttttagagacagggtcttgctctgtcatccaggctggagtgcagtggcgtgatcatagctcactgcatccttgaactcctgggctctagtgattctcctgccttagcctcctcagtcctagctgggactacaggcacaagccaccaagcccaattaatattttatagtgacagggtctctctatgttgcccaggctggtctggaagtcctgggctcaagcagtcctcccagcttagcctcccaaagtgctgggattacaggcaggagtccccatatttgtttatttgaacagtttgctaagcaagtaaactgaaaggacattgaagaattagtgtattttttgtgtggcccaagacagttcttccagttgctgaggaatccttcagtgtccaatactgtttattataagctctggctactggcagaagaatcagttttagcttggagaaactttatgtaaggaagtcattttatttttttaagttatacttaaaatttttatccatttatttatttattttgagatcgggttatgagactaatttttgtatttttggtagagatggggtttgaccatgctggcccaagctggtctcaaactcctgggctgaagtgatccacccgcctcagcctcccgaagtgatccacccacctcagcctcccgaagtgctgggattataggtgtgagccactatgcctgaccaggacgtcattttagaatccatgggaatactactacaatagtagtattgtctagtgcaagcttgtccaacccacagcctgaggaccatgtgatggctttgaatttggcccaacacaaattcataaactttcttaaaacattatgagatttttttttttgcctttttttttttaaagctcatcagctattgttactgttagtgtattttttgtgtgacctaagacaattcttccagtgtagcccagggaagccaaaagattgcacactcctggtttagtggttaagagcatgaactctagaggctgactgcctggatttaaacctagctatgtgacttttgtcaagtcatttagttagctcagctgttaaaaatggacagggataatatgaatatctgcctcatagaattggtttaagaattaaatgagttaatacctttgaagtgcttggcactggtgtgatgtaagtatttcctattatagttatcctgatttctagtaaatatgagataaattgatctggtagttattgatgtcaaaatgcctttgtttaccccttgggtttttggctctgaataattgttacgatattgggaatgttggacatagagctcaatacttactttgcttaatttattgaccaacgctgagcagtctgaaattgagtaatgtttattactttctcagttccccggaaccaacttcagtcagtggcagcagcctgtaaagttctaattgagttttctctcctgcgtctggagaatccagatgaggcttgtgctgtgtcccaggtgagagtgatgggcccatttcttgccctattctgaagcagtgttgtgactgactagtggaatagagtagaggtcagtgaactttttctgtaataggccagataggaaatcatttgcaggctgtatgttatctgttgcagctagttaactatgcctttttagtgtgaaagcagccatagattaatatataaatgatgaacatggctgtgttccagtaaactttatttacaaaaacaggcagtgtttgaattggagctgtagtttgccaacctctggtacatggggctacagagtcttctcaaggattgcaaacttacatacctgcaggggccaggtaggtaacagaaaatgagtaaagtgtgctagttgagaagattgcaggtcccaactaaaggggctaaccactatttggctctgggttattactgccatgcaggaatggaggtgcaaggttgctatactgtgaattatttgagcgtgagaatttcagatttgcatgtgaatcttttcattcccttcaaattttaaaaaaatattgtgagaacaataagacaaatctataagctacatacggtctaaggacatcagcttgcagtctttgctttagtgtttatatgaacctaaatttggccctgtgccagttagaatttccaaaagagtagaattttctgaaagatctatttgtttttgttttcttttgtttgcatttgttttcttttcagaaacacttgattctcctaatcaagggcctgtgcactggctgtagccgactagatagaactgaaattatcacatttacagcaatgatgaaatccgccaagctgccccaaacagtgaagacactttcagacggtgggtgttcctttgacagatctgatcacatgaccacccccatggcaccttttccatggcacctttgccttctagtggcactttcctcagcccttttttttgcctttgtattttacagtggaagatcagaaagagctggcctcaccagtaagccctgagttgaggcaaaaggaggtacagatgaattttttgaaccagctgacctcagtttttaaccctagaactgtagcatcacaacctatcagtacacagactctggtgagtttctttagtcaaatgtcttcttctctgtgggttttgttaagatgataacactaggggagaaaaagtgatgtattttatgtttgtgatataaaatgatatacatgtctgtgggacaaaagaaattgaggaatacaaaataaaacaagtaaaattcaccccaactccttcttctgtccacggttattactgttttgacgaccattctaggcttctctcaatgcaaattaacaaatgtaaggtgtatgtacagttttctatataaaggcatcactccattttggttatagaacatatatatattttaaagctgtatattttttccctcctcctgaaaatgtaacctgtattttctccaacatgagtaaggaattttcccttcactaactggggagtctggagagtatccgtgcagctactgctcacttttgacagttggtttggtgaagagataatagtatcttgacaggccttatgtttcttttcaggtggaaggagaaaatgatgagcagtcatctacagatcaagcctcagctatcaaaaccaagaatgtgttcatagctcagaacgtggctagtcttcaagagcttggtaagactcccaactgttatcagaaagctgatttctgggctgtcaaaaattccttaagtgtgcttctgtcatatggataagaatcaagcatcagacaaaggcctgtttgtaaggttgtggttttcattcatttaggtggctcggagaagctactgcgtgtatgtttgaacctgccatatttcctacgctatatcaatcggttccaagatgcagttttagctaattccttcttcataatgcctgcaacagtagcagatgccactgctgttcgtaatgggtaaggtgcttcacagtgcacatgctttactttttttgtttttgggacagggtcttgttctgtcacccaggctggagtgcaggggtgcagtctcggttcactgtaacctcgtctcctggttcaagcagttctcccacctcagcctcctgagtagctgggactacaggcacacaccaccatggctggctaatttttgtattttttgtagagtcggggttttgccttgttgcccaggctggtcttgaactcctgggctcaagcaatcctcctgccttggcctcctgaagtgtcggaattataggcgtgagccactgtgccgggcccatgctgataatttctttaactgtcacattatagaagtgaatgattctaagagacacttgttgatctctgtcatgttccagctttcattcattggtgattgatgtaactatggcattggataccctttctctacctgtgttggaacctctcaatccttctcgtctacaagatgtgacagtcctcagcctaagttgtctgtatgcaggtgagaagttattatatctggtctcattttctcagtcaagcagagatatactttcaggaaaccatgaaaatcctcctgaatactctactcatcccccttgcttccttctctcaaggatcatctaacgtcgcatcaaggtgaaatgaggtctcaataggaatctttgtaaatggtcctgttgtttcactgctgccattgcgttataggcatatttgattttatagtatgtgcagatactaaatatttactatatgaaaagcaaattgcctaagactgttgagatattgagatgaactacatgtagtctctgccctcaaggagcctacatctgagcagcagagaacacataaagctaaatagtataatataaaacagtattaaaggcaatagaagtatagaatattttcggtacacagagaagagagggattgagtcttgctgtgggatcaggtttgaagaaggcttcgtggaacaggtggtatctgtttatactgataaatgcgaagaatgatattctttaagcttccataaaatccccttttttcctgttgatcttactgcctttgaagcagggcctgacagctggtgtttactctcttttaagttattgttaaaaggactttttagcccagatcactgatccttggctttaagttccgagacatatcatatctctggtatgtcttggaagttatagcaatttcagaagtttacttggttttgcaagtgaagatttgagcagatagtcttggagacctgaccttggggacaccatgaaattactgaggttgatctccctacattctctgaacagttttaatttgaacatctgtgtgtgaataggaagataaagataaaggcatttgtgctctcagagaccttactgtcttttagaggatattagtaaataacttataagtgaagaaactgaatgagagatgagaaagtactttggaagtttagaggagggagagctcactttcagttgagaaaggcagtaatcatgaaggagctctgatgttgaatcttaagtcaggtaggatctcggcttggctatttctaggcagaggcagaagcagacaaaacgtatccaagagtttgggggaacatactacgtaagtttgtgtgtgtgtgtgtgtgtgtgtgtgtgtgtgtgtgtgtgtgtgtgtgtataagtaagtctgtaggttttatggctgttcgtgggtgttgtataattggacagaaagtaagactcaattagaaatgcagactaagtcatttggaccatatcctgtagatagtagagaccattaaagattctgagctgtgagaggatctgagctatattttaggaagaacattcaggctgtactgtacaaggtattttggtgtggggaaatattggaggcagggaaactacttaggaggaattggcagtcattcaggcagcgtacatttagggcctcagctagggcagcagcattaagagtagaaagttaaggatacatgtgaaaatatgttctctcatagctaatttccagtattgagcttcctcatgctctaccgttgattttgcatttttaaatttggggtttatttattttgatttccaggggatttcattaccctcacatggatctcaatgtactcagtcagtaagtgattaaagtcagtaaggactagagattctttaaaaattcatagtcggattaaagatcccaaatctggtttgttaaaatttgatcacttgggatttgatttaaggaaagggatttggctatgatgtctttgagaaattccaggtataggatttttttttcataatcttaaaatttatttttaattttttgaaattattagattttactattattattattattattattattttgagatggagtctcgctcagtcgcccaggctggagttcagtggcacagtcttggctcactgcaagctccacctcctggtttcacgccattctcctgcctcagcctcccttgtagctgggaccacaggtgcccactaccatgcccggctaatttttttttttgtatttttagtagagacggggtttcaccatgtcagccaggatggtctcgatctcctgacctcgtgatccgcccgccttggcctcctaaagtgctgggattacaagcgtgagccaccgtgcctggccagatttcattatttatttatttatttatttaagaaatacagtcttgctatgttgcccaggctagatttgaactgttaggctcaagtgatcttctcacctcagcctctggagtcgactgtgcctgcttctagattttaaatttagtgaatgaattaattatttaattataatttttttgagatggcatttcgctcttttgcccaggctggaatgcaatggctcaatcttagctcactgtaacctctgccccccaggttcaagtgattctcctgcttcagcttcccgagtagctgggattataggcgcctgccacttcgcctggctaatttttgcatttttagtagagatggggtttcaccatgttggcgaggctggtctcagactcctgacctcaggtgatccacccacctgggcctcccaaagtgctaagattacaggcgtgagccaccgcgcccagccttaattatttatttttattacttttttaaaaagagacagaatcttagtgtttcagccaggtgggagtgcagtggagcgattataactcactgtagcctcaaacccctgggtgcaaatgatcctcccacatcaacctcctgagtaactggaactagaggcatgcaccaccacacctggcttagattttatttttaaagcaattttaggttcatagagttcgcatatcctccttctcccttatagctagtttctcttatcagtaatacttttaattagtacggtggatttattattgatgaaccagtattgatatattattattaactgaagtccatagtttacattggggtttcatttttgtgttgtacaggtctatgggttttgacaaatgtatagtgtcatgtgtccatgattaccatattgtacaaaatagtttcactatcctaaaaatcccctttgcctattcattccttatcccatccctcgacccctggtaacaccactgatctccactgtctctctagttttaccttttctagaatgtcatgtagttggaatcatacaataagcaggattttcagattggcttctttctcttagcagtatgcatatagttcctccatgtcttctcatggcttaatagtccatttctttttattgctgaattaatattccattgtatggatataccacagtttgtttctgtgttctcctattgaaggacattcgtgtgtagtgtgtgtgtgtgtgcgcgcgtgtaagttttcagcttatttggataaatacctaggagtctggttactgaattgtatggtaaacctatttagtcttgctcttaatggcatttattttaagtagtcaaatcatggaattgcttgtgggtggggtgtgcttttgtgtttcagctttggtggattcttggatgcactccatggctgagacctgtgcatcttctttttcaggtgtgagtgtggcaacgtgcatggccatcctccatgtgggtagtgcccagcaagtgcggacagggtccacgagctccaaagaagatgactatgaaagtgacgcagctacaattgtccagaaatgtgtaagccaaagatctggggataagggaaccttgattgttcaaatgagggagtatggccagttccactttcttccatgatagaagaaagaacttagagtattctccacactactttccctgggcactagtaggtctaagaggtaggcatccagcttgttgatttggtatattggttgatctggtatattgtttccctatctctgtagaacacacttgaaagattagccattaattcagcaaatatgtttgagggcctactgtgtgtcagtgtacttttagggaaatgcagtaaacaggaaaatttccgatagtgattaagtgcgctgaaacaatacattgtgattgatagtgatctgggccgggtgtggtgactcacacctgtgatcccagtactttgggaggtgggtggatcacctgaggttaggagttcaaaaccagcctggccagcatggtgaaaccctgtctctactaaaaatacaaaaattagctgggtgtggtggtgcatgcctgtaatccccgctactctggaggctgaggcaggagaatcgcttgagcctgggaggtggaggtttcagtgagccgggatcacgccatcgtactccagcctggacaacaagagtgaaactccgtcttaaaaaaaaaaaagtgatctgatgtggagctgggcatgctgcttttgattcggaggagggatggcttctgagaaggtgacatttgatccaaatgaaaagagggagtcagctccatgtgaaggtcaaggaaagtacgatggaatgtatcattgaaaagaggatattgaactcttcaagttaaattgtttgggtaggatttagcatttatgatgaaatctgtcagcttgttcagatttttgtgtctgtttgatattgtacagctcgaaatctatgacatgattggacaagcaatcagcagttctcgccgggctggtggtgaggtaagaagcgtatctgtctctgctgcatacttcctatcttgtcctctctgagatgtaaatatctctatgattatgttttttattttgtgcctttcacaacagcactatcagaatttccaattgctgggtgcttggtgcttgttaaacagccttttcctcatactgaacctcagtcctactgcgttggctgataaggggaaagagaaggacccactggctgccctccgagtcagagacatcctttctcgtactaaagagggagtgggctcccctaaactggggcctggaaaagggtatgtgtctacttgattataacttatattttgttttatttcgctaacattttatatttacagggagctagtatgacttcatatcaataggaaaatttgccttcctacctggcttgaatttagcaactaagataatgatcatgacctgttatctccacagcatagctttgtgatttttagataagtcactcattctctttgattctatttcctcatctgtcaaaggggaaaaatatctgtgcaatgtgtatttcaggaattttatgaagttcacatcagaaaaacatgtttctgtcttgtaaagcgggcttgtttgacttggagttgagtacttgcgtgtataacctgtaagatgagaatattgtcagggcctcctggtttgcttcctgtaatatttgctgttgttttgatgaactctgaaagaagagatatgaccaatgtactgttcaggtttcgttttctaagcccaggtgtttctggattttattttttcattcaatccctattatatactaggccctattctaggcattgaggatatagcactaaacaaagtgatgtccttgcctttatggagtttattttatatctggagaaacaatgaacaaatctattaacgagtagattatagataatcatatataaacgttgtgaagaaaaagatgtcagagcgaggggccggagagtcataggggcttttattattttattttttttgagacatagtctccctctgttgcccatgctggagtgcagtggcgtgattgtggctcactgtaacctccacttcgcgggttcaagcaattctcatgcctcagcctcccaagtagctgggattacaggtgaatgccaccacacccagctaatttttgtatttttagtagagacggggtttcaccatgttggccaggcagggtctcgaactcttggcctcaaatgatctgcccacctcagcctcctagagtgctgggattacaggtgtgagccactgcgcccagcccagggctattattttagttatttagttatttaggatgatccagaaagggctccaaagacatgatgtagagaccatatgtgaagtgacagagctatgtaagtatttggggtagaattgttcaggtttgagatggaagtatcattgacatttctgagggtcagcaaggtcagtgtggctaaaatggagaaaccaaggtgggagagtggtagaaaattaggtcagacaggtagccagtggccagatcacctagggccaagtgcagtcagtaactgttagaaggattaaacaagggagagatgcaacctgatttattggtgatctgaggatagactgcagggcataagataagaaggagggagaacagttagcagcgaatgcatcattccagatgagatatgaaggtgacttggatagggtggtgcggcaaaggctgagaaaagaggccgaattgaaatatatttggaaggtacagctggcaggatttactgatggcttgtatgttgggtgtgaaaaagatgacatcacaattttttggcttgaggtcactgggttgtataatttactgatactgggaacacttgtttaggagtgggttgaatgggaagatggggaagaaataaaaacgtaatattggccatgctgagtgtaagatgactgtcagacctctatgtgagatgttgagtgggcagttggatatgtgagtctggagtttcaggaagaggtcacagcctggactgcattaacaaattaccctctgagcatcttctgtgtcccaggctctgtgttagttctggattgctgtgatgaacataaaaatggacatattctcaagagacatgaactaggtatccatacaaatatatatatatatatatttttttttttttttttttttgaggcagagtctcgctctgttgcccaggctggagtgtagtggtgcagtctcaactcactgcaacctctgcctcccaggttcaagcaattcttgtgcctcagccaccaggtagctaggattacaggtgtgtaccaccatgcccagctgattttttttttttgtatttttaatagagttggggtttcgccatgttggctaggctggtattgaactcctggcctcaagtgatctgcctgcctcagcatcccaaagtgctgggattacaggcatgagccaatctgcctggccatgtcaaattgtatctagagagtattagaacaggggcatttgacctggctagggacatcagagcaggcttccccaaggaattgctaattaagctgaaatctgaagccggtattgacatggtaagttgatagatactaggcgaagtaaggaggtaagagtgttccagagcaaacggtagtttgtgattttatgagtggccattttcattcttggcattgtaaagggaaatgaaagaatgccaagaagtatatccttagaagtagcagttatgcttttaaaatggctgttgtttcttcatattttaaaagaatacatgtatgttgtataagtgacaagccatacagatggacataaataggaaaggtaaaaatgatcccaaattctaccactcaaattggtaaacattccttcagacatttttctgtgcacatataaaatatatataagtttacaaaaatgggatcagtgtatatgaaatactgcatcatcttttcagtgacactattaaaatgtctaagtttttaatggccagcagtattccactatgtaaatataccgtagttgcctaattcccctattgctaagcgcttatttagattgttccaaatgtcttgttttgataacttcctgaaatataaacttttgggaacttaattgtcctgttgggatgaattcccaaaagtaccgttgttaggacaaagggctcacatatttaaacattggaaatgttttgtcaaactactcgttagaaaagtaacactaatctgcattgacaccagctgtgtgcttatatgcccatttccccatgctctctttgacaatgggcatcattagtcttcatgtttgcttgtcttagaggagagaatgctatgatatttcatgtatttgtatttctttgattactaatgtgattgtatttcctttcacctatttattggtcatttgtatttcttttgtaaactgccttatgtcctttgccttggttttctttttggtatttgtcattttctttttaatttttttattattatttttacagaggtagagtcactttgtctcctaggctagagtgcaatggtaggattatagctcactgtaaccttgaactcctgggctctggtgatcctcccacctcagcctcctgagtagctaggactacaggtgtgcaccaccatgcccagctaatttttaaaattttttgcagagatgggatcttgctgtgttgaccaggctggtcttgcactcttggccccaagcaatcctcctgccttggcctcccaaagtgctgggataatagatgtgagccaccgcatctggcctgtgtttgttcttttttctttttgatttatatgaacttgcaaatcatatatattaaccttttgttatgtggagattttggacaggaggaaaacactttacttgaatgtaattttcttttctctcttttgttttaaacaaaacctcactctatcgcccaggttggagtgcagtagtatgaacacagttcactgcagcctccacctcctgggctcaagtgatccttctgccccggcctgttgggtagctggcaccacaggtgtgcctcaccacttctggctaagtttttcatattttgtagagatggggtcttgccatgttgcccaggttggtcttgaacttctgggctcaagtgatcttcccaccttggcctccccaagtgctgggattataggcatgagccactgctccaggcctctctttttattctcttagatttgtttccagatattttatagaagttggtaattcaaacctttttcttttcaaaataatgattctttaaaagttcaatctacatttaaaagtcagcatctttgtataacccattagccttgaactgattgtttaaattccaaaaatttttccatttgggagtttcttctattccaggaggttttatttatttatttatttatttatttatttatttatttaattttttgttttgagacaaggtcttgttctgtcacccaggctggagtgcagtggtgcacctcagcctcccaagtagctggtaccataggtacatgccaccatgcctgggtaactttttaatttttttgtagagacagggtctccctctctaggttgccaagctggtctaaaattgctgggcataagtgatcctctcatctcggcctctcaaaagtgttgggatttaaggtgtgagccaccgtgcccagcctagtccaggagttctaaacctgaagcctgcagatccttaggccatctgtggatggggttcaaggagattgtgaacttcagaaattatatgcagatgtatgtatgtacaattttttttttctgaaggtccacagagtctgaaaggggtctgaaaccccaaaatggcaagatccactgcttcagaagttgtaatttattgttaattattttaaggattgtgttttcctttttctttgtgtaggcatcagggatttggggtactctcagtaatattggcaaaccatgccatcaaactgctaacgtctctctttcaagacctacaagtggaggcccttcacaaggtgaggaggttatccccatggtaatcagcatattgattgcgggatccacttctggccaagcaagcttgatccatcaactcaagttgttttttctggctgagtagtatcattaattgccctttgatatcattgccttcagggttgggagacagatggcccccctgcagccttgagcattatggcccagagcacctccatacagaggattcaacggctgattgactctgtcccactgatgaacctgctcttgacgttactttcaacttcctacagaaaggtgggtgggagttaagccattgataatttagaagaatgtctcattttatatatatgatatatatatgtatatatatatatatatataaaactttcttgaaatgaataagactgactacacaccatgacctttatagacccaaagttttggtactggtgttgaagaagtgaaaaattcttagcgggttgaatctatccaaacatttgaatcagttattaattatcagttttgtgatacacgtggctacttggtgatttgtgatgattggcatactgaagcagaagcatagaggacactatggaaacactcctgttttcaattcttgtccacgtctctggttggtagtgtttttgtagggtaaagtgatgaaagtccttaattaagggagctattaagaggcatactcttggatttaggaaaaaataaaagagattatggagaaagttttcatgcgatgcatgagattaaataggatggctccggttttgtaattgtcattttcctaggcatgtgtcctgcagcggcagaggaagggctccatgagcagcgatgccagcgcctccaccgactccaatacttactatgaggacgatttcagtagcacggaggaggacagcagccaaggtagaggccgctcttttctctctcccagagataagctatagagtgcaacaggagtgttctcagcagattcctgtagtttcctgaccaaacaaaagtttccattttgttttcacctgcttagcctggaccttggttttatgtgcattcaaagatgacatgttatttaagagcaagttgagctgttgatgaatgaatgatggaaacaactttcagccaagcctgggttacttttcattcctttccctccaaaatcagaaaacatctcaattgttccatatttcttcctgtgttgactcattttgtgacctctgctctaagctttctcagtgaaactcaaaaggtcacatgtgaggtgttcggtttggatgttatcatagtcatagtttagggaagcttgagtagagaaacctaatcctgttgtagtgaacccactggcatgccctcctgccttagtttgatgagagaatgaataaggtaagtacctcagattctttcataatcaggtttgtgggaacaatgtgaaatacgaagggaggtgtgattcttaccgtcctgtgatttatggttgataaggcaagtataaattcgctcttgaaaatatttggcttgttaccagtaaaataatgtgaagttgtttttctttctttgttgggctccttaaagaaaaattggctgggcgcggtggctcacacctgtaatcccagcactttgggaggctgaggtgggcagatcacaaggtcaggagttcgagaccagcctggccaatatggtgaaaccccatctctactaaaaatcaaaaattagccaggcacatgcctgtagcctgtagtcccagctactcgggagactgaggcaggagaatcgcttgaacctgggaggtggaggttgcggcgagccaatattgcaccactgcactccagcctgggtgacagagcgagactccctctcaaaaaaaaaaaaaaaaaagaaaaaagaaatcagttttattggggtataatttacatgcaataatgtgagaaattcttaacgggttgaatctatccaaacatttgaatcagttattgatgatcagttttgctcttattttatgtatgcatttagatgagttttgatacacaaatgcaatcttgtaaccatcatcacaattgggatatccttgtattccttttgacttaagtacttttaggaagcagatgcaccaaaaacacttttaaaaaatatttattttcgttactttatctttctctattcagacgatgacagtgagcctattttggggcaatggtttgaggagactatttctcccagtaaagagaaagcagcacctccgcctcctcccccacctcctccactggaaagctctcctcgggttaaaagccccagtaagcaggcccctggtgagaagggcaacattctggcgagtcgcaaagatcctgagttggtaagagtaggtttctaaggtttaggggaagtggacatggggagctaggggtatgagaagcagataatttgaatgcaaacattttgtggcttggataactgtaatgtttaaagatatttttgcttaggacttatatgtcttgattatgtgtcattaaataacttacgtgactgttactgtttctctgctggcctttagaatcacttaatggctttgtgactttgggcaagaatctgaattttttctagccttagttttgtctcctatcatatgggagtgattgtacctgcatctaaaggtgttgtgacatcttaaagagagactatttataaagtgcttagcataggtctgatatatcatcagtgcttgctgtggttgaactgttggttcaactagtattatctagtaagtgtcagtccccgttctgatgatgtgagtgagtcagatacagttcttgccttcatatatatagcttacagtcaaggatgtggacaaaaaacatttatacaataattcaatttaattttaatagagaagagctaggaattctatatatgtgtaataatcattcatataggcttcaggattgaatatatcagtagtgaattggagccggacaaaggaccttaggagaacaaaagaaatgggtcagtctatttggaaatcctgttttcatacactgttttgtaacatctgttatattaaactggaatgccattttgtgtaagtagaattaggtgggaaagagagactcataatgaaacttaggcccactgtaagtgatttaaaatctgattctttcattcattgtgtttattgcaggatacctatgagcatattttattttctatttgtaatcagagtttataggaacgctgggcttatgaccctgataagagcttttttgtgtgtgttcctttcagttcttaggtctggcttccaacattttgaacttcatcacctcttccatgctgaactctcggaacaattttatccgaaactatctgagtgtatctctttcagaacaccatatggccaccctagccagtatcatcaaggaggtggacaaagatggactcaagggtcagtagacaagatatgtgcctgatggattttttttctcatggagtttggctgttggcagggaggtgtggtgcattcaatagctgcttaaataattggcttttctacttgtctttaaggttcatcagatgaagagtttgctgcagctctctatcacttcaaccactcactggtaacctctgaccttcagtcacctaacctgcaggtttgtgtgtgctgtgaccatctaggcaagagctcatgacaccagcttccataggctgcagctccaattgtttgtttgtttgtttttttgagatggagtcttgctctgttacccaggctggagtgcagtgacacggtcttggctcactgcaacctccacctcccaggttcaagcgattctcctgcctcagcctccagagtagctgggattacaggtgtgtgccaccatggctggctaatttttgtatttttagtagagacagggtttcaccttgttggccaggctggtctcaaactcctgacctcaggtgatccgcccgcctcagcctcccaaagtgctgggattataggcgtgagccaccgcgcccggcctgtagctccaattgttaaggaacagtttgtcattaaatcccctccctggaaagagcgttgagaggtgattctaatatgtccctgtgccttatatttaggatcatttccagaaaaaaaaatatgtcttttatcttaagtcagtaagcttaaagaaaaggaaaacccacaaaaacaaacagaaactcctgatgattatgctagcagaaaagtggacaaatacacaagcaggcagtttatatgaaaagaagtataagtggtcaataaacataggaaaagtattcaacatccttagtaattgaagaaagacaaattaaaatgtgtgttttaaaagaatcaatcaaattataggagatagatgctctcatatacacttgtacttgcaaactcaccaccaaaacaaaatctaggacgttgactgtgaacttccaatcttatggttctctctcccctctgaaatagctgatgtcttgaatcctaaatctcaagttcctcatgtccttagtcatatatgtatatgtatgtgtatgtacatatataatctatattccttaaatttaaaaaaagttttaataattgcttgtagttttatagcaaatgacatcatgctgtatgtaatgttttcaagctctctcttttttcatgtagtatgatatagtactgtattgccaagattcatctatattgttatatatttctatagttcttgtttggactactgtatgatattccattatgtttgtgactcaaaaccacaatgagataccacttcgcttacacgcattaggtggctgttattaaatggaaagtaagtgttggtgaggatgtggagaaagtggaattcttgatgcattgctggtgggaatgtagaatgatacagtagctgtggaaaacagtatgtcaattctgcaaaaattacatatagaattactatatggtggcacgtgcctgtagtctcagctactcgggaggcgaggcaagaggatcacttgagctcaggagtttgaggctgtagtatgctatgattgcgcctgcaaatagccactgtactttagcctgggcaacatagcaagatccccatctgccaaaaaaaaaaaatagaattactatatgatccagcaattctacttatataccccagaagaaatgaaagccggggcttgaacaggtgtttatccacccatgttcatagcagtattattcacagtagccagaagatggaagcaaccctggtgtccattgacatttgaatggataaacaaaacatccagccatacaatgaatgttatacagccttcagaaggaaggaaattgtgacacatgctacaacatggataaaccgtaaagacatgatactaaattagtcagtcacagaagcacaaatacaaccttgtatggttccacttctgaggtacttaggtagtcaaattcatagagacagaaagtagaatggtggtcgcgtggggcagggagatgggaaaatggggacttggtgtttagtgggtacagtgtttcagtttggagagatgaaaaagttctggacgtggatggtagtaagggttgcagaataatgtgtatgtgcttaatgccacagaactgttcatgtaaaaatggttgaaatggtaaattttatgttgtgatactttaccacataagaaaagtaaaacaaaaatagtgcttggtacctagtactagtaccttctaaatgttagctctcttaataattgtattattgtttaatattattattgcagtctcttggttcatttgttcaatacatattcattgagcacctactatgtgccaggtactattatagacactgaggaaataaagataacttgagttagtgtgggatcatgaaaaaggagggagataggcataggacattttgcagagatcatgggccattatttgaatggggtgaagagcatggagaggaaggagtcttggatattgcctgagtttaaaactcaaatgaaactagaaggatgctattgtcattaatagagacaggaaagtcaggaaggggagttggtttgggggtaagagagattgggttttgttttgtttttttttagaggtggggatgttactgtatctcccaggctggtcttgaactctgggctcaagcagtactcttgccctcagccttttgggactatgtgtgtgtgccatcatgcccggctggtccgtccttctttccttccttccttccatccgtccgtcttcctgatggggtctcgctatgtcgcccaggctgctcgaactcctggcccaagtgatcttaccacctcagtctcccgtatagctgggactgtaggtgtgagccactgtgctcggcctaaggtttcagtttaactatgatgaagttttggggtgccagtgtctagaaaatagtttggaatgtgagtctgaaattgaggaattaaattggggcaatttttgaagtaatgagaaacagtgagactagcaagatagctgaaggctgaggctgaacccttagaaatgccagtatgaaagaggagtggaggaagggaggactcagccagagttctgctgctagatggactgtggtgcagtttgacttcttagagagtcagttaccttacttagagctgagaaggaaggataggggtggaagggaaagaccaggttcctatggaatgttaactcatttttgtggctctgaggactgaaaaactgacacaaagatgaaaaatgagcaaaaaaaagcattaaaaatagcattataaggaatatatgttacttatccatatatatggctaggtacgccccttgatttgaacatttagattttttttcctgatttttccattattagaattgtgctacagttagtatttttcatgtagctcaggtaggtttttttttttttttgaattgtttcatttaacttaggaattaagaagttgtttatgactttgttgagcatggtggttaagaatgtggttttagaggctgggcgccgtggcacttgggaggtgggtagatcacctgaggccagaagttcgagaccagcctggccaacattgtgaaaccccgtctctactaaaaataaaaaaattagccaggcatggtggcacacgcttgtaatcccagctactcgggaggctgaggcacaagaattgcttgaatccgggaggtggaggttgcagtgagctgagatcgtgcaaccgcactcctgcctgggtgatggagtgagactctatctcaaaaaaaaaataaataaataaagaacatggttttagagataaacctggctttaccacttagagaccttcaccatcccttatcagtgacatggagcacataatacttcctgtctctgcctggcacatccggtgtgacaacaaagtatgctctgcatttagctcaacctatggtaactgtgtagtccacggaaactgctcttgaggccagcgacattttgcgaaacattcatttccagggaagagtccttgaggatgtagtataaaaatataatttaatttggcagacttagaaatttatcctacatcccacagtaaccatgctttgtgtcttctgaagccaagtgagaaagcaggcatttgtctggttttccattggcatcctgctcagtgtgtgtgtgtgtgtttgagaagataatttgcagcttagttactgggctgaaaatgaagctcacttgaaagacatgctccacctggaggtgaagaacagccttgttgagttctgggtgccttgagatctcataggcagaatttctctgcgaatactgcggatctctaaattgttggatcttccccttttgggtgttatttgtattatgtaactgattattaaagaaaaactattagctattacagttgttcaagaagtttgctttcaaaggcaacaacttctcatgttttgtccatttacaaaattatcctgattctggtatctcaatgcttttctcttttttcaggagcccatatctgacactcattaactataaatgttaatgaggttagatcagtaagttttcacttatgtttttctcatttgttgacctaaatgatctttatccaaactattccaaaatctgaatttctgggtccttctttctttaaaatattctgttcaatattaaacaaacaaacgtttgagaacatgagtaaccttttgactttatcccgtatctgtttgctaatgttctgttccatgtctttcttgtcagaacacactgttgcagcagctaggagtggctcctttttctgagggcccttggcccttgtacattcaccctcaaagcctctctgtgctttcacgcctcctgctcatctggcaacataaagccagtgctcaaggtgaccctgacgtcccagaatgccttaaagtttgggacaggtaagatgtctgtaagagaaggcctatagagaaagttatttccttttttatttgtttgacttctttgtagttaatctgtggctttgaggctttgctgtaatgataatgtttagagtggggagggtagaagagggatggacttggagatgtgctgttaaaaaacaagtatgtcaactttggtctggaaataaatctccctgtagcacatgggggatttggttataattatgcgatggaaccacaatcttgaacagaaccaattttatcctgacctgcttttttgaaagacaagcagggaagccagctctgtccttggttattttgctttcaacatgaaaccacttaggggcacttgcagtgttttttggagaaattttaaagaatttttttccttgggggaagctcagattaatcatctaaatccactttagatggacctgtatttgccatttttgtttacatggttagaagtcttcaaagcagtttgttttcctaaaaggctttgctttctgttccccattgtaggatcaaatagctctaatgctggatttgagaaagcataaaccttcttgagtgccaaagacccgctatatttttcctggtggaatcttgcaaaaaggctgagagggtcgaggggtgcaatgagggaaacccttgttaaacacacaaatctctttcctaatattaaaacacaaatctctttccaaatagccaaaggcaatggaaacagttggctacattcattccttttttgcattaaagctcttctgacaaattctctgaatagtatattttcttttttattgctttatagtctatcgagttatttttgactattatcatgcagtgatttttaacctgtagtataaactctcaaaactagaattaaatgatagaatcaaaatatggggaaaagtaattgaactggttcacctgtccaagtttgttaatcagaaaggaacaatagcaacatttttgtgggggagcttgtagtacttttcatggccacaaatgacagggtgggcattaacacgcctgtgttaaggcttgcctcaagcaatcctcccctcgacctcccaaagtgttaggattatagactgagccactgtgcctggctggccaagtctgactttttttagccaaaatttagtttctgtcttgtctttaccatgtagcctttttttcttccttaatttgttatcttactgcctgggtttaggaaatttaactcttctagtgcttgacattataactcctggggaatgctctttttcccaccagatatagtcatcttttctctctggtaggtttttgtctacaatgaagcagaatgccctgcaaggtgtggtgcccagtgagacagaggatctgaatgtagaacacctgcagatgctcctcctcattttccacaatttcaccgagacaggccggcgggccatattgtcgctttttgtccagatcatccaggagttgagcgtcaacatggatgctcagatgcgcttcgtgccgcttatcttggctcgcctccttctcatctttgattatctgcttcatcagtactccaaagcccctgtgtatctatttgagcaggtacagaccaacacgttcttttttgcttcaccattactgagaactttattcttctcaatggttaccatgatccgcagcccaaatgacctacccactttaggttttaggttttggtaggttgatgggtaggattaggaggaccactgagactttgtacttgatgtttagccagaagtgatacatgtagattacttgatttgatgcattttttgaaagtggaatgtaggctgtgttcaaaggcattctcccacgaattgccctgctctacctgtgtctgatgcagtgccctgagcatcggcccttgatgagtatttgttagtggttgaatgacagtcaagtagtaaattttatggattggtaaattcctttgttgtaaggatccaaaataaggataggaggatccgttcagacttaactgtgttcagcatttcttaaaatgtttcattgagcactataccctttatgttgcaccaaaaattgcattccaaaagtagtcacagaaaaatctttaaatttttattttggtttgtgagtttcccaggctttggtataccaagctattatcgtacctgagtgaaaagctgaatggtgcccaataaaacagaatatttgaatgtagaacacccacattcagattaccaagattcagtgtaccgagctattatcatgcctgagtgaaaagctgaatggtgactgtgtatctttcttaatttcagtatttgtgttttaaaaggtacagcataacctgctaagtcctccctttgggtgggcaagtggatcccaggacagcaacagccgccgggcaaccactcctctctatcatggattcaaagaagtagaagaaaactggtctaagcatttctcatcaggtcagaaagaagactgttaataagaaactgacttactgattctcattggtggggttgaatttgaagcttggggactcttggaggatctttggtcatttgctttagtgtaatccctatgggtggcaaatcacctatggattaaaacatttcagaaatggactcccacatagcctacatttatattttttaaaaaattgaagctgggcactgtggctcatgcctgtaatcccagcactttgggaggcagaggcgggcagatcatttgaggtcaggagttcgagaccagcctggccaacatggtgaaaccccatctctactgaaaaaatacaaacaacatttagccaggcttggtggtgcctacctgtaatcccagctactctggtggctgaggcaggagaatcacttgcaccaggaagcagaggttgcagtgagctaagattgcaccactgcactccagcctgggcagcagaacaagactctatttcaaggaaaaaaaaaaaattgaggctgagcatggtggctcatgcctgtaatcccagcactttgggagggcaaagtgggaagatcgcttgaacccaggaatttgagatcagcctgagtagatcccgtctaccaaaaattattttaataagtagccgggcatggtggcacgtgcctgtggtgccagctactcgagaggctaaggtgggaggatcgtttgagcttgggaggttgaggttgcagtgagctgtgatcacgccactgtactccagcctggttgacagagtgagacccctgtctcaaaaaaaacataaaaactaaaaaataaattgagacacaagaaatcagaatcctcgtgtctggccatagggtacagtatatggattcttgccactctgtgtcattaattttccttattttcccttagagttgtggttctaatgtatagctaaatttccttttgggtcttggtgatatgctggtctgaaacgaatgtgaacatgagattatctctagtgtttttctcatatagcaattgtctgttctttggatgaagtgtttgttgtgttcatttttagtgtgtgtttgcacttaccctgaggattattagatgttaagtgtgttttgtggaaacttttgtgaagccttagtgtgagtttactgttatcttttactatttgatgttagggaaacagcatgtaagtttaatgtgtgcagactaatgatataatttgttgattgatttgattctagggcaccctacttaactcttagagcaatggttctcaatgggtgattttgccctctcccctccaggacatttggcaatgtctagatatttttggttgtcacaactgggggtgctactggcattcagggggtagaggccagggctgctgttaagtcacctagagtgcataagatggcctcccacagcaaacacttatctggctccagatgtcaatattgttaaggttgggaaaccttattataaagtattttctgagttttacattgcatactagtcagatagagttaagaatggaaccattcttttaatcagcatattacttttcagatgctgtcccacaccccagattctactgtgtcctgtccccagaagcctcagaggatgatttgaaccgacttgattctgtggtactaggaattttaaaactgcattttatatgtgggtcagatggtttccaccagaatcagcctactggggggaaagggaatgactgactttttatagtgaggaaatgtggtctgtgttacgatttgagcttattctaataggaaaatgttacttggatatttatttgttgggtgcacttttgctgtggggtttgtcctttctggattggcacctctgacacttgatttttgaagacagtctttgttagcatttttcacatgcaagtattttaatggacaaaaataattgtcttactcccttattctaaagccagcagctgtgtgctcacaatagcttgcaaacagtgtgagtaatgtcccagaatgggaatctgttccaaggagaaattaatgattatgatttgatgggatattttgtcaatcatgaggataagtgatagtgtataggcagtaggaaaaaatactttaaaagtaaggaaatgactctctttctttcttgatgtcaggcatgtgacgtccttttctccaagcttgtcaagtatgatgagctttatgctgcactgacagccctgcttgcagctgggtcccagcttgatacagttaggagaaaggaaaacaagaatgtaacagccttggtaagaccatggaaccctgagaagtctttgggttgtgtttgatcattgatcatttctatcagaaatttccttctgaaatgtaaccagtttattgaatattgatttgcaaaactgactgatacttgagtatttctaggtagtttgtgtagctatgttcaccttaaagataatttaatcagctgttgcatttttttggttaccattgagagaactgtaatttaagagttagtggtccccccccaagtgctatatctcctgtcaatactggttgatgtgtgatattgaaagcctcacgcttgagatttttccatggctctgttaatgtgtctctatattctagaagcaattccaggccacaaaaacggatagctgattgcaggtctgctaagcagaatgtcctgccctcttttggttaattggtaaattattggggagccaaagttgtcttggaatagcctttttggtctgtgaaatgtgcagaatacggaacaaattatttgtatgtgtgttctgccattttctgctaggtgcactctctagaaagatctggagaatggacttgggggccaaatctcaatttaaaatcaggactctatacagttctggtttaaaagttgtatttggagtagttcgtactgtgagggagatcttgaggccataccaagtgctacctctatgctgcttttcctttctccaggaggcctgtgcccttcaatattacttcttgatactgtggaggatcctaggaattttaccaccatcaaagacttacattaaccagctatccatgaactcacctgagatgagcgaatgtgacatcttgcacactctgcgatggtcttctcggctccggatcagctcctatgtcaactggataaaggtaacacagagcttgctgctaagactattcaaagccaaagtgctttgtgcttactggagcttttaaatttgaagataatgaaagctttgcctatagtcatctcctaaacactttttcttgctgtccaaataggatcaccttatcaaacagggaatgaaggctgagcatgctagctcgcttctagaactggcatccaccactaagtgtagctcagtgaaatatgatgttgaaatagtagaggaatacttcgctcgacaggtatgtaatattggaacctaaatgatagaacttggtttctaccatagcccattgccacagctaattatattttgcatatttttaaagatctcatccttctgtagtatcgactgtaccaccatcttgcagctgcatgaaattcccagtctgcagtccatctacacccttgatgccgcgatctcaaaggtccaggtctctttggatgagcatttttctaagatggctgctgagactgatcctcataagtcgtctgagattaccaagaacctacttccagccacgctgcaactcattgacacctatgcatcgttcaccaggtgtggcgaactgcctgcccagagatgcacatgcactcttcactccgtgcagatcccgcattgactcagaatttgacatttttctctttcttcagcttaggggtttttttccccacgtataatgctttcttctctagtatgaaggggtgcttgatgaggaaattttcaaatagtgcaggaggagtcaggaggaagtttaatgtctataattctttaaatattttgtacgattttactcgtaggatacagagaaaggtaatttttcaaaacactgtcatttctgttattaactgagttaaagctccttaaatgctctttatttattattattaaaaaaatttttttctgagatggcatctcgctctgtcgcccaggctggagtgcaatggtgcgatcttggctcactgcaacctccaccccctgggttcaagtgattctcctgcctcagcctcctgagtagctgggattacaggcatgcaccaccgtgcctggctaatttttgtgtttttagtagagacggggtttcgccatgttggccaggctggtcttgaattcctaacctcaggtgatctacccacctcagcctcccaaagtgctgggattacaggcatgagccactgtgcctggcccttaaatgctctttacatgtgatgatatgtagttggagaaaaaaaaaaatctctaaatgagttagaaattatttgaaattcaactctttctataacaaacactgcaaattgcatgccctgtagactttggtctgtatgatgtttaaatatttaaagttaatttcagtatataaaattgggagattattcacaagtttagatttctggcttttcttaaattggaagaactggcaaaactgggcctgacttcccaaacaacagtaacagactggagctgagaattagttccctttgcagcagttttcaccgggctctcttaagcttattgactttatctggtccctgtaggatctcagtgttcactcctgttctatggtgcttttttgttttgagatggaatctcactgtgtcacccaggccggagtgcagtggtgcgatctcatctcactgtaacctccacctcctgggttcaagtgattctcctcagtttcccgagtggcagggatgacaggtgcataccaccatgcctggctaatttttgtatttttgtattttcagtagaaatggggtttctccatgttggccaggctggtcttgaactcccgacctcaggtgatccacctgcctcagcctcccaaagtgctgggattacaggtgtgagccaccgtgcccagctctgtgggctttatgctgctttaaagggacctagatctttgtcagacttaactaaccttgtctcttagtatgactgccttgcagaagatagagggctgttgtttgaggcaaattttttttttggctcaaatttgtttgagccaaacaaatatgtatggctgctacgtgccaggtacttttctaggtgctagggttatggcagtagccaaagcagaccaagtcattgccctctgggaatttacagactctaatctggcctaataggccagtactttccacactgagctgttaacgttcctggtcaagtaagtttgcaaaatgttggataaacagttttttttgttttgttttgttttaaaaaatatagtattcagagcctttactgtatacattgtcaatcttctgaggtggggaaggaggatagatatagtattcactgtttctcaggcttacttgtcaggcagtcatgttttgggagcatttcagaggaggggacattctttgggaaatgattacccattggaattcttagagaccaggaaggggcaggcactatcaactacattaaatagataggaaactgagatatagggttttcagccagtctagggccagtttttcctaactggtgggattagaatcttatggcttcactttccccctgttttttccccagagcctatttgctgcaaaactttaatgaagagggaacaactgagaaaccttccaaggagaaactgcaaggctttgctgctgttttggctattggctctagcaggtgcaaggcaaatactctgggtaagagaacaaatgtgcttttgagtaatattattacaacagctactactgctagtactatggcttctctcccttggtgcctactggcgtttactatttattggagcctttttgtgtatcaagcatttaggtaggtttgtctattttgatcttcacaataacccaagaagtgttactttgatcccctttttactcattataaattaggcctagagaagttatttgtccacaatcctgcatcttgcaagagatagagctgggatccaaaccaggatctgttggttccaaagcataaggctattttgtctttagcacagatctttgctctcctcccctcccctccccactctcttctctcttctcttggcagggtcttgccctgtcacccaggctggagtacagtggcgctatcgcagctcactgcggccttcatctcctgtgttgaagcagtccccctgccgcagcctcccaagtagctgggatcccaggcacataataccatacccgtataatttttaaatttttttgtagagatgaggtcttcctatgttgcccaggctggtgttcttttcatttataggggacaggaagattagcaagctagtactttgtgcctggaaaaatctctttgctgggttaggaatgatctggtagaaatttagggtggaaaatcaaagggcttgattggagttaagtacagtagttaccgtttaaaatttacaatcaatcgtttgtattttccttaatttcaagctttaaatattcatttaacattcagatagtctcactttgtactgcttcattgaatgctgttcttaatgtgtgttatgatccctgcccttaagattcgtcttaaagagaaaagagatcaagagaaaagtgatacctatttatagaaggggagcagatgtttaatggtgatttcagtctgacttgcaatgactcaccctcactttgcatcttattttcagttgtcttctttacttgcaagattagaaagtgaacatgatgggaaatgaaaaccttacaattgagagtgttagctattaagcaattaactggttcttggacatagtactgctattgaaatatctatctaagctatcttactaattattttgacagcctgggctgtactgtttctttctgcatttgggcttggcttttaaaatgctctgtgtcgttccttctttcttgtgatgattccttgtcctttctgtcgcctccaggtccgacactggttcagaatttgccatcgtcagtgcagactgtgtgtgagtcctggaacaacatcaataccaatgaatttcccaatattggatcctgggtgagtccctatctgttccagggtagaaatactgagtgctagccattctgtcttttgttcttaagcctaaaggaattaggcttaaactagctaccaagatatcttcatatactgcagtaatattggctatggctgaatcattaatcaatgcatttaatcacctagttggttctcatatggctttttgcttagaagtttgtgttatcaaaagacaaaccattttatttatttgagcctcagtttcttcaccaattgaatattgggctgtgacgattcaatgtattgaatgttaagtgcctagcatattacctggcacacgaattcccaatacgtgttaactctgtttcctttgtaggttgtatgtcaggaacctgctccttttgtaacagttttacagggtcgcttttagcttctctaggcttttagatactactgagtcttctttttttttttttttgagacggagtctcgctctgtcacccaggatggagtgcagtgtcgtgatctcggctcactgcaagctccgcctcccgggttcacaccattctcctgcctcagcctcccgagtagctgggactacaggcgcccaccaccacgcccagctaatttttttgtatttttagtagagacggggtttcactgtgttagctaggatggtctcgatcgcctgacctcctgatccgcctgtctcagcctcccaaagtgctgggattacaggcgtgagccaccatgcccagccaatactactgagtcttctgtcagttaacttactctttgtatatcctctgctcacactacctctattaacagattatttgcttactgaagttcttttcaaaagctaaatattatagtcttgttatccctgctttatgatcgtgacctctgtttacaccacccagaactttaatagagaccagatgcattgcaaaatccagttccttctcagtcattatagacaaacaatagttttactttagatatagtgcattatattatactctaatcatttgaaagtggtattggatattcgttgcatttaactgttaactttgtactaattaaaatttaactgcttccttttctgtaccccacttcccttcccagcatgaataacagtgtatactgagtagaggctattgtttacaaacgtcagtggggtcttagtttatgtcagtttttttttccatgtgagaattttttccagggtagatggtctatccatttacatctgctttgcttcctttcagcgcaatgcctttgccaatgacaccatcccttcagagagttatattagtgcagtgcaggctgcacacctggggactctctgtagccaaagtctgcccctggctgcttccctgaagcataccctcctctcactggtcaggttgactggagatcttattgtgtaagtacctactacctagccccaaggactctatgtctgtattctattgtggttaaagagggacagtgagagttttataactatgtagtaatgctttcttatatacttctttagcaaaaagaacctgttgctttaaagtataagcacttacctagaatgattttttaacttagatctgaaagacaatagagtacttcctcctttgtgtagtatttttcagaaaagacttgctggctttaagacatattgcaatttggagatgtcttgggtttaaattttaaagtgatagtgacagattatttgataacgtttctccagaatcatagtgggataaattcccaccattgtagggactaggtcaggccaatggagggactattgtcttcttatacataggtaacaggtaaagtcttatattgtattgccctaaaagtgatccaggttcctggcagttcttctagaaggcttgtctgggatggaatacttgctttggtttcagttaattttctttgttgaatattataaaatgcagctcattaatttgacgttttaataaatggatttttcaaatgaaaatgatttttgtttctgatataataatgaaaaagaagaatatgaaattgtatgatgatacctgtgtataaaatagctatcatgggaaaaagactggaataaaggcccttgcgcaattccccttcccctcttccccggcaagtaattgaattaccctgtccttgctttgcagctttttggaggagtgtattcactaactcgatttcattttctttgctgaagttggtcagatgagatgaacccaccacaggtaattcggacactgctacctcttcttttggaatcaagcactgagagtgttgccgagatcagtagcaactccctggaacgcatcttgggccctgctgagtctgatgagttcttggctcgtgtttatgagaagctgatcactggttgttacaacattctggccaatcatgcagatcctaacaggtgagcctgatggagaacagtcaggtttcctatgacctactgctgctatcagtgaaatgtactaacactgctgcctttaggtcattaatagcttattgtttttgtgtgtggttttttttttattctgagacatggtctcgctctgtcgcccagggtggagtgcagtggggtcactgcaacctctgcctccggggctcaagcaatcctcctaccttagccttctgtgtagctgggactacaggtgcatgccaccatgcccagctggttttttttttttttttttttttttttttttttttttttttttggtagagatggagtttgccatgttgtgtaggctggtcttgaactcctgagctcaagtgatcctcccatcttggcctcccaaaatgctgggattacaggcgtgagccaccacacatggccagcttattgttatttgtgtttttcaacagaaaattctgtacttgtgtgcattctgcattaatgtggaaatgtgtgaagagttttttggagtcgttttttgtgattaattcttaggaatagacattaagaaaatggaagacttagatgtttagatttggagacttaaaattgtttttaatgactatcaagtgctgcactagctctgatgagatggacagaggagctcactgaaattgatttctaatattttgttgactgtgctgctgaaatgagtgtggaatgggcggtcccacagcatagctggaccttggtagtttaggccacatggctgtagatgagctgtaaagaacagttctgtttcactttcaccccacggagaattgtacaaatgaaggtgccacatgttggaatttcctgtctcttcgttgttgagtagtccaggttttcatcaaggattccttttattccctgtctcctcttttctttttaacagataaataatttcagacacttttagctgtgtagaaatgatttgtccaaagtgtctttttccctaaatcactggcagatctggattaggactgagctttagatgcctttcctgttcatcttcctaatgaagaggatagaaaaataaagttgaggggctgctattaattcagtaaacatgtattgaacacctactttgtgccaggctttatgttaagctttgccaaaacaaaattagacattgccctcaaggtcaaacagacaaactttggattttaataaatcaccataaggaggacattgaaacaggtcttaatactggtggttaagttttccgtttgatcctcagtggactggatgaatccatcctggaggaatgtctccagtacttggaaaagcagctggaaagtagccaggctcgtaaagctatggaggagtttttctctgacaggtgagccgtgttttgctttattcagtgaatattttttgaatgcctcttgaaagcaaggagctatatatgttgatttaggtacttattatcagcaatatttaaggcctggttaggtgtctgcactttggggagttaattgctgactccttggggttgttggtgagggggttaatttcatgaacaccttgtgctattgactcataagtggtcattttccccagaggagatgagattgtgaagaaaggatgctttttatgtggggctttaatgtgattctttccatttttctcccatcttgcctcccagtggagaacttgtacagatcatgatggcaacagccaatgagaacctctctgctaaattctgtaaccgagttttgaaattcttcaccaaactcttccagctgagtgagtgacagcttttagtaatcttcttatgggaactttgatgtccggctaatactgtgcatatcttctgcctgagtttaactacagcatgaaaatgctaacgagtggagagaatccctcagagaaagtttggaaggaagttgaaaacttgctttgaagccatttccccttttcctggctcaacagtttgccccttctttctcttcctcttgcccttctttactgaccctggcctcttgttctgctcctagctgagaagagccctaacccgagcctgttgcatctctgtggctccctggcacaactggcctgtgtggaacctgtgcgcctgcaggcctggctcacccgcatgactacatcgcccccaaaagattctgatcagctggatgtaattcaggagaaccggcagctgctgcagttactgaccacatacattgttcgggaaaacaggtagaacaactacatttctgtcgtgtttccctagcaaccccagaaacacgttgatatttgcagttatctttccttcgggcaccagtcttagcattctcagcatttttgtatctacctctctctagactcaaggattctagtgtagctccttgatttttttcccatggaaaaacttttggaatgacttggcctgtcagttacaacctgaatgaatgttttatgctctactagcccaagtccaaagctgggattggtattgtagttatgtatttaatgtttaatttaaaacttcctttataacacacagaatgagattcctgttgattattcaccaacttgctctttcttttctcctagccaagttggggaaggtgtgtgtgctgttcttctgggcaccctgactcccatggcaacagagatgctggccaacggtgatgggactggcttccctgaacttatggttgtgatggccactctggccagtgcaggtcaaggtgctggtcaccttcagcttcataatgctgctgtggattggctgagcagatggtaagatgatgaagttgtatctgtaggttacaacattgatcttgagaagtgggttactttctttatagctcaaagtgagtacagaagaaatttgaatctctaccctttcattggagtttgggagttgggtgggtagcaaatagctctgttcactttagacttcatcttcatcattttcttagtagagtttcctgttcattgttcccaagataattcttggggaaagtatgccaagtgttaatgataattctaaggccagagcaccccaagctatgtaactatatagtacttatggagttttctaagaatgcttctgcttcacagtgtcctcagattgattcaaagttaatgaagatgcctcatttcgttggtttcttcgatgattttgtgtctcctctttcccctcttttttttctttgggacagcaagaaatacctgtcacagaagaatgtagttgaaaaactgaatgccaatgtaatgcatggaaaggtaagaaaagtgaggaatgacaatggggggtgaagggaaaggtgattctcacctctgtggtcaggtggaagtctctcgttcctattgagttctgtgcctggctagcctaccaaggataaggctgataatctcaaagactggaaatatgtagttgctaactgtgtgcctttaggcatgttttggctggcaagaagtgatgggaaggaaatatactggtaaataagcagacagaatctttcttaaaacatagagttcctgccatcctaagatattggaatgttatgggaaactgtctccctgctcaggctttggaactgtgccactctgagtcagtgttataaaaggccaaatacagcctcctcagctctagtccagatgctaagctttgtttaatttgcctgaaggttctggttactctggtaagaaaagcggtttgaaactgacagaaatcctgcattcaggcattttctcctcctgcccaacccatgaactggcataggtggctaggaacagataactagcttctgagaaccactttggtaccattcattactccctccttttttgctgatctttatcctttcagcactgacatgtcagagtgcagagcaaaggaacttagaaatctgagtctttgatgccaattaattgggttttctaggcaagcatgaactatctgcaatgatttgctagaatttttttctcttgatttctgaaggtattcctctcctgcattactttaaagcctgataattaaaatgactttcacttaatggttaaaaaatgctaatgttaggggggaaatgctaatgggagtctcttcatactctaatctggtcttttcttgaatgattttaatcagtttttactctattcttctaatttcaatcctacttcatcttacaagactttgtaaagagctgtctttgtgcctaagaatgaatgaatacatgttacttcagtacaatttactgaccagctacgtggggacggagtggtaaaacctggttaataaataaaaacacactgtttttcttctctgctctcataccatttctctgatcttgagctttatttgaaaaagcttgagaaaacatggtttacataatgaaacatggagaatctgaagttgctgtggggcttctcttacagcatgtgatgatcttggagtgcacatgccatatcatgtcttacttggctgatgtcacgaatgccctgagccagagtaatggtcaaggcccaagtcatctctcagtggatggggaagagcgggccattgaagtagactcagactgggtggaggagttggcggtggaagaggaagattcccaggctgaggattcagtaagtactaagtaacctcgaagttaacctctcaaggtaatgactaactggcatggtaccaagcttttggctctgttttccagcctcctgtgagcttcaaaacttcctagtccttgttgctgccaggccccaattttctaggccttcagagcaaggcatggggatctaatctcttgtggaaaggactttttcataagctttttccagagtcacttgtcctgctttgtcagtctttaattccaaatggaattttagggataagttcttcatggggggtagtggaagctcccctatagagaaagcataagatgttttttcttaaccacaaacccctaagatctcactcacctgaagtaacaacagattttcagccagctagctatttccagttgtggtagatttccacgggtcatttgcgagtcaactattcaccccgccatagggcgttgaggcacatgtgtttttgtgggtgtttatatgcagggatatatttcgaattaaaaagacttattatttttgaaggatgaagattctctttgcaataaactctgcacttttacgatcacacagaaagaattcatgaaccagcattggtaagggtagttcttcctttaaggtgaagatttgctgggcaccgattgttgggacttctgagcttatttgctggttcttgttctttgtaggtaccactgtcacacctgtaaaatggtggatggcgtgggtgtctgcacagtgtgtgctaaggtgtgccacaaggatcatgagatttcctatgccaagtatggatccttcttctgtgactgtggagccaaggaagatggcagctgtttggtgagaggaccctccctgagctataaagggtggcttgttagtgacacgggattactgaagccaaactggaaaattcccatcacctccaggatacctgagtctaggaatatgttccagctcactcatcgatgatctgcacagttgtggcctaaggacttcatttagaatatcagaaccagcagattccttagagatcttgtagttcgtttttcctaagacctccccacaatttcacacgttataataaggcctgatactgtgagtgggtaaagaagttagatattaggtgaatactatgaagatcagaatttaggcttttggataacattgaaacgcttagccagtttcttctttgggtcaaattttcctcggagatctcaggcagtatttcctctgtgcttgaggcaagaacttagggactctgacattttctgtccctaggctctggtgaagagaactcctagcagtggcatgagctctaccatgaaggagtcggcatttcagagtgaacccaggatttcagagagtctagtgcgtcatgccagcacctcctcgccagctgacaaagccaaggttaccatcagtgatggaaaggttgctgacgaagagaagcccaagaagagcagcctctgccgcacagtagagggctgccgggaggaattacagaaccaggtggggctgactgatgctccctagtaagcagacagagttcagagcctgttgaattggtgtgagagtaaataatgcacatggctccccttgcaactcattttctcctttacccattttcatagtgtgaatgcaaatactatgtattgtcgtcacgagggaaggatttatgactgagcactattaggagtattatggggggtgatggaagcataaattttagttgtgtcatactgtagagtaccctttcttggccagggttccttatctgaaacacagaaaacaaaacgatttgagtgtatatattctcaattttcccatggatggtacaaaacccaaaccattctagaaacgtaagagagaagttagctcatttcatatgagggatgcctttgcgcattaggatatctatgtgggacccctggtttagaaagattgctctggagttagtaccacaaatgcatattgattggaatcaatgccaggattatgagaatgagaagatggctagaatatccaactggaagtgaagtagctggattctgaaggaagttactggcaagatgatttttacaagtattatccattgtttttcttttttttttttttcactggtgtattttttctatttttctcaggccaatttctccttcgctcctctcgtgttagacatgcttaatttccttatggatgccattcagaccaacttccagcaagcttcagccgtcgggagcagcagccgtgctcagcaagccctcagtgagctacacactgtggagaaggcagtggagatgacagaccagctgatggtgagtgtcttggggccatgatgtttggtggctgtgggaaccaacaaatttattgagatcccaaaatgtgctagatgctctgaggagtatacttagagcagttgatgcttggccatccaaaacttagaatctaagacatcatgacatgcccagaacatattatgaacagtgtgaaaatcagcatacgaggtttggcttcaaaagaagagaattggccaaggatgcacctataatcccagcactttgggatgcctgaagcaggtggattgcttgagcctgggaatttaagaccagccttggcaacatggtgaaacctcatctctaccccaaaaaacacacaaaaaatttagcttggcatggtggcacagcaactatagtcccagctactcggaaggctaatgtgggagcatcacttgagcccaggaggttgcagtgagctgagatcgtagcactgcactccagcctgggcgacggagtgagactctctctcaaaaaaaaaaaaaaaaaggagtggggctggggaatccagggtcattttggccaatgaagagaataaatctcctttttagttcatataaatatatgaatctccaagaggtggggaactccattttggggcaattagaatagttagagaatttttatttttagaaaatagaactttattgtatcttctctaaagttcatctaacttacaaaataatgtttgtcctcttttgcatatagtcctttagataactttcctttagtttttcatgtcacatgggttataaggtataagtcattattcactttaaaacctgctgctcagcactgaatatagacttctgatgtggccttcctggccttttttagcagcagagttaagtaatagaaagtaaagtggtggcgattccaaaaaggaagtgaacaaatattgcgaatgagatatatgaatagatctcataaattggctttcttttttggagatggagtcttgctctgtcacctaggctggagtgcagtggcatgatctcagcttactgcgacttccgcctcactggttccagcgattctcatgcctcactcagcctcctgagaagctgagactggaggcatgcaccatcatgcctggctaatttttgtatttttagtagagataggatttcaccatgttgcccagaatggtctcgaacaactgtgctcaagtgatttgtccacctcagcctcccaaagtgctgggattataggtgtgagccactgtgcccagccaaagttggctatttttaagggaataatagtcagttggaaatatacacatacatacccatatatattctggcattttattaaaatcagtcacagtttttgccaggtgcagtggctcatgcctgtaatccccacactttgggaggctgaggtgggcaaatcacttgaccagaggagttcgggaccatcctgggcaacatggtgaaaccctgtctctataaaaaatatacaaaaataattagccagacatggtggtgcatgcctgtggtctcagctacctgggaggctgaggcaggaggattgcctgaaccggggaattcgaggctgtagtgagctgatatcacatcactgcactcaccactgaactccaacctgggtgacagagagaaaccttgtctcaaaaaaaaaaatgagtcacggttttatttgatactcttggaattaaaagaagtcgtaaaatcagtcacacttttagagcattggtttttagatattaaagatgaagtgaaaaaatacttgggttgggggcccataaagttgctgatttttatgttgccaggttagatcaatgaaaacaaatgtcatctgtcaccacaatttgtaagagattggacattttaacatttttttaaaagaccagtactttgtatttaagtttagctttatgaaaacatttactatgttattcttaatggattgataataactttaacacatttacacagccatccacggtttggaggccgaaatcactgcttttgaatgactgaattgtgcagtgtctcaggcacatgaatagtgcgtgaatccacttgattttatttgcctcattactgcccactttctctgcttccttctttgccaggttcccaccttagggtcccaggaaggtgcctttgagaatgtgcggatgaattacagtggagaccagggccagaccatccggcagctgatcagtgctcatgtgctcaggcgggtggctatgtgtgtgctctcctctccccatgggcgccgccaacatttggctgtcagccatgagaagggcaaggtgggtcctccaattcttgtgcgcttactttaggtcatattgtcttaaatgctaagcaaaacaaattgatgaccacattcggattagccctctgtgggaaaaagtccactgcgttctaagaatgcttcagggacagatcttgttgagcttttcaaatacttgaaccctgaattgatttgattagacctagagctggtatgactaggactgttcctaattagtaaatttccactcaaaacgtattcttcaaagccctcaggaaaaagtaatgattagcagttaccgaggacggcttggctcccagtcttgccctgtttggtcactctggcgggcataagctgagagacaaaagttttcataggaacactcagtgttgcttatgtagtgctgccgtgccatcccagctctgttaagcacataagtaagtttgtattgtgttatagagctagtagaagttggaagagtgctaggtatcttaactcacacttttctgtattctggcctctccatcaccactaatgttgttttaacttttattttaagtgaaaatatggatagtccttcaaacaactctaaaatcattttaaaaacagtttcctagaaaactagaaaaggacagtggtacgtaggtattcttaaactattttgtgaactatataaagagaaattgttttcattacttacctgttctgtcctccatggaaatacattccatagcttttagccaggagtaatagagactaatactgatctaggattttctactagacttatctgtaaagaaaaaagtgtgcaacctgttatccctattgaaagagtttttgttacttgctttgacttctctgagaggaccaggagtaggaataaattagtcattgttcctttgcagatcaccgttctgcagctctctgcactcctgaagcaagcagattccagcaaaaggaagttaactctgacccgcttggcttctgccccagttccttttactgtgttgagcctcacaggaaatccctgcaaggaagactacttggcggtttgtgggctaaaggtaaaaatccggatctaggtttgattgccttgagctgtggattctagtcattttctctcccctgttctcagaactactttttcttattcgttgtggagattaaaatttaaaacctactgaaatgcaaaaggaatttttctttgaatttctcccagatctttcagatttctccaatattggaagtaatctttgtgttcatgaaacctgaatgttactagacagtctaaatactgtctgaaggcaggggatattagaggaaaaaagggaacgtcattactctgaaatgaattagcccacttttcagatcatcttttcaccattttgtttcttaaacattgtccaggactgtcatgtgctcacctttagtagctcaggctctgtttcggatcacttggttttgcaccctcagttggcaacggggaacttcatcatcaaagccgtgtggttacctggttcacagaccgagttagcaattgtcaccgcagactttgttaaggtacagttacagttctttgatgatatggtcctagaatttttctacttttaaatccagaatcactatgtgctagcttctcccaggagttaaaaaaatcagctgggtgccatgactttcacctgtagtaccagctacttggaaggctgaggtggagaattacttgaggcttagttcaagggtgcagtgagctgtgatcatgccacgccactccactccaatctgggtgatagagcaagaccctgtctctaaaaatgataacaagccatattttgtcacttttgctatgttgctgagtaggagctttctgtctttaggcaatagggaattgattctggttctaccctcactgtaccaagtgcacacctattaccatacttgtttcagaatttatttatgtatgtctgtcccctactcattccttgaaggagagtgaaaggtgttctgttcatctttataagaccagtgcctaacactccatttttttactgaatggagaatgaatgcctgttattggtcagttccggctatttggattcactaagatatttgggggatgggactgagatagatttcccttatttaatttttcttccatcctgcagatttatgacctgtgtgttgatgccttgagtccaaccttctattttctcctgccaagctcaaagataagagatgttaccttccttttcaatgaggagggaaagaacatcattgttataatgtcttcggctgggtacatctatactcagcttatggaagaggccagcagtgcccagcagggacccttctatgtcactaatgtgttggaaatcaatcatgaggacctgaaggttagagcacatgttgctatttccttctattccggatttaattatttagcaactcctctattcttttttctttgttcttttataacatttttctgtggacttcatctaactggatctttttttctttttctttgtttttccatctaactttctacctaatagcaaactctcttatcctttagggctaaattaattcaacttcaagttccatttttctcagggtctttgtaagatttacccacagggatctcatgcttagagtatgagagcacctgatcatgattgaaaataataaccagtataaaccggaagttggtagccaaggcaacatgaattactgcaaatatgtgtctttgtgccagcaggacagtaacagccaggtggcgggcggtggtgtgtccgtgtactactcccacgtgttgcagatgttgttcttcagctattgtcaaggcaaatcattcgcagccaccatcagcaggacaaccctggaggtgttgcaactcttccccatcaacatcaaaaggtgggaatgaacatttaatgttcaacttccgcaatgtccacattcaatgtgggatctccactcccactatctgctatctgttctgagttttgtgaaacttaattttctccagccaacctttttttctcccctgctaggtatctttaaaatcaaggaacatccgggtttggcaggttgggttgtctgcacggtttgtcctccactgtggagaccccaagctgtcagaggtagtttaggggtccactgttactcagaaggaaaacctatagttaatgttataaatgtgattttaatgtgagaagggaacctaaatttctcttagacactcattctgccataatgccctttaagtttttctcctggggagacttactctgttagcaaatagaacgtatcagtaatgggggcatggttggatatgggggaggaagagactttcaacaagtttgcaaataatagaggggtgtgtaaggtagtgagagtttcatttagggaggaggaagaagaggcttatggtgtcttcccttgtttcttatctgccattgatgacccattgtagcactttctctcagacctttctttgggaattacatggtttgggatgaaataaaatggataccagttcacactaactcgatgtgtttggagatcctgataggacaatgggtcattagccttaggcagctccatggccctctgcagttgatagcctctaggcacatagggccacctgttcttcggacatggaacctcacagtggagactccaaatgaggactgccctgccataagcacgcattggggtgtatgagcatgtgtgcatggcttggaataaaactaacctgtggataatctgagtccctggccaaggatattgctttggagtcacgtagccagttagaggatggtttttaggtcaagaaaagaactattaaatggtgactgacactctaactgtggccagttttgttgtctgcagttccaatggtggcagtaagacttctcctgctctttgccagtggtctgaggtgatgaaccaccctggcttggtgtgctgtgtccagcaaactacaggggtgccgctggtagttatggtgaaaccagacacttttcttatccaggagattaagactcttcctgctaaagcgaaggtcagtgccagattttcccattcattactttgctgtgaacctggtctctttttatgtttgtatattcatttcactttcccagctctttcaatggaggcccataaaagattttcagtcctttttcttctagatgccttttctttgccacccttctgtacagcccctcaactgaccatgaaaccagttgcatctctgcctctttttctgtgaggatgctgatctgtgggtgtgggaacgaagaccctcctttgtcctctcctcctagatccaagacatggttgctattaggcacacggcctgcaatgagcagcagcggacaacaatgattctgctgtgtgaggatggcagcctgcgcatttacatggccaacgtggagaacacctcctactggctgcagccatccctgcagcccagcagtgtcatcagcatcatgaagcctgttcgaaagcgcaaaacagctacaatcagtaaggctccttctcagatgacttgtgggggagtaggaatggtggtcttctagacagtgactcagaatagactgttgaaaatatctgtgaagaaatgtgactgtcctacttgcacattttgtaaagttaatttcccaaaagcagagttatgtttccaaatgtcaagcacccattggctgcctgtttcaggccagcagttctttggtgcctagtaacgagttatgtcctggaccttatttgagagattgttctctctaggtttaggagaatgacttccctgaagaactgattgaagtatagacctcttcagctggttaatttcccactgagtagtgaagagcccaccacaggtctctgagctggtggtctagcacttgactgactcaggactcttcaggaaagtgaaagcttgagtttagcagtgagcaaatccagctaagcaaagaccattacagggatcatcacattaccttaaatttgctctacagtctattttgaaagaatggtttattcatttacattcattaaagaagtagctcctattgtttattttaaataacccagttacaggagagcctattgttattagctgtacacccaataccaatgccagatttcttggtattgctaggacatgtcatagttagggataacaaccattggagagctaaccacatgtaggcatcatgccgatgcaaatgttataatccagagtttgcttagattagagtgtgagtgtgggctctgtctgggaggagtctttaccagtggtgttggggcagaggtgggagagactcttgacgatctggtaccgttctctgcagcaacccgcacgtctagccaggtgactttccccattgacttttttgaacacaaccagcagctgacagatgtggagtttggtggtaacgacctcctacaggtctataatgcacaacagataaaacaccggctgaattccactggcatgtatgtggccaacaccaaggtaagaatggcactgggctgggatcaatccctgggtagaaggactcaaacaatatggtttgagaacacatctccttttagaaagcaagtatagagtatatactcacagtcacaaccctcggttctagttaaatggttccttagaaaaatggatattcttactcacttggcaaaggacttgtacaggttgggtttccaccaataccagcaggattactgtgtagaggacatcaaagaggtggttaatactggggagaaggaagcctgacattgaagagaatctgctctcttttcctattttcccatttttagaaacaaggaagtcattaccagggagttaaaaggataagttttaatgagcttcacatgttgagacaatgtcagagaagaaggagtcctagttaaaacttaagaacttctgtagtttcttgatgtgtgccttgtctccctacagcccggaggcttcaccattgagattagtaacaacaatagcactatggtgatgacaggcatgcggatccagattgggactcaagcaatagaacgggccccgtcatatatcgagatcttcggcagaactatgcagctcaacctgagtcgctcacgctggtttgacttccccttcaccagagaagaagccctgcaggctgataagaagctgaacctcttcagtgagtcaccaacccctggtgcagactctgtcctcattgtgactgcgaaattgggagccactggcctgtggctgtccaacattctgggatctctccactctgctgatttttctgtcctttcatcaggaaactttgagcttcatttgatgtattaaagaggcaaggtgacaggaaaggagtacaccggagcatggtagcagtaaagatagggctgcactgtgttgagtattcatttcaatagtgttgtgtccacctcactaatggggctacttctgtgtttaggccgagaggaggcagattgacatgaaattgcaaggctttcttaacgcacagaggaagacctcaggtcacacatggctgagagatggttggcaatggcttgctatgccactgaaaactaaactctcagaatacaaatccttgagccttactcaagactgcatttctctgtcatttattggccactgtctgatattctttcttctagatatagttgctgttagtgtgaatgatcatgatctgtactttgaacaaagaaagtgtgtagagacccctgggagtgaggggtaggggatacaatactctgaagcagaagaggacccttgcagtgatggttagggactcttctgagtaggagacgtaatcggcttttggtccatggaacttttaccacatgtattcagcatatatacacgattaaagtgctgcaaatatctcagaagataaagtttctctatgtctataaaattgacgtgatttacttctttgctccaactgttctggtctttgctttggaggggtggctttttagagaatgtgcttcctaaaggcctctcttgcttattgcagttggggcctcggtggatccagcaggtgtcaccatgatagatgctgtaaaaatttatggcaagactaaggagcagtttggctggcctgatgagcccccagaagaattcccttctgcctctgtcagcaacatctgcccttcaaatctgaaccagagcaacggcactggagatagcgactcagctgcccccactacgaccagtggaactgtcctggagaggtaccagtgctggcaggggttggcttcagtttttacatattccactcactgcagaaccttcctgtgtcttgagagagccagcttctaataaccatctcaaggctagcctggaatttttttaagttttcatacaactcgcccacattcagtgtctctttagcgtgcaaagcctgaaaaatgtgctcagagtcatctgacaccagagtctctccctggacagaagttctgtcccttctcttaataatgctcaggtaccctttagagtagccagaggccacaggctagacgatgctcaagccagtattctagattaggatccaggcttgctgaaatgataggaaaacatcctcccttccattctgagctcatcatcttttcatcatctttctctgcgtagctacttctgtgataataacattgccagcaagagaggctgtctgctgcctcttgtagcagagtctagagtttccttaagtctccctacagtggcatattcttaagcattgtgcttggcttctttgtgctaggtagctgctggtttgccatggtagatgaaatattataattcatgatgtaagattttgagtttcttacattgtaagtcacaagaatagccttgcttggaatcactgcctcccaccaccagcctcctccctcccttcctttctctttctttttccccgatgccctatccatacatggtttgcttaggatgtgtttccgggtttctctgagcttcacatttttttccttttttttttttctttgcttctcccccaagttctgaaactgagtccctaaccaagctggaccggttagtatgccctctttcttttctctgcacgagtgagtgtgtgtcagagagccgtgtaaccaatggtgtggctttgcattgattctgcttctgttgaagagtcttcctgcttctttctgttctggtcattgcatggctacagagctgtccatgtgtaaaaatggagtatatggaagatcgtaagtgcactcttggtgttggccatgtcggacactctctcaactctctcttccttaccctagtcctctctgctccctttctaagtggatgaaaagggggtttggggtagagggattaacagcaaagtcctaccatctgataacccactagagagctcgttctatccaaatttgttttatgcctcagtttcctcttccctagttctttattgccttcctctaccccttaacccctttctttccagttaccttctgaatacttttctttctctgtccagagcttcagctgtcaggatgttgttctttttactatgccacattaaattgaaaggagtaaaccctggggagcatgttacttggtacctttaatagtaatagttgggtttcctattcctttcctaaggggaaaagttttctaaagatgctttgtatttaccccttgaatgttggcaattggcatgcacctaaaaaatagtttgttctctcccccatacttgggactcctaggaaatgcctttgtgcatatatagctttaaactttccaatataagaggatggtttttacctttccctttgtgtgtccttttgcccactgatctctgggcagctgagctttgggtcccattgcatcaagactgttaagcccatctcagtgatccctgccacaggcagcagaaggaagcacatttatcctctttgaggaagaaaagccctgtctttgagttacggattacgaacatggcctcaggttgatctctgagcaggagccaggtttctcctggcctgtaacgtaggaaacgatatgcatggtgcctgtggcaggtcttattgtgctttgattttgtatttggcattcattagctgtccccaaggtcctcatgactatagtttgcttaggctaaagcgcaaggcggagagaacggtgttgtactcaagccaggttttctgtctccccaggctggttgtgagttctttagaagccctggaaagctgctttgccgttggcccaatcatcgagaaggcaagtcactttttcaaagcacatggaagctttctgaagaggcaggaagtcagtggagttgcccgaggccctgaggcctcgaagctaaagaacatttatagtagcataatcttgatttgctaagaagctccagagaagtcttcagcttaaggcctatgtcctacttttcgggcccatagtgagcgtgtgtcacagaataggatgcgtgttggtacaagaacactgttctgggaatcatgagcttggattccatgtcttcctctggtaagaaggaggattataatttctgaaacttttttttttttctctttgcagtccatggagcataacctagccctggtggcctagaaggaaggaagggcaggcagagtgtagatagttcattctgccttgagttggtggggttagtgataaccctgctgtcttttgccttaggagagaaacaagaatgctgctcaggagctggccactttgctgttgtccctgccagcacctgccagtgtccagcagcagtccaagagccttctggccagcctgcacaccagccgctcggcctaccacagccacaaggtaactgttctctcagggaaaggaaattgcagtgctgacagggaatcaaataagttagcttttcattgtaaagcaacagcacagcaaagtaaggtagagggaggatagcattcagattagacctacattttacagagtttctcctgagaaattctcaagtgccactcaaaaccgagggtaagccagtgactgggcccctggtttgtacttatttttctgtcactctaacaggatcaacaagacttaagaaagagaaggagggatattgagcgtgggtagccttctcgctggaaaagggtgaggtgagggagtccctcaggaaatagactgctagtgttttcgctccctcaggtgtggcacagcacgagaagtgtactgtacttgttggtgagacaagtgttgaatagttcttggagtgcctctgatgggaacatctggggaaagagggtatcacttataaaagaaaggcattgccaaaggagacaaactgggccaatttctgtagatggaaaagatgagagttcagacccctgaggaggaaggctctgagaggagccatcaacccagagctttggttagcttctgtgcctccaacccggagaactgagaaatgtgagtttaacctgctgtctctcaaggaaagacaattttggaaacactgtccttgggtaatatgaatttgctaagaaatgactcttctattgtaagagaaagaaatctagcagttctggagaactgagtagatttgaattttcccatcatactttgatactgcagggtttttattttttaatgacattaatattttatgtattaagaaacttaactatatgaggctgctttgaagatctgttgtaggtgattggtgttcattggcctgttctcttgagaggaggtaataatcctggtgatctgccagcttttctctcctctttgcttttgtacccagctcttgcttatggctgaccctctgtgctcctgttgttttacaggatcaggccttgctgagcaaagctgtgcagtgtctcaacacatctagcaaagagggcaaggatttggaccctgaggtgttccagaggctagtgatcacagctcgctccattgccatcatgcgccccaacaaccttgtccactttacggagtcaaagctgccccagatggaaacaggtgaacttggcctctgtggccgtggtcctgagatctgcttcatatgcctatttaccctctcattcttactgttcttactggcctctgactgactgcatgctcagagacagggattttgcttcctggtctttataccttgtagggccttttgacattgagattgtacaattttaaacacattctttttccagtgcttatactttcgattatccttgagtttatttagtgttctagacatcagatataatctgtctctgaagttattacctcttaggagcttcaggggaaagctaagcttggttgggccctggttgctttaaagcaactatggcatatctttcgctttcatgccattcttttgccagtgctattattaataatgtgtagcaactttctcagtgctcagtgctgtttcctcatctcctcttctgttggctgggtagcaaacctgttttgtcattgtcaaattgagttgattgctgcctttacaattctgtgttatttacatgctcccatatgcatcatcattctgttcctccttttaatactacaatcccagaattgttctagagagatctctagaatgttcagatgttcctctacgttttagaagttgaacagttggaactgagatctttgaatctgcggtaaacatcctaaatgctccccgttctacttaattctaacatacaatgttttctgcgatattcctttcccagactgtttttttcctagatgtgcctgctggagtctagggatagttggcatattgattggggccccacttgaaactccctccccaggcaagcttccttgacctgagttaaccttaaaacaaattaaattccatctcagatttaccatcgttgataattttctttctcctgcttagaaggaatggatgaagggaaggaaccgcagaagcagttggaaggagattgctgtagtttcatcacccagcttgtgaaccacttctggaaactccatgcatccaaacccaagaatgccttcttggcacctgcctgccttccaggtatgttaaaagggatatttgaatcttggtaatgaagcctgatgtaagttctgtctttgaacagctatgaccgttagccattagctttcattcttcataatccatttcttccagaactcataattgggaagtagaagtctgcgagataaatgcaatgttcctgagacaggaatttagcagtgtggcagagtgggattttcttctaccatatcttttcatcggggttgaatattttacataaagaggcactgtgtgtgtgtgtgtgtgtgtgtgtgtgtgtgtgtctcagtggtttataattgtttttaaaaatctttgacaacttggcttaaagccagctcaaaaggcacaagtatcttgaggattattctatttctaagctatttggtctctaacttcttacactattgaaaattcagatggaagagtaaagggtctgaatagcaatatagaaaagtaggatgatcctggtgctcattcatgtttggaggacatttgggtggtaaacctaaaaggcaagtcaaggtcatgttttgtcatcacctgaggttgggggatattagggaacatttagtatctgccttcctcttcatatttccttgccttgtcttttgatatccagagagagtggacagctacttatttctgtgactcaagatatctggaaagacttttgaggacaatttgggagtttaggaaactgttaatgaaacaaatcataaataatacaggctactgtgtgtgaatgagtgtgtatgtgagtgtttgtcattttgtttgcatgaccttttacatggagataaaaggttacacttttgtctcagactctcaagtagttagagttttttcctccagattttcaaataatgtttgtctctcctttaggactaactcatattgaagctactgtcaatgctctggtggacatcatccatggctactgtacctgtgagctggattgtattaacacagcatccaagatctacatgcagatgctcttgtgtcctgtacgtagcattacaatcccagagagctcgcagcagccagggaatatctggaaaattgtttttagcttgctaagctaatgaaataaaatatatttagaggaagctgaagggaatgaagtttcaaatatcaataaaagctttaagatcttactccatggaagagaaagatttggaaaggggatgggctcagtctttcttattcagtgctgaatcaccagggacagcctactgcttgctacatagtaagtgctaggtaactcggtgaattgtgacttaaatgagcacatgaatgaaagtagtacatcaagatttctatttccagtgaccctttcacagaagctaagtgttaaaactactgattttagcacagagctaagacgtgcgctgggggcttgatcatctgataaaaagccagaaccatttgtaaggggccaaaatggcctcaggagcaaatgacctgccagtccatccccaggaactgagagacaggaggttagcgaatggctcttaatgtgtgccagaacaggaagcggggattaacttaacctgctgaacttggtccgctgggttgcaggtgagagtagagaggtattccacttgcatgtgagtgagtgaccaagaaaggaaagtgttttatagagagtttcatgaataatatgagagcaaagcgtgacagtttccttttaaacctcaggatcctgctgtgagcttctcttgtaaacaagctctaattcgagtcctaaggcccaggaacaaacggagacatgtgactttaccctcttcccctcgaagcaacactccaatgggtaatatgaggtctgggtttaggctcaagcctgtatttgggaggaggggagagagggaggtacagtagcattgggcatgctgctcatgttgaccaaggtcctggagactttatgtatctgtcttttttctaatcctacctcaccccataaagaatttaggtggcacatcaaaatgtatatagtaagtaggataaaaataaagattaaaggccatgggaaaataaaagtaccatagtaaaatcaaaatacagaaaattcacatcacaaaggtcctgcatggttggtaagcgagggtcttatatttggctgaaagcttcctaagagccatagcaaaaataaaatcacagtgaccaaagacaaaacagaaacataacttttcttgggatagaagctcttcattaaatgtccattttgttgccaaaggggcagaatccttagtggacttacctacaataagttggatagcaaatttcacaggaatttccctcacaatacacagtacacaatacacaatacacaatacagtcaagggcataacattttacgattcagtaaaagcaattctaaaaggtgtctgaataacagaattatataattctggttacttggcttgatttagaagtaaatttcaaatgaaagtcactatgtacttttaaattttctttctttctttctttctttctttctttctttctttctttctttctttctttctttcttccttccttccttccttccttcctgccttccttccttccttcctttctttccttccttccttccttcctttctttcttttttcttccttccttcctttcctttcccttccttctttcttttcttttctttttttcttttctctttctttctttctctctctctctcgtcttttttcagagtctcactgtgtcaccaaggctagagtgcaatggtgccatctcagctcactgcaatctctgcctccctagtagctgggattataggcgcgtgccaccgtgcccagctaatttttgtatttttagtagagacagggtttcaccatgttggccaagctggtctcgaactcctgacctcaaatgatccgcccgcctcggcctcccaaagtgctaggattataggcgcgagccactgctcggcctgtacttttaaattttctaatagcaatattataaagagtaaaaagtaaaattgatttactaattatttaatccagtatatcaaatattatatctacatcttgtcaatataaaaaatttattagtgaaatattttgcctgttttggtaccattttgggaatccagaatgtattttacactagtggcacatctccttttagacagccatgttttaagtgctcagtagtcacatgtggctggtggacagtgcacatctagaggattgtacacaactttgtgactttcagaaaatcttccttgcatatcatttatcttgcctaagcttttgggttaggcagcagtttgtggctcttttccctagcaagaacctagagtggagatagtttatgtttctaacggacatatttacaagctttagcaatccatcgagtggaaggtgaggtctctatcctcttctgacaattaggagtctcacctggacatcttccttattagaaggccttctcaccttcacacaaaagtgggcacaggcaggacctgcagtggtgtccttggtttccagtcaatggttttacacttcaattctggttcttctcatagtaattacgtagtgtgaaaatctcactgacctagttgttttagaaaaaaatagtgaaataaattctaatctgccatgacagacaaaaggtaaagatcccaatcatatgatttttcctgtcttatccaaggtctcctgagagttagcgtgagtttgggaggcctactggttttagatctctcacctttatggaaatccctttggaatccaagtttgtttccttcaccagctggaacattttatttttgtggggggcaagctgtcgcagccaactccatcttcccagatgctgtaggtccaagaagtaagagaacaaggccaggcatagcaccccggagttctcccgctaaagcccagggtgctagctggtagcttgtcttgggtttttgttgccacctgacttatggcaccatgtgccaagggaggaaagcaagcaccttcaggtgactggggtttctttgactcaggagacaaggatgatgatgacgatgatgatgcagatgagaaaatgcagtcatcagggatcccgaatggtggtcacatccgtcaggaaagccaggaacagagtgaggtggaccatggagattttgagatggtggtgagtctctggcagcaggagaaggggaggaggagcttcacaactctcctctagctcttattcagtggacttccaaaagttaccacttaccatgggacactgacagagctttctctctgcagtctgagtcgatggtcctggagacagctgaaaatgtcaacaatggcaacccctctcccctggaggccctgctggcaggcgcagagggcttcccccccatgctggacatcccacctgatgcagatgacgagaccatggttgaactagccattgccctgagcctgcagcaggaccaacaaggtagaaggccatgccaagaacaaagcggcccattggccttgcacaggaaaagagggtttggcagttactgatatccagctgacttagtttgtccccagatatggggagaggttgatctgggtgagagctgttcagagatacaggtggagagtgagagggatgtggtgggaatttcagtctgagtgccaatctcatagtttctgccagtttgggttatttcctcttgaatcttagattcctccagcctgtgtcctgcctgagctgaaggaagcattccaccatctctgtaactgaacttggtgggtggacagcagtggctgctagctaacttcctctaggccagagggggtcacatgctggtgtttggagactcttgagggcagcaggtggccaaagcagcgctgtggatgggacctggaggggatgttgtgctcactctccacttgtttcccaggcagcagcagcagtgccctgggcctgcagagcctgggactgtccggccaggcacccagctcttcctctctggacgcaggaaccctctctgacaccacagcatcaggtaactgtccacagcaaggagcacggctcagggccccaggaccctcaggccttgtttccactgctgtgagagtgtaatgggcagctgctttgacaggccattctggacttcctgcttctgccttggctttagaaagatgggtgtggagggtgtagtgctgtggctcggccccgccgcgcacagctccgcttcctcacactttgcatgctgcctggcttcagctacttccccacggaaaagccgagagagcggcatgcaggctgatcagctacagggcttccacttcagcttccagcgttctttgtcagagttctaacattttagacagtattaaaagagagacaagaaatagaactcataccttttaccttttttatcttcatttgcaaataaaaggagagctataagaagctagattatacttcagaattcttgttcagtgtgaccaaccatcaggatctgtgagcttgagagagagggtttttatggacaattaaaatctatagcaaatctccagaactcatcttctctttattttcaatcttttccctaatctgattaaaaaaaaaaaaatgtttcctgaatagagagttggaccaaatggagatacctggtcaacccctgagtaatttaagggttgatttatagttttttagactgatgcttccttgtgtttgttttttttcttttcttttggaagttttagcctgggtagttaagaaagggagagagcggctggccccacctgctgccatggcttgttgcttttcttaggtctctttagttgctgtcatttcaggctctgaggttgctgttgtgttgtgccagtcgtgttcccgctgtgctctgtggctgtcttggctttcctcccccatgtatctcatccagcattttcctcctgtctcagctcagccctgatcctggatgctgtggctgtctctggggaatttccttgcttcattattagcatctgatgaggatgattaggaggtgtgaaatttcccaatgagctcccctctggaccacttgctaaaaaaaccaaaacagggttgattcaagagctcatgctaagtgatttcctaacataagcaaaacttgactgatttcaaaacaagtctcattaaaattcagagttctatgctttgaatggtaatggctagtttcagatctctcagcaggtgtcagtaacacctaaacaatggtgaccatgaagcattttagctagaaaactcagcgtccatgtcacagattcttactgaatctctgcactgttctacttgcactgtaatgtaaaacagtgaaggaaatacccagtgaactgggttttcttcactcctgtctaagtactgtttgcaatgcaccgtgtatagtgtttgttcctgttagtgattaaccagcaaagcaaatctctcccttttttctttgacgacaggatatataaactgcattgtgtcctatgcactatgtggtttgatgctttcatcccaaggaggggttttttttgttttttgtttgtttgtttgtttgtttgttttttaacctgtaacagctctcgttactctctcagctccagcctcagacgacgagggcagtacagcagcgacagatggttctacccttcggacctctcctgctgaccacggtggtagtgtgggctcggagagcgggggcagtgcagtggactcagtggctggcgagcacagtggtaatgtgccatggcgggggtcctgtctccttgggcagagggtggggacaaaacaggaatctctgcttgggtcttggggttggtttttgcaaagaaaaggtatagagactcattgaaagtcttgtggactctctgaaagtcttgtggaattcatttggcctcagttttcgagtttcaaatgtttagtggcttaagctcagggggttagtattgaaatattttacagatatttactaattatctgttagtggaaaaaaagcaatgacatgcgtaagtcttttttttcctctctgaaactgcgataatatgcataattataagtcatgattagcctaaaacagttattatgtgaccttgaaacccattatcctatggtttctcctcatttatttggggaagggtttttttttaagcgatcttattgttaatgatctgatgtgttaacatagcagaccatccccacagtctactagctgatgaggtggggctctagaatgagggaacatgacaaagccattttggtttgaccttccatatcagtctgtggttagcaactggatacaatttttacagaggagatgaagagcagctgataatttctagattcccctatcagtgtatgtttcctctgaagtatgagatagaaatgtattagcatctgagattaagatcattcatataggtgggtcttacatactggggaagggtgaatggctactgtgagagtgatttaacatagtgctgtggggtcttacttagctttacatataagacaaaaatgctaccagttattgtctaatgctgtcagttactgtcttaactattgctgctgctttagaatgcactgggttccttcatgctttgggagttgatttgtgctttttaaaccatttccctctagtatctggccggagcagtgcttatggcgatgctacagctgaggggcatccggctggaccaggaagtgtcagctcaagcactggagccatcagcaccaccactgggcaccaggagggagatggctccgagggagaaggagaaggagaaactgaaggagatgtccacactagcaacaggtcaagacctagtccttcacagttaagaggcttgcctatctgagactatttcaggaatagtaggactgatcaattgcaggaggtagagtagtgataacagcatatttcttttgaaatataaaggtgtaaacttctgaaacagtttaaagtcttaggaagtgctctaggtctgtctttgtcttcgaattatattaattacggagagaatagaaagtggtatttctcttaaggctcctctaaatatcttagtaactgtaaagtgattgtcataaaaacatgtcttccttactcaaatctttccagtttcatcaatatctgtacactcaatatatggcatcctctttacaaatggcaccgctggaggctcaacatttaggtatacgtattaggtgtcctagaagcgctccttgttcagcatgtttgtaaggtaaaggagaaataagacatagcaaatatatgcatatggctagaaataccagtggtggagcattttgaaattgaaagtggtctataaaatcctaatccatttttgtgttggggtttagtactagatggtgaagtgaatgtattcttaacccagagataactagagaaatagaagaaaaacctgaaaataagactcatgatacaatgtttgttgaatttgttgaggtcagcagttgttacattagtgtaaaaatagtaagtcagaattttttttttttttttcgagactgtctccctctgtcaccctggctggagtgcagtggtgtgaacagtgctcactgcagcctcaacctcccaggctcaggtgattctcctacctcagcctcccgagttgctgggactacaggtgtgcggtaccacgcccggccaatttttgtattttttgtagagatggagttttgccctgttgcccaggcctgatctggaactcctgagctcaagtgatccactcacctccacctccccaagtgctgggattacaggtgtgagccactgtacctggcccagaattttgaactatatgatttctatcaggtaaaaaaaatggtgcctgatgcagtcaggcatcagagacatttaaagggggcatcaaagagtgccttccacgttccccgaatcctactgcttgaacgtaagccgcttaacatctctggatgaatttctctggttctgttaatagatgatattttgatagagttttaaaaaaatcttctaacatttttcttaatgtgatttctaggttaattcccttatgttcagttaatttggtctctatgattttttaaaaaatttactttaaacatttaaaatccagcctgcttttgtcttctatttgatatagttgagttcatttataattaatgttgattgctaacagatttggaatggatgtatgttattactttgtgcttcttatttgttctatgtgtgtccttttctttgtggccttcttttgagttgacttgctagttttttcttcctgtttctttccttttttcctccaactctgcaagtttggaagttgtttactctgtttttaatctttcagtggttatactatgcattttaacatgcatacttaccttatccaaaatgaaatttaactaatagctgtaccttcttcctgaataatatgaggatcttagaagactttactcctttgtgtgttttaacttttttaatgtcttcttaaagcctttaggattttatagtttataaggtcagtgtttgttaaagttttactcatatgtttaccattttctgtgcctaacatttctttatgcctctgagacctcccatccaggattatttttttcctaaacgatatcatttagattttcctttagggaggttttctgatttacactatctcagattttgttggtctggaaatacctttattgaacttacatttggggatgtatttttgatgggtataaaattttgtgttggcagcacccccgacctccccagttgaaaatggtattctgttatttcctcgcttttgttatttccaatgagaaatcacctcctattttaactgttgcttctttgaaagtaatgtctttactgctgcttttaagatcttcatttgtcattatttttgcagttttaccaggatatgtgatttatttctttacatttattttgcttagtagtctttgggactcttggatgtgtgggctagtgtcttttattttggaaaaatctcatctattaatcttatcagatattctttttgtcttattttctgttatttcacttattttctgggatttcagttaaatagatgtgagaccatcatattctcttcttcatgtctcttagaatctctttttcttttgtgtttcttgtgcttaattatttataaatttcttgatctatttgagtagcattaaaaaacatcaaataggaataaatttgaaagatatgtaagacttctactctgaacactgtacaatctaagagaaattaaagacctaaataagtgaagaactacatcatgtttatggattgaaagactcattgtgaagataattgtcttcaaattgatatagagccatataatcctagtcataaattttggctggagttatgtgttaaaattgacaagttgatactaacatttatgtcgattagccaaggcagtattgaagaaaattcataaatttagaggactttatagaattatagcttattataaagctatggtaattaagacagtgtgataatggtatgaagatagacaaatagattagtggaatgggctggagttcagaaacagcttctcacatacctgatcatctgatttataacaaaggtgacacttaggtacaatggaggaaaggagggttttttcaataaataataatgggtcagctggaaacgcacatagaataaaatgaatcttgacttgatcttatatgcaaaaatcagttgaattatagatgtaaatacaaagagtaacattttattgcctttaaaagacaaaatgtcttcataacttgggtttggcaaagatttattgaataggacacaaaagcattaaaaggaaaaaaaaacctataaactggactatattctcagcagctattcattttctcctcccctcttctcagtattaagatttcagttaggtagttttccttataggctcctaggctagagtggggtcgggggtgcaggtgcagggaagagtgtgaagggaagtcatgtattacagtttacttttaaaatgagggtatagccttctgtggttcttctgtgaggttctctttgaagaccttccccactgtccacagaggaggtctaaagaaaaaaaaaaaaatgaagaccttccccacttgaggaagatcctttgcttttatttctattccaaatgccctgtgaggtcctggcagccagaaggtcaagttgccttcagaacatcttggccttaacttttcaaatttcagatttcctaaactttgtctctgagttctgcttacatctttggccagtaactttttaattgctagtgagctcattattacttttattttgactatgtatctgataatctttcttagtttacttattcttgttgtttcttgttttgttttcttttaagacagtctcacctgcccaggctggtatgcacaatcatagctaactgcaaccttgaatgcctaggctcaaggactcctcttgcctcagccttctgagtagctaggcacatgccaccatgcccagctatttttatttatttttatttatttatttatttttgagacagagtctcactctgttgcccaggctggtgtgcagtggcacaatcatagctgattgcaacttcaaatgcctaggctcaaggaatcctcctgcctgagtagctaggtgcttgccaccatgcccagctgtttttaaattttttttttttttttttttttttttttagagacagagtctcactctcttgcccaggctggagtgcagtggtacaatctcagctcactgcaatctccagttcccaggttcaagcaattctcaagcctcagcctcctgagtagctgggattacaggcatgtgccaccacacctggcacccagctaattattgtatttttagtagagacagagttttgtcatgttgacgaggctggtcttgaacccccaacctcaggtgatccacccaccttggcctcccaaagtgctgggataacaggtgtgagccaccgtacccagcctagtttttttttttgttgagacagcatctcactattgcccaagctggttttgaactcctggcctcaagtgatcctcctgcctcagcctcccagtgttgggattacatgtgtgagccactgcacccagctcatttatttattctaatgatagattctagtggattttctgtatccacaatcttatcacctgcaaataacagtgtaacttttttcgttccaatctttatactttttaattttcttttcttgccttattgcgttggctaagacctcttgtacaatgttgaaagaagtgatgatgatgaacattatctcattcccaaactcagggtgtaaaggttcaatactttctcattaagtatgatgttagcacaagggttttttatggatatttatcagattaaggagattttgttcctagtttgctgggagatttttatcttaaatgggtttttcaagatttccagtttcttgtgtttcatgtattgaatcacttatatggtttttcttctttattttgtttaaggttatagattacgttaattgatttttctattattaagcctatttagtcatgatgtattttcctttatatcatgtgacctgatttgctaatttttagtttaggcttaaaatttttctttgagatgtctttgtcagggattggtattcacattattctggcgtcataaaataagtcagggcatgatccccttttctcttgctctagaagagtttgtataagattagtattatttcttccataaattcttagagaagttcaccagtcagtgaagtaatctgagtctggactttatttaagggaagatttaaaattaggtgtattctttaaatgctagagaattatttttatttattttggtttcaattttggtatatcgtattttacaaggaatttgttgattttattaaagttgtcagttttactggcgtgagcctgttcatatatttttctctcatctttttaatgtcttgacaatctgtagtgatttgctttttttcatttctgacaatagtaacttattctttgtcagtcttgctctaggggttatcaactttatttgaaagaattggcttttggttctggtttttttctgttgtatgtctgctttctattcctgctttttattatttcctttcttttacttacttttttttttttttttttttaccattttttactttttttttgttgttattgttctattgttcctgttctatttctggctcatgagatacaaacctaaatcatttaatcatatgtattttaaacctactttaaaaatacatattcagccaggtccagtggctcacacctgtaatcccatcactttgggaggccgaggcaggctgatcacttgaggccaggagttcaaaaccagcctgctcaacatagcaaaaccctgtctctactaaaaatataaaaattagccttgtgtggtggcgtgcacctgtaatcccagctacttgggaggctgagataggagaatcacttgaatgtgggaggtggaggttgctatgagccgagatcacgccactgcactccagcctgggtgacagagtgagactctgtctcaaaaaaacaaacaaacaaaaaaccatatttgaagcaatatatttttctctaaaattccatcttaatcttgctttggctgcagctcacatattttgataatgttgtgttttgataatgctgtattttcattgctattcaattcaaattattttctaaattctgttgtaatttagtctttggcccatgggatatttaaaagtatgttactaaatttctaaacatttgggaattttctagttatctttttgttattggtttatattttaattttaccatggttgggaacatactgggtgtttgtagatttttttgtttgtttgttttttcagacgtagtttcactcttgttgcccaggctggagtgcattggcatgatcttggctcactacaacctctgccgcccgggttcaagcgattctcctgcctcagcctcccaaatagctaggattacaggcatgcgtgaccacgcccggctaattttgtatttttagtagagatggggtttctccatgttggtcaggctggtcttgaacttttgacctcagatgatctgcccaccttggcctcccaaagtgctaggattacaggcatgagccaccacgcccagtgtattttagattttttttgaaatctcttgagactcatcactgcttctaaaatggtgttatatcttaggattttcatttgtttttaggagtagggtgaatttaggtaacctagccatattgacaatggaattctctatagtggttttaaattaaccttttttcatgaataagttaattaaataattggttaatgaattatttttaaaaattttggttttattttcagtttttgcttggttgaaacatgaattattttaaataaaacagaattttactttaagtcactaaagaaaaggaaactgcagtttttggtgctgtgtttattttttttttttttttttttttttttaagtttcaagagtactgtgtaagagtttgaaaataggttgggtatgatgacttaaacctgtaatcccagcactttgggaggctgaagtgggaggatcttttgagcctaggagtttgagatcagcctgggcaacatagggagaccctgtctctacaaaaaataaaaaaattagcctggcatgatggcatgcgccagtggtaccagctactcaggaggctgaggtgggaggatctcttgagcccaggaagtcaagactgcacggagctgtgattgtgccactgcactccagcctgggcaacagagtgtcccaggctcaaaaaaaaaataacaaaatgaatgaatgaatgatgtttgaaaatactctgctgtgatcttggtccaagtctagactctgctcattttgttgacttttttcttcatgtgtgtgtattcacttgtatgttctccaaatctgaagatattaatccatctcaaaacaaagccgtcttatgttttatgttcaaactattgaactgctgctgtcatctcacctttcctcacttgtaccttgttcatctttgagcaattcttaaacgtttgtagtccccacctagcttggctaattattaacagacacatgcgtggtattctgaagaacagttagctcattcctttgagttctttttagaatgacaataatttataattcacgtaagaccccgtactttctttcattcgttctatttttagagacagggacttgctctgttgttcaggctggagtgcagtggcatgatcatggctcactgtaaccttgaactcctgggatcaagtgatcttcctgaggcaggactacaggcacatggcaccacgtctggctaatttttaaattttttgtagagatgaggtcttgctatgtttccctggctggtcttgaactcctgcctcagcctccaagtgttgaaagacgtgagctaccacacccaaccctagaccctgtactttcatccagacttgtattactttgaaaatattctgggctggggacagtagctcacttcagctctgttgcccaggctagtttgcagtggtatgatcatagctcactgcatctttgaattcctgggctcaaccaatcctcccttcttagtctcctgaattgctgggatgataggcacaccaccatgtccagctattttctttaaaacaatttttttggtccttttttgtatttaaaaacattttgtttttaagaaaagaaaaagacaatattctggatacctgctaagatatgtaacacatgccaatcacacattaaaaaaaataggtatatggtttcttacaaataatctgaagataaaaatgagacaaggaccatttgctaattatgaaagtgaatccattgatttattcagcaactagattcttaatctgtatgagattgtgtattaggtgagactagcaaccaaattgtcagtaggactttaattaattttcatcatcctcttgaatcagcatattagctagagatccaggggcacatacttagtacagaaggtcagctgtatatctgcagatgaaggctaggtaatggccagttgattatacgggaaaactcatgggtccagtaggacagtgtggcattgaaacagaacattatattaggaagatggtggacaaggtgtgagagagtagagcagtgactggactttataagaatttgggaaacgtgagaaagaaagggctgggtcactgtgcagctgggtgatatagaatttgtatatagcagaattctagaaaataatgtctggaggcagaatagggccacatattagaaaaaagccataaatcttgcagttggaggtttggttttgaaactgagaactactagggcctggaggcttgggaaatactttgaacttccctgtagtaggatttaattcagtgccatcagttgtattttagaatagtttcactttcttttaacagagtgggatctctccttctgtgttgctgactggcataccgattaggcagttcttaacttttttttttaatgctggagattgttcctaagcattaggcttcttgttgaccttggtagcagggtggggttggggagggaactgtattcagctgtgtcctgttggagtacagctcatattttctatcttttccccacccttttaggctgcacatggtccgtctaatgctgttggagagattactgcagaccctgcctcaattacgaaacgttggcggtgtccgggccatcccatacatgcaggtatctcttagctcacctggatctctgtcaggtcatgattggaccgtccttaagcatgcccacatctctcttccagaggacctggaagccttcgtttggtgttaggccacagaataatgaaatctaatttttgagctacaaattatagctcttcattttataaatgagaaagctaagggtcagagaattttttaaatgcacaagttcatccaggtagttattgacagagccagtgcaaaagcccacttctgagattctgagtctctagtctttatgttgatattagagtgtgggccaatagctgttcttccactcactagctgtcttcctcagaggcaaaactgttctttaattcttagtttggtgtaccaccctttctcaagctacttgcttggatataatataggttagtccattaattttacaaactttttacaaaacatttttttgtaatgtcaagtgtggcatatatcagaatttgacttttctgactctgaacactgaagctttggatacctggaatttagaacgctataatggattacagttatgattgatagggatgtcaggaagattaggatttcttctgaaacaccccgtatttcaagtcgttcttctttaggaaattgggttttgtgttttctgtctttgacttctaggtcattctaatgctcactacagatctggatggagaagatgagaaagacaagggggccctagacaacctgctctcccagcttattgctgagttgggtatggataaaaaggtaaaatctgagaggcagactgtgtgagaaacaggattggctgagatcctttctcaggttcccattcgtttcatagaggaacttcacctcgtttcaaggggtaaccatccactgagggctgcattctgttgagtcaacaaaagcgtattcagggcctgctttggcccgagcatagttttggaccctgagcatagttgagggcaaagatgaagttcttaccctcatggcccttttgtgctcagtgaggtgagaacattaaattagttgttcgtatcttaatatggcctcttaagtgtatcgggctctaggtaccccaagtatagtccatggatatactgggggttgttttgtgtctgattcaatctgaggaacattttagggctgatgggcttgacttgaagggatcttgttcagaggatgcctcaagcatcgagtaagtagaggtttctggacttacgctttggcctgcaggatgtctccaagaagaatgagcgcagcgccctgaatgaagtccatctggtagtaatgagactcctgagtgtcttcatgtcccgcaccaaatctggatccaagtcttccatatgtgaggtatttttgctttgggttcatgggtttggggaaaggtaagcggattgtctgggtagtgctagggccagcacagaggtggtagtcctctgtaagaataaagccattgttccctgaggggagtaagattctaagctgtcaccttttcaagagcagaacctccaccttttcccgaatcccttccaagctctggtctttggtaacaatccctccaatggaggggtaaaagggtttggaagttccattattgaagagcagggctctcttctgcaaggcacagagtggctaagaggattcccctagtgtatgttgctataaggtatggtaataaagcagagagaaagcaatgtgtgtgtggtgaaaggagattagcataaagcagagaaggtagaaattgaggctgaactgcatccaatcttaatgagcttagggagctgtggggtttgctgggatttgcaaggctcttctaatggtcttatttacagtagcttttctccttttttatgcatgtgatcactcacccccaactcctttggaagctggttctatggaagactctacagggggtggggtggggtcgttcagaagtgcctataatggaaagttttctctctccttcttgaattgggcttcttttctagttgctcaagataaaagaggaaacgcgtcccctccagggggaaaggttatttaatccttgcctccctggcttctggcatatgtgcgtgtagcaaggttagagttgagaacagatgtgtttctttgtttgtcttaccatgtggttgttcaaaaaagttctgaaaaacctcacaaacttccttggggaagtttcagtgcaagagcctgattcactcactgccataaaagctaagactgttgtgagtgtgtttcccatccccaacacccacctggatttcacattgtttttacaagccattcttcccatctctgtattttctctgtctcccagtcatcttccctcatctccagtgccacagcagcagctctactgagctctggggctgtggactactgcctgcacgtgctcaaatcactgctggaatattggaagagccaacagaatgacgaggagcctgtggctaccagccagttgctgaaaccacatactacctcctccccacctgacatgagcccattctttctccgccagtatgtgaaggtgagatctttccctcatcaaagaaacactcgtcctttgttcagagcactcttctctttcctcgcggtgcagagagctcaaggggctgagggtgaagagccataggaaggagccggcattccttggtgggggttaatctcggcgtgattgaataaatgaccacttctcccaaccttctgtgggattctcattcctgcctctttgtaaattggaggaattgaatgagatcatggttatctcgtttcacattaagtttagaaaaagatgagaaggtacaagctaatgtcatgagttgtgggtcatgacatgtgtgtcagatattccctgtgctgtcaccactgagaggccctttaacgtacttattaagaagatgggccttctgatcagattgatctgggataagtcccatcttgtgttcttacttaccagtcttgaagcatggagaagttctgtctgtctaacctccctaaccttcagcttctacagctggaaaatgagcatacagatggtatctgctttacagggctgttgtgagcattgaatgaggtgccctttgtaaaggacttagcacaatgcctagcatgtatcaatgcccagtccgtattaactgatatcaccagtctcttcctcactgccccctcagaatagctttgagtagggtaggaatacgataggcatagagtgtggatctgatcgttgtcttgctcttttttcatgactctttggtggttttccataacttacaggccaaagagttctggaggacccagccacctgcttgactctagctttgtcacctataacaccctacacgcagccctgccagcctgcacatttcccaaggtgtggcgtgttgcctttgttcatgctgtcccttctggaattctttcctctccctctgctcccctttcttctcctgtctagcgaattcctagcccatcttcaagatccagcacgagctttggatccttgggaaaacttccctaacatatactccctgccatcaagtctgctcaagagagccttgtcctgggttcccggagcaccctgtgtgctccttcacctgtcttcccctctacactctcagcagaaaccatattttattcctgtttacaactccagtgcttgatacagaactgatgaataactgggagttgaatatgtgagacacgttgtgccctcaaactcttacagattctttttatgggaccacacagcttgcaggatagctgttgtttccactgtcctcacatctctcatttacctctgcctttttgtgttacatgaagccaggaatcttggctgagtttagtgatcttgcccaccttggtttatttaacaatttcttgttatcatgggaaattttggttctagggatagaatacatctcatagaagtcagagatccttactccctttttcttttttttttccaatttttttggcctttctagcactcatctttatgtaggcagagtacaatcaacccaatgtcaaaaaccatagagtgaaatattaggacttttaggaagtgaggtctgcctccactgtaacctttgcatgtaattaaattggccgcagaagcctgggccttctgggtttatagaataaactgtcagtcagtcttgattccagctctgaaaggcaccctttaccacctccaacatgtaatacgtctaatgagccaggctttttcctaattgtggtcatggaaaatcgatagtcacaggttctcatgcaaattttcttctcccagggtcatgctgctgatgtgtttgaggcctatactcagcttctaacagaaatggtactgaggcttccttaccaaatcaaaaagattactgacaccaattctcgaatcccacctcctgtctttgaccactcgtggttttactttctctccgaggtaagtgaaagtcccaagctgcatgcttgttgggctgaggacacatctgcattcacctctgtgggcccctttcttcctcatccttacttggtatttccccttgcagagtccctttcacctttgtaggtcttggtcttgcccttctggaacatactgtgtggtagaactgtgggagatgtgtatcaaacaagccatactttaccttctgattctgtgtgttgaacttcgcctcacgtgctgataatgggcaagtttaataatttaggttctgtcagaaaaacaaagtatactagttatcttaatagagagatttcaatatgggaaattgggtaaatgctgttggacaacaaaaaagataaaaaggaaacatgaggtaacacagggatagtaactgcctgaagcagttatcaggaagtgggttccctgaggggatgtgatgcggttgatgctgggagcagtgagagaagctgatgattagaactcactgtggctgccagggtgcagggctgttgctaggactgcaggcagatgggaagaagcaagccccttcttcctcctgctgccagtgtccctccctgttggcagaacctaagagggagccagctggcaaagaagtagtgcattggcataattctggcctcagcatcactgggcagtgtcagtaggggtgggttgggaactgagagacaatggctttaataaccttagtaaccagacagcaaccctgagatagattaactctgggaagaataatctgttagcaaacctcagatgaggattttgagttacatagttgtaccaacccaatcttctctttagctcttttacctgaaaaagagatttggaatggtttttttcttgatagtttccctttgggtgggctgaagtggagtccagcttgcctgtagattcctaagggcacaaggaagagatgcatgaatattggtattttcctctttgatttctttctctccctttctttctcctggtctcattaaaggatatttaagtttaagagaggctggtttggtcaagaggaaatagcttggtttgtgtttctccccagcctttgtttttttttttttttttaagaccaagtctcactctgttgacccaggttggagtgcagtgacacgatctctgctcactgcaacctccgccctctgggttcaagcaattcttctgcctcagcctccctagtagctgggattacaggcagtgctaccacggccagctaatttttgtattgttggtagagatggggtttcaccatgttggccaggctggtctcaaattcctgacctcaagtgatcagcccacctcggcattccaaagtgctgggattacagctgtgagccaccgtgcccggcctgtccccagcttttaataacagtttattaaaacccagggtgtgagagccacagttgatatagatacagtcccagagtcatttactctttgtggtgtttttcttctcaagtacctcatgatccagcagactccatttgtgcgccgtcaagtccgcaaacttctgctcttcatctgtggatccaaagagaagtaccgccagctccgggatttgcacaccctggactctcacgtgcgtgggatcaagaagctgctagaagagcaggggatattcctccgggcaagtgtggttacagccagctcaggctccgccttgcaatatgacacactcatcagcctggtacgagggctgggacctggtagggcagggaggggggatgtgataaggcttagccaagtaggtaatagggctggaggtaataatgcaggacttttaactgtgttgacaatggcatggttagggctgagatgagggtaaatccataacccctgtctgggtgctgtaccatgtgtagttggcttcaggatctgggatgtccccctcagcactctcatcccacctggcagcagttcctccactgtgaggtgagtggcccgagcttcttaccagtgccatttgcttacatcctagtcaggactgatctctttgtgcacctctggtttttacccttgaatactaaagaaatgatgaaggttcgagtagaaaaatgtattgctgcctaaagagaaactgtttggacttagaggagtaaactgagtattttgtatgtgaacaacctagaaagaacgtctttaatctagctggctcatgttcttgcttatcgttatatatcaagaaaagtaaactggattatagtttcttaggtcatggtctaccttttgctgttgccttattgagtagtctgaaggttcctgaaaacagcgccttgcgtggggatggggtagaacaaaggcaggttcggtaagagctgcagcggttgcagcagtgtgtgggtcatggtcccaggttgaccagacatctcagcaagcatctgccttgctcagaagatcatgttcaggtgtagtccaaagtcagggagatggctccaggcagcaggtgtggtgcttgtctgggcaatgtggtggagttactcctttcccgtggttggttcctatttcagatggagcacctgaaagcctgtgcagagattgccgcccagcgaaccatcaactggcagaaattctgcatcaaagatgactgtaagcaatgctgctccttttgattgctgttattcattcattcaggaactgttaaggcctactatatgccaagcactgaactggatgctggagatatagctgtgaacaagatagactagacagaactctgtctagcaaagaagacaagtaaaaatctaaaagagtggtgagggctggtcgtcaaagtttggggagctgtagaagcacaaagtaggagtctctgacctccaggtagtggcagtaaagtcaaagaggagtaggtggagtctagagaaccccttattcaaaggagcagggggctctggtcggtgtgtagttaaaatacttttcagagatttccacagaaagtataacttcttcacaatgtccagcagagagaacatggcaaagaaagctggtgagaacagggcagtctcagctgtagggagacgttgttttggttctcctgagtctggttgaggtcgtctcagaggtgagcctctgtctcctctgcttgcagccgtcctgtacttcctcctccaagtcagtttccttgtggatgagggcgtgtccccagtgctgctgcaactgctctcctgtgctctgtgcggcagcaaggtgctcgctgcactggcagcctcttcgggatcctccagtgcttcttcctcctcagcccctgtggctgccagttctggacaagccacaacacagtccaagtcttccactaaaaagagcaagaaagaagaaaaagaaaaggagaaagatggtaagggtcaccctcttgtcattgtgactacaatgatgtatgtaaatctctcttggagcacatggtttgtcctgttgtaaaaggtcttttaatcctgatttagaggggacttaaagcccaaatgttctctagtgtctacttttggtctcattttcaattatactgaagtgacaccttaaacagcatgacttctcataccaagtgacagtaataagaaaagtcaaagtgcactgaacatttttagtagaccaaatttcttattctgtgaaataataacaccttctctatggagctcccatcagagttcagtgaaatgacactgagtacattggtaaatgctcagtaaatgttagctctcttagctgaccctcaccatcagctgcactgctttccatggtccttggagacctgagatcagtggtcagggttgagagccatggtggtggttcacattcccccagttaatgatcagacatctctgtgtaggcctattgcaagcccttgaaaggaagttcctcctcctccagtgtcactgtatttgttcagtgccagcttacatagcactttatcctgtggtttttagtgtcattattgtatgtcttgtctggaaggcagctgtgctcaccactgcatcaccaacgttacacatatgtctcatttggggctgacctatttgtcccccagtaaacaactaaaaattgttttgcagaatatcagcattcagtagaaacttttagaaatggacagaattccctccctcaccatttggtagcccaggccttaggaccctggaggacttcttcctactcttcagcccttagtcctgtcctaatcttgcaggtgagacctctggcagccaggaggaccagctgtgcacagctctggtgaaccagctgaacaaatttgccgataaggaaaccctgatccagttcctgcgttgtttcctgttagagtccaattcttcctcggtgcgctggcaggcccactgtctgacactgcacatctacaggtagggccagggcttggtttgacagatctgcaagggtgtgaggccagggtgcgtaatgcagttctattttgttttcggttacatatggtcacagagtcagtagttacgccagcctgaatcctcttgtgctttagagatttctttattgttgtctgctttttagccattaaactgacgtcataggcaggagacgatctgttttctactcagaaggctatgtatcggggtttgtaacatgaccaagcttgacccttcaggctaaaaaagctcagcttctgctctgggatatgttgggtgatgggtagaggcagcaaatgactatgctgcatctggtaggattgattgtcaaaagtgaaacaaaaccgttcaaacttaacccataattgtggggaaattgaggtaccagagcctcaatgataaacacaggtgcctcagggttttctgctgcttggtaacatgagctgtcatatatccacagaaattccagcaaatctcaacaggagctcctgctagatctgatgtggtccatctggccagaactcccagcctatggtcgtaaggctgcccagtttgtggacctactaggatatttctccctgaaaactccacaaacagagaagaaggtaacagttgctttatggtcagaggggccaacttgccatatttaaccttttttctcttgagttaagaatattatgaacaacccagatatagggagtccatataggaaacctcttttaaatatatctagttttgcatttcttggtaagcactcgtaatatgtctgtgatgtagacagtatacactaacaaatctaacttaacataggacgtaggtcaaggtcaggtggggaaagaagatagaactcattacagttccttggaaaagcaagtgctccttgttttgctagtagccctgattatacataccagaaaatgtttctgcaattagctaaccattttatggcttctccataaaaataaaaatgatcttcctccatcaggtcagaaaagggtactacctatcactaaagctcatggaaacttctaaaggagatagaatccatttaaatgattgaaattaggcccagctttgtatgattctgactgagaagtctggtaggtctagggcagtattcagctagaatgcagaagacaaaagtcttttccaataagacttcaccttgggctttaagttgtttctttactgaattctgtttcagttgaaggagtattcacagaaggctgtggagattctgcggactcaaaaccatattcttaccaaccaccccaactcgaacatttataagtgagctttgttttgctttctacctgtgggaagctcagtcagcattctgaggagttatttgcatggtgataggctcttacataggaattgacaagcgcctgagagaagagcgaatctgcctagttgagattccaatcccctccatgtaggccagggtcttgcaaatagaaggtactcaaaatgtcattgctgagttcagggtttggtgagtagtaatgtagaaaggtctgtatagcctgggcaacatagtgagacttcatctcttaaaaaaaaatttaaaaaagttagccaggcgtggtggcgtgtacctgtggtcccagctgctggggaggctgaggcaggaggatggcttggggccagaagttcgagggtgcaatgaactgtgatccacgccactgcactccagcctgggtgacagagtgagaccctgtctcaaaaaaaaaaaaaaaaaaaggtctttagtttcaagggtttaagttaaataaggtgaaacaaatttaaagaaaatgtcttcctttttttaaaaaaacttctaaaagaggatattggttaaattgacagtttattatttctctggtttagtagtgactgttctttaaaaaaaatttaaaaaaactttattgagataatttatgtattaacctattttaaatgtacagttcaatgatttttagtaaatttaattgtgactcttgagtcaaattttactactttttagaattcctctgaaggatagatcaaagattaggaaacatctaaggtcagttagttgaaatttctttcctgtggcttcgtaaccctattgggatttctcctgtgtccttgagttctcactagggtggggctcactttgggctcactttggctcacattgagccatggctttgtcatgatttttttgtgaaactcagtgcttcctaagatgaaaatgtgttcatgctaagactggtttcttccttagcactttgtctggcttagtggagtttgatggctattacctggagagcgatccctgcctggtgtgtaataacccggaagtaccgttctgtgtaagtaacatctgtacatggacagtcctgaggccaataggtccagtgggattcttgtttccagagatggatcattatcacatagatgttcctctcctaatggttggtcaccgatagtaggaatttttatctgccacatttattaccttaaatagaaacttggctgggtgcagtggctcaagcctataatcccagtactttgggaggctaagatgggaggatcccctgagcccaggggttttagaccagcctgggcaagatggtgagaccccatctctacaaaatattttttaaaaaattaaatagaaacttcatcttgtggatgaagagtgggttacactgatgaatttttaaaaaggcagtacgagtcttgaactaataccatgttttgtgaactcttgtatttagtatatcaagctgtcttccattaaagtggacacgcggtacaccaccacccagcaggttgtgaagctcattggcagtcacaccatcagcaaagtgacagtgaaaatcggggatctgaaacggaccaagatggtgcggaccatcaacctgtattataacaaccgaaccgtgcaggccatcgtggagttgaaaaacaagtacgggctttttaggcctcgggaggggcagcaggttgtaaggctgaagctcagttgctgccttcggttcctggaatggagtaaggcagcacatccctagaggcctaatacatcctcttggcccctccattcatgaccaaaggacaaaagtgaaacaacagttctaagcatgttgacaaagattatttctaaattagcccagtggagccataggggtctgtggaagttcctcaacagcctgcctagggaggggaagctgagtgaggggacctccaggcttctcatgcccattttaactattcttacacaaaggtctagacttagataaaaccttctgtattgggaagtaattgtcatttcttggattaagacagctatgctcttgctcacagggcagaaagttatttctcaagaagcttctttagtacacacactcttcgatttccacatggtgccttttctctgtatctgctgatactggatcttcctagcccatgtatcccagtgactgaaccagggcatgtcatatttaggccaagagaggcactcacatgggttatagtgttgactttcacagagacagatcgcctttttttgaactctcaggcattgctactgaagggagaacacaggttgacactacttgaatagtaagacttacagagctgttctgcacacaggatggaagtattgctgttattccaagaggcagaataaggctcatgtaccacagcaacacgtggccatgaaggctgcctagggaggttttctcttcttgccttgaaaagcctagtttaaccttggtgacctgaaagtagatgctgcacattagggtggcccattcccctccagaggaggtgggtttgatttttcattgtgtggagtcagcagagctactggtagactatttgggttcagatcccagctctgctacatagctctgtgaccttagagaagctgcttaacctcagtttctgtaactataaaatggaggtaggaccccacttccagggtttaaggattaaatgagttagtatgtgtcaggtgctgagaacagagcctagtacatagtaagtactcagtaaatattagctctcattgtgttatataatcaccccaaaattattacataccttcctctttatgacttgacttagcacttggttcagaccctgattttcttcctctgcctctctaaaatagcctgggtttatctttccaaggttgctgtcaggatgggaacttggcatgcatcatcattgcacctcttacaggcttcagtgtggcatgcttttggagtcatggtttcccttgttatatacttctgttgttttcctggaatttcaaaaggtatcatgtataacagcttaaagcacttgtatgttctttcctttttttatagagaaaaggtagtagaaaacttttttaaaactggcttcctattatatgccagatttcttttccttagagtaaccacttaattgccttagaaaaatacatgggacagtcttcctctttgtctcatcagactgttatcactgagggttagatgagaaaatctcaaggctgtctgtctttcctaggccagctcgctggcacaaagccaagaaggttcagctgacccctggacagacagaggtgaagattgacctgccgttgcccattgtggcctccaatctgatgattgagtttgcagacttctatgaaaactaccaggcctccacagagaccctgcagtgccctcgctgtagtgcctcggtccctgccaacccaggagtctgtggcaactgtggagagaatgtgtaccagtgtcacaaatgcaggtaagtcattggtcatcccctaggccagggctgtgcacattccttgttatttttctgtagtagtgtcagtgtgagcaattacagtgtctgattccctcagaacatttagagaattatgggtttgtagagtgggttcaagggtagaaagggaggaggaagaagagagagtgagtgagtgtgtgtgtgtgtgtgtgtgtgcatgtgcacacgagtgtgtctgtcctgtggcaggggtggagggtaagggcggagggaggtccagaagtttagctctgggtcttgctttcttgttacctggctgcttaagtcattcatttgttattgtcccttcagtagcccctgcagtagttaccagagtatataaatgtggcacaatccatttcctcagagtgacccccaccccacccagccttgtcaccttactgacccaaacgctttggttactcagatccatcaactacgatgaaaaggatcccttcctctgcaatgcctgtggcttctgtaaatatgcccgcttcgacttcatgctctatgccaagccttgctgtgcagtggatcccattgagaatgaagaagaccggaagaaggtgaggccagatctggcctagactcagggctgtggccttgatctggactttgggcagacctggtgcagtgcagtgcactttactttctagcctaagccttcttcgactcaacaccagtttcagggcccagcttttgggtgggagcaaagaatggcatgaggtatattgtattgaaagacatggtttgcataggattttagaaaagtgttgattggtaatgaaactagagtatctccaggtacagataactttggatttggatgctttgccctgcatttcttccacagactgcttcatattgaggctgctggccctccctcagtattagattgtccagtgctagttcccagcctgcataatatgggcaggggcggggggaggttctagatattaaagaacagtgaaaaaggggcacctatagggttaacagaagaacatttagctttggagtcagaaggacagaaattctaattccagccatacttttaatacttgtgtaacctagtataagttacttctctcagcattgtattattatatatcacagatgtgtattgtatttttattagaaataatatacccacctcacaggaaagattattgtgaagaacagagataatgtatgaaacacagtgcctgacctataggaaatgttctggtaaatggttagcagtgaggattactcagggaaagtcatcagccaaaaagccttcactcagtccctgtcttttcctgtctaggctgtatccaacatcaatacacttttggacaaagctgatcgagtgtatcatcagctgatgggacaccggccacagctggagaacctgctctgcaaagtgaatgaggcagctccagaaaagccacaggtagtcccacgctgcaaagggcatttggataagggcttgggtcttgatcagaagactgcctcctaggtgagatcaccttaggtggggagcctgacagcttacctcttggggttgcaggatgactcaggaacagcagggggcatcagctccacttctgccagtgtgaatcgttacatcctgcagttggctcaggagtattgtggagactgcaagaactcttttgatgaactctccaaaatcatccaggtagagagcggggagcagcttttgggtgtgttttgtccaagtgttactggtgttgttttcacagcagtcctgctgctctctcatctagcagtccaggtcttggtgttgtccctgcccaatctagctgaaaaggcaggcagatggctgcaccaaacggcatctcccccaccgtgatttatggcgctggtcagaatgctgagttcatgctagataactgaacatactggtgatgggaaggtaacacagataagggttttttttagccattaacaacccatctcttagtagaggggttactggtcttaaaaaatttgatgccaagattctgttccctcttctgataacgccgtgtttgcaggctgtagggtaagggcataccaactgcaatcaaccagggtgggccttgtgtcagttgcaatgtcacagacctaatctccatgagatgggaggctggccatagacagaggtacctcatataaggagagcatccagtttaccttccccctcaaccccaaattgctggagtgccatctttgctacacgtgtattagcttctgacctttgtctttgttacatgggagttaagagcataagcctgccatctgagtctgagttctgactctgccacttatcttggtcaagccactttctccaagcttcagtttccttctctgtaaaatggagataaagcatctaaccagttgggttattgagaagattaagttatataatgcatgtaaagttttttctaaagcaaaactaattttctaattaacatcctcttcttattttaattgctaattcccattattgttgcctttttgttcttagaaagtctttgcttcgcgcaaagagttgttggaatatgacctacagcagagggaagcagccactaaatcatcccggacctccgtgcagcccacattcactgccagccagtaccgtgccttatccgtcctgggctgtggccacacatcctccaccaagtgctatggctgcgcctcggctgtcacagaacattgtatcacactacttcgggccctggccaccaacccagccttgaggcacatccttgtctcccagggccttatccgggagctctttgattataatcttcgccgaggggctgcggccatgcgggaggaggtccgccagctcatgtgcctcctaactcggtcagtacctacaccatggttatgggcctagtggttcctactgacactggcagccatgccaggagcgttagagagtgcacagaatagtgcttctgaccacccagcaagttaggtagcttataacaaaggaaagatggaaagagacacagggtgtaggtgagcgagcttggggagcattgaaacccaggtttccttgtaaatggcatgattggcttgtgcttttttggttccagtacagtgtcttgaggaaactctccctgaggccttgtgagggaagggaagggagacacttgaactcgagaaagactcacatgaaagaagcagagcagtggggcctggagattaagagcttggactctggattggaaaggctcagtttcagtatctgataccttgtactatacgccttggacagattccttaatttctctgagtctgtgttttcctcatctgaaaaatactgacagtaggctgggcacagtggctcttgcccgtaatcccagcactttggcacctgaggctggcagatcacttgaggtcaggagttcaagaccagcctggccaacatggtaaaacctcgtctccattaaaaatacaaaaatagggccaggtgctgtggctcatgcctgtaatcccagcactttggcaggccaaggcgggtggatcacctgaggtcgggagttcaagaccagcctgaccaacatggagaaaccccatctccactgaaaatacaaaattagacaggtgtagtggtgcatgcctgtaatctcagctacttgggaggctgagacaggagaatcgcttgaacctgggaggcggagattgtggtgagtcgaaatcgtgccattgcactccagcctgggcaacaagcgagactccgtctcaaaaaaaaaaaaaaaatacaaaaatagggctgaacaggctcacacctgtaatcccagcactttgggaggtcaaggcaggcagatcacgaggtcaggagttgatcatgaggtcatggcaatgtctcagcagtgggctgcatgcctaggaagtagcaagtgggtagttgagagcaggcacctgccaggaatgctagggcatcacaaggaacccgtgtagctggagacagggatgcagtagggaagactcgggaggaggcttaggtcagagggtgcgagggccagatcccatagggtcttgtgggcctctgtaaggactttggggcttattcagtatgttgggaagcaagagtgagtgatacggtttgtgttttttattaatagtgggaacattgttacaaagagacgtaaactggaatatgagggccttgtggaaaatgaaatgcaggcagatggagaagacagggaaagagttgtgaccaagactgagagtggacgtctaggttttggagactgtgtcacaccagacagcaggggctctgtcgcctgggacatgggccccataaggtggtgctgctcttccctcagttagcttctgttcataggcaaggcggctgtaatgggccctttattattaccgaccacggttttgtgaagctaaagttctagtcttgccccgggaaggaagtagaaaatttggggccaggtagccttagacattgatttcattttccctgggccccttcaggtggaaaggagtgtcacacctgattgtgaattataggactccatttctatttgcttctgcagagacaacccagaagccacccaacagatgaatgacctgattattggcaaggtctccacagccctgaagggccactgggccaaccccgatctggtgagccggcctagcaggcccagctgtcctctctgacttcccctcacatgccttgtgtttctcagcttcccctcccaggtcctgcggtgactgaggagggaaggagcagaacattaccccagaatggttttcccagggaagagcctggagcacaagggtctccgtctgtcctttgtctctgttggagccacctaggaccagaaattgtattaatagttaagagtcgctggaccggagctgaccctcttgactcatgtctcttcccattgccttctaggcaagtagcctgcagtatgaaatgctgctgctgacggattctatctccaaggaggacagctgctgggagctccggttacgctgtggtgagttaggggattttcagagaaaggaaaggaggctcaaaggagcagtcctggccggactgggaggggaggagggaaactgatgcttgggcggcctctgcagagcagatgtgtagtgttcctgattgtgactctgcctttcctgaccatccctagctctcagccttttcctcatggctgtgaacattaagactcctgtggtggttgaaaacattaccctcatgtgcctgaggatcttgcagaagctgataaaaccacctgctcccactagcaagaagaacaaggtactgggccaagcaggggtctaacaaggaagggcagggcggccaccctcctcattccctggcagtgtgccctgcctcctcatggtctccgctttgccttgagcccacctcccctgagaggctccagtgcagcctttgccttagttcagcagatatgggttgggatttttgagaaggatggttcaagtaaaataaacatgaaactgcaaagcagagagcaaagtggctagctgtgaaggatgaactctttccagtcatgttagataacttgcagcccccagaaagcattgtgtccttcctacccctgtgcctttgcacatgcagtgctgtgcggtgatagaaatcccaggctctgaagcagacttcctgagttcaaattccagcgcttccatttattagcatcatgatgttgggcaagttgttccttagtttccccatctataaaatgggaatatagtctccaccttgaagtgttgtgaaaaataaatgacataatgcagactaagtgatcaaaacggtgtctgcctaagttaatccttaacaaatgttagctgtggctatctcctgctttctttgcctagaatgttttccttcactttgttagctgctccttagagggtcagttctctactaggctagctgtgagctccttgattccaggaactggaccatcttagtaatactttttatgtctagtatataggatggtataacatctataatagctgcttagtgaattattattaagtgaataaatgaaaccaagtttttatcctaaaataactgtagctgagccacagattgacttgcttgtatcagcttttgaattgggaggccatagttctttctttgggccatgcctaaggctctgccaccaacttgccctggattgggccttgggtccttctgactcctgttctgtctgatgggccatcccttttgggcaacagagtcctcatggcaggaagattgctttttgagtgctaagcactagggttatgatgtggggaagctggacattgaagctgccttcagaaaaggcagcacggggcactctgcttccttccctttgatggaggaattatttccccccagattcccagcaactaaaatcagcccttggttgagaagaggacacccatccctatatgaccatccttgtttccacagtgggaggcaaagggagatttttcacggaattacttgccctgtaaggactgaggcctggtgtggatgttcacaatttgctccgtgtaacttagcgagagcagcagttcctaaaatctggctcacagactccggggtgttcttgagactgtcaaagatctgtgaggacaaagttattttcataattgtcctaagacactatttgcccctgtaattcttctgatgtttgtgctgacggtagaaaacctttgctgctggggagacagccagtgccttaggttgacgaggcggtggccctgtgcagttcttcactgccacccggtttcatcaagaatatccttgatgaaacagtacaaattaattttattaaatctccactcttgggtactaatctatttaatgctcagtgtgacaaaatgagtacacagaaagcgcctctgctgcaccccaagtacagcagttgtgctgagaaaaggcacttgtgtgagatgcaagccaaaccagctgcctttccatggatctccgcttgtgcttgaaaaaaatggctgatgggcaaattgtggttgttcaggcttaggtatttggcagatttttcctcaaaatgaatgaagtgagctttaagaagaactgacataactgtgtaaaccagtgttttctaaatgaccaatgcatgttatagtatcctgccgggtaaaagatgaaggttagtgtaatgaagtatgaaaagtttattgatgtgatttcagagtccatactacagctaatctttcagaccctgtaatttgttgagttttggtatagtctcaatgaaaaaaatccacaactagttgaaaaaggtattaaaatattctttccttttccaactgtatatctgtatgaggccaaatgtttttcatatacttcaaccaaaacaacctgtcatgacaatttaactatagaaaccgatatgagaatccagatgtcttataaagcagtcattaaacaattatcaaaaatgtaaaacagtgccacgtctttctgtaggttatttttgttttggaaaatataaaatttatgttgacaaataatagatttactcttctttttcaatgaattaacaaatatcttcagaatttctcagtgttttattttttattttttttttgagacagggtcccattctgtcacccaggctggagtgcagtggtatgatctcggctcactgcaaaccctgcctcctgggtgcaagcaatcctcctgcctcagcccccttagtagctgggactacaggcatatactaccgtgcccagctaatttttttgtattttgtatcgaaatggagtttcaccatattagccaggctggtctcgaactcctggactaaagcatcatctgtctgccttggcctcccaaagtgctgggattataggcgtgagtcaccgcgcccggccagttttagtttttaacatgagaaatggcaatagatacaaccatgtaaagcaaagctctctggagtccgtaataatttttgaagattgtaacagggttctgaggccaaacagcttgagacacgctggactggagtgtcatctgtggctctctctctgcaggctgcttctggttagtgacagtttgcattctggaggctgcttgtgaccctaggaaggtttttgcttaggaaactgcaaatcagccgtgggataggaattagtgtaagtgctataggattgtaggaagccagccacagcttctgctgcacaataaaaatgagtgaccttaagctcaatgtggagatgctgctgctaaattggatcaaaatggtttaacaggaacacatatttgggcataagagatacacgtgttgatcctcctgatcttcttgcctttgcacatcaccccctggggcaccagtgccatgctgttggggctatggctcaggtgtgcccttgagcgccctcaccttgctccacttgcctcctccaggatgtccccgttgaggccctcaccacggtgaagccatactgcaatgagatccatgcccaggctcaactgtggctcaagagagaccccaaggcatcctatgatgcctggaagaagtgtcttcctatcagaggtatatctttctcttcaagacgccgggaagtcctgcctgcgctctgacagccctgccttctgtcactctcatttacttacctactacccctgcaacccttggccttgcagggatagatggcaatgggaaagcccccagcaaatcagagctccgccatctctatttgactgagaagtatgtgtggaggtggaaacagttcctgagtcgtcgggggaagaggacctcccccttggatctcaaactggggcataacaactggctgcgacaagtgagtggccacttctggactcttcaccccctgcgcccctgaccccagactctgagcaatatgtttctgcccctcaccatgtgtctgcactgccatctcttctttctctttgctcttcttgcttcctttcaaatagggagtgagtacaggttcttggttgtagctgttgggctagcatggtggactggccgaaacagaacttcctctgcttatcttaacacgctccttgtgctttctgctttcctccctgaccatagtcccttttctccttccatttttcgtatcttctgctgtcctttctctccctcctctctctagctaaagtaattctatgttaggtaatccatttgtccattgatatataaaataagaaatacttggtttacatttaaatgaaagtattcagcatataagtgtccccaaaaaagaatgatcagcatctttgctaaggaagatccctttttcctacttcacttattgtaggtatgttcttcacatctcctgatggagaagtctccaggcagaagcagggctctttcacagcccctttccccatctaaaacagtagagtcttgtgttagctggtgatttttacctcttaacattttcctagagaggtgcccagaagacctctcctagatgggtggcagttgactgccctgctgggggcctggtgaggcagggcatcctctgagtctacgaccccttctctcccctgtcctgcaggtgcttttcactccagcaacgcaggccgcacggcaggcagcctgtaccattgtggaagctctagccaccattcccagccgcaagcagcaggtcctggacctgcttaccaggtaccatttgggagtgggatgaggagcgtggttagacttgctctagagccttttcatcttccccggggaatccatggatcagggtaatgagaggcacacctctgggtagaagaccccagaaacaacaaagtgttaaaaagctgacttttagtgatggtagtggtggtggtcgttgtggtgagggtgttagcagcagcagcagctaatatttgagatcttatgcagctaatattgatcgagattgagtgcataaatgcttggcatgcattatcttatttaattctctcatagcaatcagtgccaaaatatgaatgcttagattctgtggcattcactccctgcagtgtgctctgaatgcttcctagatgtgggaaattcccatgtgggaattggagctgtcttggatgctgttcctccaccctctaggaagcaggagagacagacagcagaagataggaaagattgggaggagaaaggggagccttggagctgttcgaaatgctagagttcttgactagagtgccctgtccctcttggtggcagttacctggatgagctgagcatagctggggagtgtgcagctgagtacctggctctctaccagaagctcatcacttctgcgcactggaaagtctacttggcagctcggggagtcctaccctatgtgggcaacctcatcaccaaggtatcctaccctattgcccaagagagccccttccctaattcccccttgtaccttgatgtaaactctactatggtgttttgtttgtttgtttttgctgagaagaaatatttgttgaaggtgtttggaaatatttttatgacttcattgtatttattatgtagctgtagcaaactcttgggagcatttggactgtttacagtttttaagcaatcccttaccagcgctgtgactgttggcttcctggaaaggagttctgcaagggttcgattaagaagatgtaactacagagtgtctggtgctgcaagctcctgggacagtggtggaggtaactggtatccttggcagtgatatcacactgactgcacttgtcatcctgtttaggaaatagctcgtctgctggccctggaggaggctaccctgagtaccgatctgcagcagggttatgcccttaaaagtctcacaggtaaagagccacctggaccttcctttagggcatcctgaatctgtttagggacaacccttagttccttgggtgctggggttgactctcttctctctggtactgaccttagtgcagatttaagctctgcattttttttctgtattgatacgtttatgattttgagaccctgtttgctattgactgtttccgcttgttgaacacctgctctgtgccatgcacaaagatagattttccctgctttttgagttgctcataatcttttgagacacagactgtccttatgttttcatccagagctctcacagcaacattttcctgtctccacaggccttctctcctcctttgttgaggtggaatccatcaaaagacattttaaaagtcgcttggtgggtactgtgctgaatggatacctgtgcttgcggaagctggtggtgcagaggaccaagctgatcgatgagacgcaggacatgctgctggagatgctggaggacatgaccacaggtagcactgcccagtggcctggagcctaaggcactgtcccttctggggctgccgaggtgcattcgaccaatttcccccagttccacagatccagaggaggggtggcaaacatctccctgcattcaaagggagactcatttcttgacaaagtgttggctcttggaattttaaattctagagctgggctcagtcactttggatttttcatgttgagcttatagagtggtgcaaggtcaaaggctctctcattggtgtcttctatcagtctggaaaattctcagccattgtctctttaatcccctctgctgtattctctttcttttccttgtgaaactccattttcactctgtcatccatatctctccatctctcataatgttcatctcattgtgtatttatgctgcatttttgacaatttgttcaattcagtttttcttcactgtgtgcaaatgtttaatctacctgttgaattcttgtggttctagattttatggtctcttttttatttttcattttttgagaccaagtttcactcttgttgcccaggctggagtgcagtgacgcgatcttggctcaccgcaacctctgcctccaggattcaagcgattcgcctgcctcagccttactgagtagctgggattacaggcatgcaccaccacgcccagctaattttgtatttttagtagagacgggatttctccattttggtcaggctggtctcgaactcccgaccccagatgatccgcctgcctcggcctcccaaagtgctgggattacaggtgtgaggtctctttttaaaaattcacatttccctcctttatatgatctataagcatattaaacatttgtgtctgataattctaaaatttgagatatttacatgcctgattctgcagtttgttattttggctcttgctgatgataccttaaagtcttgttgtgttttatgagttttgactgtgacctcatattttttagctttatctgtggaaattctttaggactgggccaaagatgggtttctccagaggaggtaaagaactgcttctgtgaggcagtgcagggtactgctgtcccagttctgagcctcaggattttcagacctcctaggtagtgagaggtttgagccgcaaacccctataaggggacagctcattacaagttttcagaggagatttttccctgccacttgatggtaaagtttaaggaaagtcaatttcctcagttatttggttgggggaaagggatagctgatctctgcaccaagggtgtagctctttggggtactagatttgtatttgtggggcatggggttgggggttcctgctagactctttgcctcagtggattcggggctttatccacctctcaaatctgggcagggcatggaaaccaaagctcaacgcaaaaactgactcgtgttttgcttatctccctggcttcccgatttctcttagtttatggcttttggctgttctgtgttagtgtggcagttcactgatggatttttattcaacactttaaattgtttttgagtggtggagagtgaggagtaggtcagggaacctcgtttgccttattgcccaaaatggaactctttctgatgccattttcatcgtgccatactgagctggtttgtgacttcgtcagggacctttacctttttttttaattttaattcagacccacccagtaatgcaacagtgggactttttttttttcccgaagtttcactctgtcacccaggctggggtacagtggtgtgatcgaggctcactgtaacctccgccttctgggctcaaaccatcctcccacctcagcctcctgagtagctgggactataggcgtgtgccaccacgcccagctaattttgtattttttgtagagatggcatttcgccacattgcctagcctggtctccagcttttgagctcaaagtgctcacaagaccttattttttaaagaccatattttctcaccttcatgttactttaagttgtgttttttcgcttatagaggacagtctacctaatcttttagaatgaagctaaaaactaactgtaacttccttttgatttgactggaacacaggattatttgacattttctgagtgcctgttttgggcaaggagatgctagttaaataaggcacagtccctctccttgaggaggttatatcctgagagagagcaagacatgtacacagccaaccatgatgaagtgtgtggacttgggtgttatgggtttcaaactgaatgtggtctgaggataaaatcaatcagcatcaaatttccaatttgaactattgatattgccatgtagggcatttaaagacttaccaggcagaaataatttgtcagtgatggtacttcagttagaattctcatttcaccttccatgggagaggctctttcctaacttggccgctttgatttctggcaggtacagaatcagaaaccaaggccttcatggctgtgtgcattgagacagccaagcgctacaatctggatgactaccggaccccggtgttcatcttcgagaggctctgcagcatcatttatcctgtaagcagtgcggtgcttcccatggctctcgagtgtcagcacagcccactttgccatgaagcctcttggtgattcattaaagttatggggaattgtaccagctgtgggccacttagtcattagtgaaagaagatccaccgccataaaagtgaagcaacctcataattttcctcttgctaacgatgggacatttaatgaccttccttggtcttatttcctagattcaagtaaagaatcatgtttttttaaaaactaggtctaacctccattaccaaaatcccattgcatatcaatccaacatactgtggaagaagcggtattgagcttgaatataaagatatttttactctcttccttctttagctgccctgtattttgtgcacacatgcagcgtgtgtttttttccctagcctgaactgtgtagaagcacagtatcatccagagaacccttcctgctattgaggaaagatgaacactagtatcatgagctagcaatgagagctcattgggggtgtgtacctgagtgtcatgtcccatagagaagcccttttcttgacttcagggtcatcagtgacaaagtcctctggccccaaattggttagcatcacatgagaccagcaggaggaggaaggaaagtccctcctcgcaccccttccccgattttttaatatatctctcatatgtcactccttgtctgcttgttttgttaggctttatctcctaatccaccctggggtttcagggtagatgcttgatattttagtctacttgagtttgtttagatttttggaagtacctctgagtttcctgtcctttgtatctttaaatgtttggggggcttgctgagtttggtgtgttttcctcgagtgtccatggaacaaggtagcatggtataaatctccacctctgccatcccttctgatgcacccttctgtctgtcctccaggaggagaatgaagtcactgagttctttgtgaccctggagaaggatccccaacaagaagacttcttacagggcaggatgcctgggaacccgtatagcagcaatgagccaggcatcgggccgctgatgagggatataaagaacaagatttgccaggactgtgacttagtggccctcctggaagatgacagtggcatggaggtaatgaccataggacagtgctgcccacgtttacgattaggggcttcctcctaggctaaccaaatccaggtgcttcttcctagtagctgattaacttggggcaggtggccttcagtttctccactctgtaagttggggttaatgattcccacctttctacctcacctagtgctaaggttaataacctgtaaagggctctgcccagtgcctggcaggaagtaagcatattgttaatggctgttggttgtagtggtggtgggtatttattatcgttattgcctctggcagagacttctcggtgagtctgagttacctgagccccctaaatattggcgttttaccccctgtgcaggtttatgtccccgtgtcagttactttctggcagaccgttgagggtctgacatttttacatagtgaaaagccttttctggtgctgagcctgcaggagaaggtccccggtgggtgtgtctaagctggagcctgtgtgtgggttagggacgttagcagcccctgaaattgtgcacaaaattctgtgtgtttttcatacgtgcggattttttaagagtgggagagttgataggtccatgacatataaaaattgtgaattatcaaccattgccgtaaggtgccctttgctcttggattttacttgtcttacaattatttggaacaacagcttcacctgcttttctgttcagcttctagtgaacaataaaatcattagtttggaccttcctgtggctgaagtttacaagaaagtctggtgtaccacgaatgaggtatgtgcctgctttctcgtttggaggtgtggtttcacttttctgacttatgcagacttgtaccagcaggagccattgttcatcatcacttacctggcttgtagcagctctctaaggctttactgtccctgtttggggttgtgtggagaaaaccaatcttgttttcctttggaggcatctgactaatggagggacatttaatgaccttcatgaagcttcaggaaagcaaaagcattttgctgggctgtgcaagttgtcaaaccccaagaactgaaagccagggggtgtcgaaggaggctctgtgctgggaatgcttgctgtcttgttcccttcagtatggacacctctcagctgagattagttctcagcttttatgggcctgctcgcttagtagaacatttttccagtagctgtgtcaaggagcatcatttctgttttactagttggggaatggaggctcaaacaggcagttattcttgaggaggggaaaagggaaatgaaggaagtccagcgctctgggccttttggccaccacgagtgatgctgtttgtccacttatggaagtattagatggtccccttcacctttccctcctttcttactctctgttccttccattcctctcttcctgtttctttttcttcccctccatttctctctccccctgccatttcttcccttctcttgtttctattgggaggagaggtctttagcacatgaatcagataagtaacttaattacagcaaactagtgtagcagggatgcacagcaaacttttctagacttggtcccaaatacttctgtagagtttgagaaactaaattggcagtatactatttgtagattttgatcttcaatttgttacatatttccgcctctctcctttcttttctcccactgggctgggaatcctgcttactgttgactgttggtctactgccagtggggtcgttgttgcactgttggctgagggacaggcagagaactgtcccagccagtacctcttgttacagacattgtagcatcaaaacagaacaatacagatttaatccctgatgcatataaaaaattaagaccaagcttctgtgggcactctggtaaatggtggtagtgaacccacagaatgcaccagggtatctcccttgaatggtgaagcaagatagaagttgagaatcatttgcccctcacattgatgtgcttaatccagttagaaggttttctggcaaagttctgagtttgtgatagcctatgttctgggacttcagcttcccttctctaccttgccctccatttccctgataagcagcctacctctgtagctactgactagaactagaacctgctctgtgttcagtgtctgtggtggttctctctgaggaattctcactgggcttctatagccggaaacacttctgcaactggcctttctggcaggttgtcttcctccagggtgtcctgtcctgaagctcagcatagacttggaggcaggctgcttgaattagcgtgctaccaaatcccccactggatttcatcagtggttactttgagctccaatttctagtctgcaaaatgagaataatattaatatatgtgctcagtgccagacatacagggaactttccttattctccaatttagtgaagttgctgtaattttgtcatttataaaagacttgattcttatcattctagtcagattgtgggtttagcttaaagaattgtggatgaaccccctccttgtatggttatataaagacgtctgaatctctgtaggtaaagattgatgtactctcttttcctgttttgattcccgaggcttgagtcaaagctctttgatttaaatggccttgtttgtcctgggtagtagtccctattgattggagacagtttctactcctgaggaaggtccaggcttggaattagacctccgcttatagcttggtaaccttgaacaagctgtgtaaccttatgtaaaaggatcatagaaagtacttaattagcataggacctggcacagagtaaaacattcaataaatatttgttagattattacatagtgttctaatgaaattgaaggagatagtgtctttaaaatgtttcatacaatgtctagcttctagtagacacaaaataaaattagcattctttcccctaagtgaattgctgtgcatttggattctagatgttgtggttgagactttgtagaaaaatagaggctctccacattgctggggctttaagcaagaccaagtatggagtcctttgcatttgtctgggcctgtttttaagtacctttctccaactttctctgctcagggagagcccatgaggattgtttatcgtatgcgggggctgctgggcgatgccacagaggagttcattgagtccctggactctactacaggtagatcatggcactgcacattggatctgaggcttgggactcatgagcggctcacgtcccaggacttaggggcattctcagttgcttctctcttgtacctctgcatcagaattgtggggagattgtttcttcaattgaggaaaaaaagaggtgtctgtggcatgatgcagataccactgagtgttcaaaaaaaaaaaaaagaataccagcaaacttttagaggaaaatgcaatgaacagtaaactggagttcagatttatttttaactccctctccccccactccattgatggtattggtgctcatactttgacatttgagtaagtaattttaattgacttgaaactttaaaaaagctcctactgagagtgggacagtttaatatcatccatcattgaccccttttattggccgtgtctttattggagatacggaaaagggctgtcagccatcagccaggaatagggctgtcttatcctggcctattttattcccatcttcaccttaccctccatttctgcttggcttcccttctcccctagatgaagaagaagatgaagaagaagtgtataaaatggctggtgtgatggcccagtgtgggggcctggaatgcatgcttaacagactcgcagggatcagagatttcaagcagggacgccaccttctaacagtgagttgggggcagcaagttgtgggggccagcctttctgcactgggagaggcccctgtggaaagaagctatggccactgtgtcattttaccctagagggcagcatggtgccgtggagcagtgcgagccagtgaaggacctggcagttaggactacattcttaggcacaccttttcccgtcctgctggcccacttcccttctccaatacctctctatagagccagcatctgactgtctttccccaaatagctgcacttgtgttaactattatcattgttgttgtttttaaaatggattttgtaatgtaactcatttcttgcattgtagggttttgtttgggtattcatccaactaatctccttagtgaggattagagcattccagagaggcaccacaaatactacactgttattttcactactccccacccccactcccccagggtttatgagaatatgtattattgttattattgtgcctttgttttaaatgacctatgtggttctgagctctcacaggccacgagctttgggatcattttctttactattagtttagggtctgagttgatgctgggatttcccccaagacaacaaacagagcatcacctcttccattaggaactgctgtcattgccgttgtattagagatggtagagatatatcccgccattggagctaccagcctaatgtgagagcccagccatctcaccatgtcccctgaagagccgcttctccctcctgtcctcttcatttcaggaggagcccctgctgatggtgtagaccctgcttagacatccctttcctactggcccccatgtcctacactctcatgtggcctcatgggttttgactggcttttcttgtcaggtgctactgaaattgttcagttactgcgtgaaggtgaaagtcaaccggcagcaactggtcaaactggaaatgaacaccttgaacgtcatgctggggaccctaaacctggtaaggagcatggactgcaggtgaagaagagtgggccttggaagtctgggtgtgaaagacctctcagttctgggctcagatgaaatggactcacggcttcttcaagcccttcatctctctggctgactggtgcagaggcttgggtcattcagctgcccttctcctctggctggctcacctcctgcccccatgctgctgccatggcactcaagagcttccttgctcctttcctgagttcagatcagagataagaggaaggcagtcccttaaacagtctagactacacaccagtgggaaagaagtgcccctctccttggggcagcaaagctgcctgtcatcaaaagctcacacgcttgtctccctctcagaacatgcatatacacgcacatacatacacacggtcatacacacatggtctctggggagtaaggctgtgagggcatccttgagagcaattgtcctcagcagttagtggctgtggtcttattctgagagtgactgagtctccttctcctacaggcccttgtagctgaacaagaaagcaaggacagtgggggtgcagctgtggctgagcaggtgcttagcatcatggagatcattctagatgagtccaatgctgagcccctgagtgaggacaaggtgagtggggctcggcccctccatctgcaggcactgagagcctgcactgtctcattgcccacaacaggcctgtttgtgtctggcttagcccacctgagaatggcggagcctgcttaagcattggaatgttaggactcaactaatgatgacataattgtatcgaaatgtgaaatctttggattcagagcaagcacaattgctaaggatagtctttcactcaaaagctgctcgttaatggaatcctggcatgtctcagttgatagacagaggctttagtccaacctttcatttcatagttgaggaattgaatagcccacttcatttccctggacttggcatttcctcagctgtggtacatagttggttactggtggaatcaggcctagaacccagatctccaactcccagaatttctctccacctgctatgcctgtaatttcctccattcttattggtgctaatgatttggctagagctatgaccaagtgaatgtccagcagcctgcattcttttacagggagggaagattgtattggtatattttgaccacctgagacaattaacagcactgtcacagaaatttagaaacgaatttctcaagtgaaactccgactgtttgttattccccaagaagtgccgagacatagttcttctaggggtattcctgatgactctgatggaagtggtgacttttggggctcagatgttggctgcagccacagtcctgactgcattaatggcatgttcaccctcttttctgttgcagggcaacctcctcctgacaggtgacaaggatcaactggtgatgctcttggaccagatcaacagcacctttgttcgctccaaccccagtgtgctccagggcctgcttcgcatcatcccgtacctttcctttggagaggtggagaaaatgcagatcttggtggagcgattcaaaccatactgcaactttgataagtatgttactttgatttcatatagtgaaatgagagtctccactaaaacgccgaactaggtctgtgagatgaggaagaatcctctgaatacctattagatttttgtgtcctcgttctggcttttaaggagctcagtctagttgggaagtgaatagttaaaatatactgtattagagtagcaattggctagtcagagaaggcaaagtggttggtgagatgggaggaatatgacgagatggagccacgtgtgcgcaaatgtgagtgcaagagaaggctgtgagcgtgggagacatagcaggtaaacagggagagtggcaggagccggggcagataggtctttgtgtcacgttagggaatttagccttgatcttctataggctgttgacagttgttaaccaagagggtgacatgactgggttttgtcccgcctttcacaccctcaaactctgctctttcctcctagatatgatgaagatcacagtggtgatgataaagtcttcctggactgcttctgtaaaatagctgctggcatcaagaacaacagcaatgggcaccagctgaaggatctgattctccagaaggggatcacccagaatgcacttgactacatgaaaaagcacatccctagcgccaagaagtatgaagccctcccgcagcggggctgctttgccttcgctttgccctttccttttccttctccatcagcatcttggcataaagcttcacgtgtgccccttgccctccttggggcctcccaaccgcttctggaaactatgtgggtgaccattcaaccactgcagagtcctcggggcttgccggaaaaggatggcaactttttggtttctacttagagtactcacttctttctggcttttcagctgagctgggtggttctatgtgattctttatgacactcggagagggtcacggttaatcatgccctgggggtttaaacaagccagagtcaacaactggtttctaggtagcctttgcttccctggcctgctaataagccttcctttgctttgcagtttggatgccgacatctggaaaaagtttttgtctcgcccagccttgccatttatcctaaggctgcttcggggcctggccatccagcaccctggcacccaggtgggtagccaggacaggtagtgtgagggtacaggggtacaagtataactaccctagtttaccttgagacatgacttaccctaatatatgagacttctagagtagaagtgagcctcagaagtcatctacttcatctatgtgtgctgagagaagtaagttgtatttgtgatttcctcattcaactcattcttaagtggggcttcattgtctaatgggtcacctgtgcaactgttgaactgtgagggattggctgaccagagagtaaaacacttgggtgtctggccacagtcactaggacacttatattaccatcacctctatcttctctgcctcaagcagctgaaccccttgttcttagggagtcccacccattccactccgcagctcattcctgatttctccccacagggctgagcgttaacccctcacaaatccaatcctaactggccctggatagatggccagggctgggttttttttttaaatcaaagttttaatttggagattattataaattcacatgcagttgttaagaaacaatacagagaaatcatgtgggtcctttccccactctcccccagtggtaacatcatgtggaacccgagcacacaccacaaccaggatatagacatcagtgccatcaggacgcagggcaggttcatcagcacaagggtccctcttgttggccttttgtagccacatctatcttcccctgctcccctgccacaagcccctggcacccaccgatgtgttctccatttctgtaactttggcatttcaagaatgttgtataaatgcagttgtacagaatgtaaccttttgggattgtcttttttttttttctcagcatgattttctggagtttcatccaggtttgtttaactgttcacccattaaaggacacctggattgttgccagtttttggctgttatttataaagctgccatgaacacttgtgtgcaggtttttgtgtgaatataagttttcatttttctgggataaatgcccaagagtgcagttgctgcgttgtatagtagttgcatattttgtttataagaagctgccaaactgttctctagagtagctacagcattttacattttacatttcaccggaaatgtatggctgctccagtttctctgcgtcttagccagcatttggtgactatttttagtttgaactgtttggaagatgtgcagtgattccgtgtggttctgcgttttcctagtggttcatgatgttgaacgtcttttcatgtgccctgtgtatcttcagtgaaatgtctgttcatgtcttttgcccaatttctaactggattgtttgttttttaatgttgagttttgagagtcctcagcattgcgttttttctgtttgtagtgttctgcattgaaaatagttccactgtctcatttggtaatctgtttcggtaactcattccaaaaacatggtaacttgagtacagtaaagattcttcactgtgtctcactgaaatcccttttctaaacttctgttcaactcagtggagtcataattgtatatatttgtggagatactttttcctgcataggaatttcacatgtattgttttccatatccttgtaacatctctcttttgtatatggataaatcaaggaacacggttgtgatttggccaaaggcaacacaatgagtttggaactcaaagtcagctgatttccaggcttattcttttttttttttttgagatgaagttttgctcttgtcacccaggctggagtgcagtggcatggtctcggctcactgcaacctctgcctcccgggttcaagcgattctcctgtctcagcctcccgagtagctggaactaaaggcacctgccaccacacctggccaattttttgtatttttagtagactcggggtttcaccatgttggccaggctggtctccaactcctgacctcaggtgatccgctcccctcagcctcccaaagtgctgggattacagacgtgagccattgtgtctggccatccagatttattcttagttaccaaattgaattactttctttagaataaggctttatctagttagatacttggcatttatgctatggccattcatttttcttgcaacacatcttgttgtgtagctggtcctgtgttagactgaggagacagctgtcgcctgtgcctgttgggagcttactgtctggtggaagatagagccaaatacagagtagtaactaaacagcgagatagatgcagtgtggaaggggcctcaggaaataggattgttaagtagagggcatggcacctgcaaaggttcagaggccaaagagagcttaaagccttccaagaattgaaagcagctgcagtcggaggcgaggcatggcaagagctgccgatggagatccaagcaggggaaaggcatgttctttctcccagaagaggagtgtgggttttctcctgagggcagtgccctggccatattacagagagtgaattgaagggaggtgagattggaggtaggaagaacagttgacaggcttttatcgtaattgaagtgagagaaatggcagcttaaactagttcatggatagattcaacagagattgagctgggaggaagaataaatgggatttggagagtgaccgaacgtgagaagctaagaagctgaatgaatcaagaacctgctcagtttctggaatgagtgatgaggtgaatggtggtgccactgagatggagaagatcagaggtttgcgagtaaggtggaggagagttcattagactatgctatgaatgtatggtctgtcctattaataactagaatgtaagttaaatgagagcaaggtctttgttttcccagcaccgaaaacacacatgtgcaagcatgcacacacagtaaacagccagaatgttgagtttggggtacctgtggaaaagctcagtaggagttgaaatatgggctcagcatttaggagcatgagacatgagggaataggtaatttcgctgagacacagattggaagtggacttgctgtgagaacagatttatgagctactgagtgatctgctggctgtgttattttcagcctgttgtctcatatgtaatcattgctgtcaagtcacttgtgacaggttggtgaggatttcagggatgtggtaatatttctcagtgagctcacctggagtgctttttccaactacacctgtctttagccttctgatgttctccacccccgtttatcacatagcgctatacgtagtgacttccagctttttcaggcacagaggtttcttgttaatatcttttttgttgttaaagtttttcatgtccatacctgcttgtagtcattgcacctctagtatccctagcctgagaaaactgtgctcctaggtttggtggacccaggggctcccgtggagaactcagggcaggtccttaggagaacgtccagtgcctgctctggctgctggttcaccactcagtacacatcaggtgttgctgcttgtcttaccagaatacggggatcttctcctggcccctttccacatcctctgtgatggatgctttgcatatgttatctagtttttagtcatcacagcagcccttgcactatccccattttatagatggaaatactgagcttagagcataggaattggtcagaggcagtggcagagccaaaccctcttccatttgtctgtgtctgtcaaagtgtggaatcaaaggacctgattgcagctgagcaggtgacatgagatggtgcatgctggttgagtttctaaacctttaagctcccgggaagaaggtttgtctacataattggaggcatgtgtctctctggtctcttactggcaggttctgattggaactgattccatcccgaacctgcataagctggagcaggtgtccagtgatgagggcattgggaccttggcagagaacctgctggaagccctgcgggaacaccctgacgtaaacaagaagattgacgcagcccgcagggagacccgggcagagaagaagcgcatggccatggcaatgaggcagaaggccctgggcaccctgggcatgacggtaaagctaccacctagagtccccatatttctgcccacactgttgatgaggaggtggccatgggacagccctggggttggccatggggaaagagaaggctggacagagtaggaggaaggaactaggtgtgttcggccctctcagaggtggaactactatcgttctatcatacagatgagactcggagtaagtgacttacgaagtttaccaaaacagtaaaccagtgataatagccattaagtttattgaggacttatttaagccctcaagtagttctaggaggttgatattgttatacccattttccagatgaagtaactgaaactgagaggtgaagtaaataggccaaggcacataactaataagtggttgacacaaagggttctgtgctcttctaactgtcccaccttggaggaagcagagtcctacaagctccttttccaaagcacagacttgagtgtcagcagttgaaaagctcacctgggaacagtgaatgaatcatagtgcaacaacccttggaagctgagacttggcattgctggcacgaagatgctggcatgaagaaagggggcttttctgatggcaggtggcaccttgccagggctccagctggatgacttcctttgcttcagtggttcctgtaggaagagagaatagcagaagggcctgggtctttatccttattagaagacagctcaagggctttcctctcatgcacctgtccttttagtggaggtagaaggttagccctgttcctgagcatctccaagctagggtgggagagggtgtgtggaaatccccttgacatgccaccggggttcccctacagacaaatgaaaagggccaggtcgtgaccaagacagcactcctgaagcagatggaagagctgatcgaggagcctggcctcacgtgctgcatctgcagggagggatacaagttccaggtacagctgctgggcctacggtcggtcctgagggcccagcctgaccccttgttctaggtagcatccccctcctccaggccattttgttcttagctaggcaagatcaaggcctgcatcttaggagattaacaaaaggaccagctgtcctctttagaggcaggaaggcgagctcatccgaactttagactttgttatctttatcatcatcatgacaaatgctgctcattggattcttcctatatgtgaggcctcatgctcagagctttgtgtaaactggataattttatttaaacctgtaaaaagtctcaacttgtggttaagcaaacaaaggtcacatggcagagccagaattccagcctaggcttctcagactccagacctgggcttttaaaaacataccatgctgcctccattcagggtaactggggagaaaatcagaactttctaggcttatccaaactagattccacctgaaaggagcagagcagccagtgacctgctggctctcctgaaggctcaaaggtggcctcttctttccagctggaacttactgcttagaatacaggctgtgaaagggcaggtgcctgggccacagggctcgttagtcctgcgtaatgcaggctcttcagagctgcccagcaggttttgaaaagcaagggaatatcaagaagtcacttctgcattttcagacagatgaagcacaaagtaaagaaagatggccgaggcttgcttatgtgtatgcctctgcatctgcaccgcatccccttcttgctggttgctcccataatccttgtttcactagggctgcggccagccaagtgcttcaccaacagactgaggggctggccttacctgctcttctgaacttccctagtgagagcaacctgaaacccaaggcattgcccaagaagggcggcagttcccctctattctgcttctcctgagcctgacttggagtttctcctcccctctccttatgttgtcgtctttgcagcccacaaaggtcctgggcatttataccttcacgaagcgggtagccttggaggagatggagaataagccccggaaacagcagggctacagcaccgtgtcccacttcaacattgtgcactacgactgccatctggctgccgtcaggtaggccctggctcttgcggaatggctccttcagtaggcctgcctgtgggcctggagcgggtgggactgccatcctcgtggttttaaatctgctccttagtctctggagagtagggtgttctgcctgacaccatataggtccccaagcagttatttgaatgataggaaaatatgctttggcctgggcccaaggctagtgagaacagccctgcctacctgagtcagcaaagccagtgtgtaccacattgaggctacaaatagcaaattctcttcgcagggtcaggagcctgggccgactgacttcttagtgttggcatgcccccacccccacccccgcccccccgcccaggtgcctggttgccacgttaatgccagcagtcgcttgtccctgctctcctccctatccaggttggctcgaggccgggaagagtgggagagtgccgccctgcagaatgccaacaccaagtgcaacgggctccttccggtctggggacctcatgtccctgaatcagcttttgccacttgcttggcaaggtgagtgttgagtatttttcatggtggaatggaggggatttgcaggggatgggacaagacccgctatcagcccaatcccctggtgacaccatttcctgttaccttccttgggaatccatgtctgtctgcttgctgactggggagctgtccagagcatacagggtgggggatggaggcttactcaaggggtgacctgacatggcccaccacagggtgggaggaaccagcacccttagcttccagggtaccagatgaaatttctgggtcttcactattcctttgctgatcttatgacagaagatgtggggccaacttggtccttgaggccagaatttctgagttcacttctacagtgtgtggctctgaggtttaaatacgaaagtggcttagtggcaggggggatgttgggctccttagaaggccttcctggtcctaaaaacccagataagaatagctaaagcatctgtgaggtcctcatgtcttgctgatgccttgtggagtggtgccccaccccaagtcctatttcaaagctcagggataaaaagatgcctgtcataaaacaggcagctggcagtgacaatggagagcatgttgaaatgcttaacctctattcttttgttttgagacagggttttgctcttgtcacccaggctggagtgcagtggcgtgatcttggctcactgcagcctccgcctcccaggttaaagcgattctcccgcctcagcctcccaagtagctggaattacaggtgcctgccaccatgcccagctaatttttgtatttttagtagagacggggttttgccatgttggccaggctggtctggaactcctgacctcaggtgatccacctgcctcggcctctcaaagtgctgggattacacgtgtgagccactgtgcccggccaggcatgtattcttgtatacattgtacagatgagatgcagagtttgagcaacttgctcgaggtcacccagttaataagaggcacagcccagatagatgggaatgtgtattgacataggaaaaacaaaagcaaaaacaaaaaacccttttatttggagattgaagagctcattcttatggacaggtcactttgtcagtcagaatggatgagttctacattgcttcctccaaaatgtactccacatgcagccacggtatgtcctacaacattagttcattaagaaatgggcgcccaagagtggtgggctctcatcaaaacttggcgagtgtcacgttcagtcactgcagaaatgaaaacgtcctatggccttgtcgtcctgctggccccagccttggcctcaactttcccttgtattcttgtctccgtttgcaaacctttgcagccatcaggcctgggagtactggaaggaggctctgtctcccaaactgggttttcaccaggaactcacttccatttcattgtttgttctgcttccctctagacacaacacttacctccaggaatgtacaggccagcgggagcccacgtatcagctcaacatccatgacatcaaactgctcttcctgcgcttcgccatggagcagtcgttcagcgcagacactggcgggggcggccgggagagcaacatccacctgatcccgtacatcattcacactgtgctttacgtcctgaacacgtcagtaccctgtgtcccaggggcggcatctcgcagacccaccctgcatccctctgcccgagatcccctcagctttttcatagcctctcatgctagttccggagcaagcgtctggcctaaggcagcctttttgccgaggtggggatgctcatctgcattcttttagggccatgcagaaaaagcaataaagggaacttccttcccccaaactgccctgtctcccaccatgggcagcccaagaccgcatccttggactgacgttcagctcacaggggagcaggaagtgggaaaagtcaggccactgaagcctctacttcgatgcagcggctacttctactttccagactgttctcttgaatggggggaggccacaggtcggagctgtgcccacatcattagtcaagggcatatagattgttacaggtgatggtttcccatcaaggggatgcagcagagctgaggacccagttcataaatggaaaactggatttgttatccctgttttctctacagtgggtaatgcttctggcaagtgtgaagggaaagggaatgttcaagattatctgggaaagtcaaccgacaaggaaggcagccaggaaaaaaaagagattggtagttttatccatatgcacattatgggacagttaggttggtacctggaagtgtaattttaaagaagcacttaggccaggcacggtggctcacgcctgtcatcccagcacttgggaggccaaggtaagaggattgcttgagcccagcctaagcaacatagcaagactctgtcttaatgaaaaaaacaattgttttaaattagccaggctcacacctgtagtcccagctattcgggagactgaggtgagaggatggcttgagccaaggaggttgaggctgcagtgagtcgtgatcacaccactgcactccagcctgtgtgacagagcaagaccatgtctcaaagaaaaaaaaattaggagattgactatcctttagctcttccatttaattcactgtttcatgcttgtaggccccatctcctagcaagaggcttacggttccctgttgaaaggttgtgtacagctcaccccgggtagctgcagcacagtttaggcaacaggacaatctgtctcttgtcttttctagttctttctcttcaacaatgttatcttttccttccctcccatttccttgtgagttaaaaggctgacctcgagaccacaggcttcattgttaaaacacgcaggggcaggttgacatcagagtgcattacatcatctgctgaactgcttagactggcgggagcagcacctggcagcactgatggcgcagaccttcccactgtccaaatttcgctccttctcagtgttcctggggccctggacagagccctgggtgactaggtgtcagtatgtttctgaacaagccagacatttgtaattgtcaggtcccttcattggaaagggaattggctgtctcacagtttctttggtcagccagaggctgacccagaagcttcacagagaggccttgcttctcggcccagactgcttcccagtcgacagctatccaattgacattggtgggagcttggtcacagtggggctgagtgcctttggtggaatatttgtttatggaggcaagtatgtcacagcatggccaccgtaagccagaccagagcctgagcagatcctgcagcagccaacagcctcagattccctacagggctggaagatcaagttgaatgtatccatccatgcccatctgcaggcagcagaagcaggcagggtgtccttgcaccctctcctcctgctttcccagagtccagcatctgtgccagtgccacctatagacctggtaacttttttttcccggttctagtgttgtgtttgtccccacctctccctaccagtgccccatggagttaggatagggcatcaagcattcatggcatgagagcaccattcaggatctaaggagagagtgtacccagaagcgtgtcatcaggaaggacttaagtcacctctcagtgctgattccgtgaccttttgtcaaagcttcagcgtggagaaggaggtagggttaagatggacaggctacctggcttcagaacacagttttttccacgatgtgagacttgggcagaatccttacctcctctgtactgcagttttctgtttctttaaaattgggatagtggtggcactatcccatagcattcttgtgagtactaagtgaaataatcccgtaaagcacttagagcagtgcctggcactgagtctggtgtggtcatcatcatcatcatcattgcaacttaggacgcatgaggacaagaagcagcgctcatctggaagaggctgttctaacgaaggcgggaggatcctagatcagaagaagacaaaccggaagagggagcctaggaaaggaaccacatgcacatttagtgcaaaccatgtaaacataacataacaagactatgtggagcaagggggagtcaggctgtggacccaccagggaatcttgattcatgtttttggccccatcactcactagcttgctgactttgggcaagtcacttcacttttctgggcctctggagttactagcacagttccatgttggggagattgtgaacgtccctgatatatggtgctcaggaaccagtagttgcttggaattgtattagagctggggtaggagctagacatggggccagggaagaagggaagatgccgcgaagaagggcctggaaggggacgaagggcgtggattatcagaggaagtgggagtagtcggcaaggatgggtggggagtgttgagtcatccaagcgttcagcaaatgtcacaagacaacgacaaattgagcaaattcttcctgctcttgctgccgggtcctgcttccaccctgcttttattttatcatgccgcttttcttctagaacccgagcaacttcccgagaagagaagaacctccaaggctttctggaacagcccaaggagaagtgggtggagagtgcctttgaagtggacgggccctactatttcacagtcttggcccttcacatcctgccccctgagcagtggagagccacacgtgtggaaatcttgcggaggctgttggtgacctcgcaggctcgggcagtggctccaggtggagccaccaggtcagtacctgcttccggaagctgctgctcactatttcccatcatcagttttgaaaagctgcttagtggtacgcacgtgctaggtgaaggcatgctttgtgactgcggtggttgacaccagcccttctcccttctcagtctgtcatgtcaagagtctaagctgatggctggcaggttgcctggtcatttctgggttttctgttccgctactagaaaggtagagccagtcttacctactgtagaaaatgttaggaaggcagccaggcacagggtgataaaaccaatgagatgatcagggctaagaacagtaatcaggttttccacatcttgctggtgttggcataagccaggaaagtttcagtgtggccacatggggtattttctaataattaaaaactcgtcttcattctctcttcttggttacattcctatcccatgcgtcccacattccatgaacctttcttcctctagaccactctcctatacgtgtggacacctccccaagaaagagcatgtcagaaaggaagtggtctttgatttatgaccttgggctgtgatttgggacagatggtctcaagagaaacagctggaaactgccaccacagcatctctttgaggacccccatggattgctgtgcgcagaggagaccccatgggtaccactcaggctgccaatggccccacacagtctctacctttcctggggagctacggagcaggctctgggtttggcattttgcttctgtccctcgagtgaaatgtgcctctgcttcatttctggaagatcgggtttgtgatttttgtgattctgctttagcccaggattcgagggatcatgtccacatttgtaggccatccagggagcagagagaaacttttagggccgtgataaagacaagccaagtggaaaatagcctgtgccctcattggcacacctggtgtctttatttccattagccctgattgatcaagcgttgctggtctgtgggcacttcacgctcccagagagaccagattggagctgtcctgttgaatctggcctgtaccagatcatcactggagagtgggagggggcgtcttgttagattcctaggtaacccctgcccccattcctaacatatcactttccagtatttcccaagagcctgaattaatagttaactagctgctggaaatcaaaagttagatcttgagaatactaagttgataagtcaggcttggccagtatccatatgctgcatccacagcaaatagagtggccatttattgggcacagtctctccatggcgggtgtgcaatctgaacccacaggagctgttttgctctcacttaggagactagcattcattattgtcccaggcagttcaggaaaagctgatttggtcacagcttaattaggaaatccagtgtgagctactacattcatgagttgctgttttctctgtagcagtttcgtcacctttactaattggccttaaataattaagttgggcagggtcactcaggatttctgcttaccaaagcacaacagccacagcaaagggccaaatacggccgtggtccggggccgtgagcccggcactcatcaggcagactaggaaaggcactgtgggttagcccgatactgggaggagacccatgggggagagaccgcggctggaagggcgtgtagagatatcatcctgatgctggggcagcctcactggcggcaggctttgtcctaagtcctgtaagtcatggggtaaggggtagtagcagagacacagaaatgtagctcagcagaagctggcctcttctgcacacttgacattcagaaaaaaagttcctctgccaggaacttgcaagtacaaagcctgggacattctcaggcgtctgtcagaacttgatctgttatcttgtctgccagggtaaagagctgcagagaaatggattcttgtcctcatccacgggtccaccttccaggactttaggctgcagcatcatcacacgtatgcgggagagaaagtgggggcttgggaaggtactggggcagagggaggccacaggaagcatatttcagtagagagggaattgtccccatttaatattatttgttttttgcgagttatttattgaatgcaggtgtggatagcctgtctcatgctaggcagccccttcacttgaggcccatatagttttagcttctataatgaataccatctatgtttcttatttttatgattcttatatatacccatgcattttaatactaaacattttaatatatgtccctttagtcatgggatgtgttccagtgtgttttgaggtgtagaatactctgtgacaagggctcacctaggctttacttattacagatgtgatggctgttggcaaacaaaacctccgtagagcttgggtggtagaaactgaatcctgacactgatatttcactgtctgtgccgaggggagcctgatatttctgtgtttcatactggctctacctggtgtaatcattcctcaaacctcaaaccaagaattctgctgagaaggcagtggacattgttagaggcagtctccccctgcctgtcgctccccatattccaaggaactggctggtctttaatcctgaactgaatcattggattaagtagcaacgatactggttagaaacaatggggtgtggtgagcaacttggattatcccaggatttaggtgatgtcagggtggctgcatgctccatcttagacattaccattgcttgataccaacttcctagcagcttgctgccatttaacacagcacatgtttgacaagttaccgtgtttgactggtttaggtctgctggcttttaagaaatttctcctagtgggaatgtaaagactgaattaaaaccttgtttcctacctcatttattaggttccatcaaattccaagagcttgtcggggcccaaacacaagggatacataggaatcctttgcctttctttaagtcactagccttgcatttgccacgtctgccctggcgatgtctcccccggttccattttaccctgatctggaagatgagcactgagagaatcagatgaatttcatggagcatttttgtaaccaataaacttctgggtcccagggctccagaggttcttgcccacagctgcttttttccaagcagaaggctagtcgctggaactccgagatgcatacaccactgtgactcttcccttgctcccagcatgccttgctctgtccttgtgagtatcctcctagggacttcatgtgatggaactggattttcttttccaggctgacagataaggcagtgaaggactattccgcttaccgttcttcccttctcttttgggccctcgtcgatctcatttacaacatgtttaaggtaaggaggctgtcagaggcccagtgggttttggcaagagtgtaaaatgtctgcactcctgtccctgactctgcctcagcacccacatggctgctcctccgctgggcctgggggcgcttttttcctagaaacaaacaaccccaactgtgggagggattgacactggcagcctggagccttgtgtctgtgaggtacatttgttttgtttggttttgtttggtttggtttggtttggtttttttgagacggagttttgttcttgttgcccaggctggagtgcaatggcgtgatctcggctcactgcaacctctgcatcccgggttcaagtgattctcctgcctcagcctcccaagtagctgggattacaggcaggcaccaccacgcccggctaattttgtttttttagtagagatgaggtttaaccatgttggtcaggctggtctgaaactcctgacctcaggtgatccgcctgccttggcctcccaaagtgctgctattacaggcatgggccactgtgcctggcccacatttgtagctgagatcactcctgtcacctgctcccgagcctgctccagactcggctgtgcaggaagaccttccccgccgggtctctctttgctgctcttgccgtgctattgggataagctctgttgccctgagtgagtctgacttaccgcagccagcttataacaggacactcctctccggagagaatctgagtttttgagttggttcctttcatcatcggaatgagacagctcatggaagcacattgacaagtccctttgctctggggaatgcgaatgggaagtgtacggggagggaatgcagccacttgttggagcctgtagcttcaggtgacacagtgcctaataaggagggcctaagaggaatgaagtgaaattgtgtcgttcctggagacaaaacgcacgctctagggtgcctgttggtatgctttggtgtaggttgggagggctgtcctttgaggggttgaaatggcctgactgacttgaggcggaagatgaggcagcagtaagtcacccacctctcttgtctcctgttgattctcgtagaaggtgcctaccagtaacacagagggaggctggtcctgctctctcgctgagtacatccgccacaacgacatgcccatctacgaagctgccgacaaagccctgaaaaccttccaggaggagttcatgccagtggagaccttctcagagttcctcgatgtggccggttagtgtcaaggttttctcttttaaagatcctccgcagcaaagccccatgtcttcctccgtgggtcatccgtagctttatcttcacgaccagaggaaacgcagtatgaaccagcctgtcagctgccactgaaagccctgggaaagatgcgtaaatagcaagtcaccgataacgagaacagcagctctaacatgtactgagcaccccctctttccccgacatgggctgttcactgtatgtgatctcagccctcgaggcagccctatatgaggcaggagctttggttatccccattttatagatggggtaaatgaggctctgaagatcaaataagtggccaagggaacatagctagaaagtgatagcatccctgtttgagtctgttttttaatggcagttcagagaattaacatgcaaattggaatgcccctgtcttcctcctgcgtcttaggtcacagttgaccccagggaggcatgggcgacccagcagggccgctctgaactgtgggtgtgggagacgtggtcagacaattccttatcctactgctagtaaaattgaaattctttgtgtaacaaatttgtcattctaattgcaaacaaacacattagaattggtttgtatttcataaccaagcaccaagtgacagcagggggaggtgacttggcccgtgcctgggaaatccacctagggttaaaagacagtgccctgtgaggttgtgggcgccgcggcattacagcccccatcagagcacccgccctacaaaggtcagctccccagagccaacgcacaggtaaccaaacctgccagctcttttttatgatcttgtttcatttttttatggcattcgttgtgggaattttgtaaagtataaagaagcaggaaaacaaactccccccagatcccactgttaggagaacgcctctgctaacattttctctatcttgttatcctctgggaatgagacccactaaagggctagagtgttgctcagtgtgaattcctctttcttcccagctcagagccagctgaccgattttcccaaacagctctgtgcctccgcattggctgccccttgcagtgtcctcagcggaagctctgtgctgggatggtcttcgtcgacctggtgcctgcctccgcgtctgggcgggcctgtgctaacactgctcacctctgtgtgtttgttaactccaccacctctttacggctcccactggctctgtttcagcctagatgtttcaccagcatcataccttagcacatgcctcgcgttcttcccagaaagtcagccctgggaccaggtgggctggtaaagtcctcagtgctgggccctgtgcctgttgcatgagcctgtgtcactgtgactgtggaagttggagctagtgagaggaggaggaggtgggcagaggaaggagggtcccttgggctcgagctccacatcagccctgagctgctggcaagcacccctggcctgcagccagggagagccagagcctttgccaggcagcgagcctccgtgccttccactcctaggtcaggttttgacagcaccactttattactttgtttaagctgttagaaaatttcagaacatcagacacaccctattcaaatgtgagaacaaaaacaccttccagcagtgcctgcttctggaacaggactcctcctgcggaacagggttttgctcaatgactacctccccggtcatgctgctgtccagtgagcagccgggccagagcttgtcggaccgcagtgtgttctctgctagatgcggcagctgtgactcagggggaatgggggctgtatgcctgctcctgacacacctctgcccgttgtgctttgcaggtcttttatcagaaatcaccgatccagagagcttcctgaaggacctgttgaactcagtcccctgaccaccacacagcagctgcggcggcgaagacgaagctggcttgccttccaccctctgttctccctccttgtgcattaagttccctccgcgggatgctgcattgttaccccgccctcccctctctcatttttcttggtgtggcttggggtttttaggcttcctgttttatctcgtgtgtgtggtgcaccagctatgaggttgtctgtaacccaagccatcaaagggcctgtacatacctaggagccatgagttgtcccggccagcttcatacttgagtgtgcacatcttgagaaataaacaagtgacttaacacacattgaaaaggaa

SEQ ID NO: 44 - DNA, 25674 bp, Homo sapiens
ctggacgagtccgagcgcgtcacctcctcacgctgcggctgtcgcccgtgtcccgccggcccgttccgtgtcgccccgcagtgctgcggccgccgcggcaccatggctgtgtttgtcgtgctcctggcgttggtggcgggtgaggagccgggggccggcaggacgtgcctggggaggtcctgcgccgcggggcttgggggtcgggggcggccgcgggcgagtagctgcgaggcaggtgccgcagtgcggtccgtcagcggcggcctcgcctcagccgcgtccccgtcagcatcttctctggatcggccgtggcggcgcggcctcacgggccgccggggccggggctgggctgcgtagggggcccctgagcctgcctccaccctccactttgagggcggcgcgtccggccggcttcttgcgcctgaaaaggcccttcagagtacggagatgcatttctcagtgaactgggattgagtcgcagcccgctgcgaagaagagaaggcagactttttagctgccactggctgccacgatgtttttgcatttgtatggtgccttcatttctagtggttgtcatcagtaattgctgaaatccctgcccctcccttcccttatgtatatttccggatgcaaaagttgagatggagtcattatttttatatgacttatatttcttaaggcgaatacaaagcacctctcaatagtttgtcagagttccaaattttaaggatttggaaacaggatgtgagtcgcatttttagggtcacatgtcaataaatggtagctttctgagtagaacctagattcctaagcattcagcaagaggtgaagaaatcagctaatacgtggcctcttactgcatatcatgtggtaatgtatttcatttgacagcagtccttagagggcatcatctttgttttgcagggtgatcaacctaaataaattacccaacactaaacaggttgggtgctggatttgatttcagatgaggtggtgccagcgcatcggccttttccattatatatgttgtgttgcacaagtaacgctattactgtgtgagaatgtgggagtgatggggactgagactggaggcacagacagtagtgaacaagaggccaagttgagaacggcttggaggaatgggtgctctgatctcagtgtgtcagtttaaaacctatgggaggccgggcgcggtggttcacgcctgtaatcccggcactttgggaggccgaagcaggcagatcacctgaggtcaggagtttgagaccagcctggccaacaaggcaaaacgccatctctactgcaaatataaaaattagccgggtgtgttggggcacacctgtaatcccagctactcaggaggctgaggtacgagaatcgcttgagcccgggaggcggaggttgcagtgagccgagatcgcgccattgcactccagcctgggcgatagagccagaccttgtctcagaagcaaaaacaaacatacaaacaaaccaaaaacctatgtgaggtgttgggaggtcctgcttgtggaatggcgatttaattctgcaccagtatgctcttgaaatctgcagatctctgtccctagaggtgcgggggttttgtgtgttaatgatagttacgttgtatccatgccccaaacgttttcgagttctttgtttctttcttctgtttctggctctggaaaggtctttctgatctactgagatactttgagggaattaattttaattcagtttttgaaattttaaaaatattccctttgatcctgtggtttaactgaacatctattgagattccatgttttaatattttgactgatattattttgattcagtgaggtataggcttttttgttttgggtctgagataaaataattgcttctgcacatggtttgaacatgttttccttactagcatagccgagttcatacagaacaagaacctgatcctgtcagcttctgaattgctcagtcttgtcagatgaggttcagttattattttccacaatgactaaatgtgatgtagtggaaaacatctttaagagctctgacttctctattccaggcagaaacaaaaatagaaatcctttaaaacagtgttgccaaactagagggagaactagggacctagagagagaggaagggaactaggattttgaataccatatcatgaggcgtatttgataaaattcagatatttagcctggagaagaaaggccaagggtgaacacatggaatttgaagtgatgtcatgtagaagagggagataggatccatttttttattattattgattccatccaccattcgtagacgataatagcacagtatagtggagttcctagagggaaggacacttagcccagactggggaggctgaggaaaatttcccatgggaggtgcctcccagggctaatgtgttgaaaagttggggtgggaagaaaaggtatttgaaacagaacagcatgtgtaaaagcatggcgatgtgagagcaaaggggcaagtagtttggtggggctgaaatgtacaggattaagttggggagataccagaaataaggctgatgaggtttcttgggtgttaatgctttgggttttgcctcagagtctctgggcagtgagagaaggcatttaagcagaagggtgaatgatcagatctgtattttgaagcagttatgggaaaggctggattagagagtggcatgacaagggtcataaggcacccaattctagcaaacctggagagggcctgaagagtgtgccctggacatagaggggaaaggatttgtgagataagaaaaaaagatgaaattcagtggctaattagctgtgttgctgaggaagatttaaagacgactgattccagccactgggtggaaggaaggtggtatcatccttcaagatagaatacaggagaagtgtgtggaaagatggtgaattgggtgtgtttttggtgtttgcagccttaggagtagttgggctcagcctgggagagatgtagaataggaaagcagtaagagtcaagaatggagccctcagatctccaaagtggagtatgctaggtgatccatttggatgccagatgaatgtactagaaattccatttatatcctttttgtttttgtttttgagacagggtctcactccgtcacccaggctggagtgcactggtgtgatcacagctcactgcagcctcgaccacccaggctcaagcgattctcccacctcagcctccctagtagctgggaccacaggcgcatgccaccatacccagctaattttttgtttgtttttgtagagatgaggtctcaaactcttgggctcaagtgatcctcctcctcagcctcccaaagtgctgggattacacgcaggtgtgagccatcgcacccagcctctatctttttttttttttttttccttttttgagacagagtcttgctctgtcacccaggctgaagtgcagtggcacgatctcggctcactacaacctccgcctctggggttcaagtgattcttgtccctcagcctcccaagtagctgggactactcttgttgcccaggctggaatgcaatggcatgatcttggctcactgcaagctccaccttccgggttcaagtgattctcctgcctcagtctcccgagtagctaggattacaggcatgcaccaccatgcctggctaattttgtatttttttagtggagacggggtttctccatgttggtcaggctggtcttgaactcccaacctcaggtgctctgcctcttgagtagctgggactacaggcatgcaccaccacatctgtctaacttgtgtatttttttggtagagacggggtttcactatgttcaccagactggtctcaaactcctgacctcaaatgatctgcctgcctcagcctctgaaagtgctgggattacaggcatgagccaccacacctggcctcatttttgtatttttagtagagatgaggtttcgccattatggccaggctggtcttgaactcttggcctcaagtgatccgcctgtcttggcctcccaaagtgctgggattacaggtgtgagccatcatgcctggcctatttttatcttatctctttttgaataataatggtcaggtattttgtagactgtccctcaatttgggtttatctgatgttttctcattattagattgggaaaaatactacacaggtatctcatccttttaaaaacttttatttttgtatgctttgtaatatagcacaaatcaaatacataatctattactatagtagaagtatatactttacatggagaggatgagagggacagagagaagaaagaagggctactttccaattttgggctgacagggttgaaatctaaaaagtttggctaccactgctttaaaggacaggaagggaaagaaacagaggagaagcagccaaagggattgcaaggaaaaccaggagccgtggctgcatgaagaccaaagcaggggcttttcaaggagggagttgccagtatcaaatgctttgggaagttagataaaattaagggatggaaattgccttttgagtttggggagtcgtttcagtggcatggtgggcttggaaggtgtgggcggccaggtggggtggctcacgcctgtaatcccagcactttgggaggccgaggcaggcggattgtttgaggtcaggagttcgagaccagtctggccaacgtagtgaaaccctgtctctaccaaaaaaatacacaagttagccagacgtggtggtgcgtgcctgtagtcccagccactcaggagtctgaggcaggagaatctcttgaacctgggaggtggaggttgcggtgagctgagatccttaccactgcactccaacctgggtgacagcaagaccctgtctcaaaaaataaaaataaaaaaaatttttaaaattttgtgggttaagtagtaaacttaaaatgaagtatagaagcaaacggtggttgactgctcttcctggattcttcctctgaaggggagcaaggctggtagctggtggagactggtaggaccaaaggaggttttttatggttttagttatagaatgggagtgccttgagcgtatttttatgctgaagtgaaagggccagtggagagggaaaaaactggtggtttgaagtgtgacttcattcattcattaactcaacaagtacttattgagcaccaatgtgtcgggctctgttctcagccctggggatagtgtgtgaacaagacgcactgaaatccccgccttcatggagcttgtattctatagggccatcttttgatggctattaccatatagccacctcactcctgatgtgttgtctgtcctagaagagtggcttccttaacaaacagtgaaggaacaaaggtccctaaaaagactgaacacaggattgtcttagtctggaggagggacatccctgccctcatgtctggagggagaggagttacagataggggcttatgcagataaatttgtggtggggagaggaagcaggtagctcaagaaattcctctgttttctctgtgaagctggagatgaggttatctggtgagactgagttggggagtgatagcataggaagttgaaagttaggaagcccatttcagttcagtacaaggaaaaacttttcaaaggactagaatgttaggaaaatggagccagttgctggcaaatgtagttcgtatattgaggtggtgtccccatcactggtagtattgaaatagaggaggggtgactttctgccaggtatccctgagacatgcttatacttataataagcagaagtttggacaaatgaccttcctctgtataggagtccctgactctaaggttttctaaagctctgggcttctgaaggactgttgtacaggcatggaagttgaaactacgaagctggggcaaagttatttggtataggtttgccagaattgaatgagtagggccgtgtctcaaaacaagggtatctccaaatcaaaatatggttttttaaatgtgtatggtacctggggctgggcgcggtggctcacgcctgtaatcccagcacatagggaggctgaggcgggccgatcacttgaggtcaggagtttgagaccagcttggctaacatggtgtcaccctgtctctactgaaaatacaaaatttagccaggcatggtggcacacacctgtaatcccagctacttgggaggctgaggcaggagaattgcttgaacctggcaggcagaggttgcagtgagccaatattgtgccactgcactccagcctaggcgacagtgtgagactctgtctcaaaacaaacaaacaaaatatgtgtatggttcttgggaagcataggtctcttggttccccatttttcttagtgtttgcagtactactactttagtgaaccaagatatctatcagttacaaaagaccattccattctgctaatttttttggtctgtcttcagctagagcagtttggacattcctgttctgacagctgtgccggattgaaatttgtaactcccgtgtatcagcaccaacctgaagccttttatttactgtcaatactgcaacaccaaaacatttactgttgcttccaactttatttccatcccctgttagtggtactttccttaggtcaagagaataacactgattctttactaaagtctaattttcccatactaggtgtggctaacatttgttctagacttggagcccatttttttaataggaaccccaaattaaaaaatcagccaggcatgatggcatgcatctgtagtcctagctactcagaaggctgaggcaggaggctgaggcaggaagatcacttgggccctggagtttgaggctgcagtgagtcatgcagactcaaactcagcttgggtgacatagccagaccctgtctctaaaaaaataactaggtacaaatttcatccttaaatgtaaacaaccaatcgtgttcactttggttgcccaaagactacaaaaagctcaggggctctgcccttaggcctggcagtgaagcagttcccaggcagagtttctgttttcaagggtgctcaggatttggagaaaagttcctttcagtaactgaaattagctacttgtccctgtgtaagctagacatcacgaggttaatagataatggatgaagaggccaaatacctcatccttagctgtggagagcttataaaatagtccctttattctcatctttatcttttaatcctgaatccttagactagttgactttatcattacagaataccttttcttaccctcttgacatgtcaactacaaatactgtttcctggactttgtttctaaagtctgaagtgtttttatgtttctacttgtgacatgtatgcccccccccccccccaacatttgacagtccttatttcactagggttgcctatgggacataaggaaagatgttacctatcctaagacatagtaacctggtaaaatcttatagtgaaataataggaactttatgaatttgcattgtgtagaaaggattgatggtagaaataatttagagatttcaagcttcttcctttttagtctgtgcctgggctttgttttttgttttttaaattttggagatatgccactgatttctaattcctgccaaattgccacatgcctctttaagagccatcagtaggaaggtgtctatatcattaggaaaccctgttttgtagttgtacctttgttgatctctttttgagacttttgtttgtttcttgttcttatcaggcagaccctgaaccagaataggttcagagaggctctgatagttgtacttttgttccagcagaatgtgtggacttaaattcttagagtgatactttgaaaaagaatttgttattgtttaggactcagcattttgaccagtcataatttaatacgctaagtcagtggtgaatggggaaacatgtattatatttaataattgtcaaggtaaatgatttatgatgttgataattcatttactgatctgttttcttttcaggtgttttggggaacgagtttagtatattaaaatcaccagggtctgttgttttccgaaatggaaattggcctataccaggagagcggatcccagacgtggctgcattgtccatgggcttctctgtgaaagaagtatgtatatattttttaaatgtttggagctgcttttaagaacatttttactgatttctgctaatagcccaaaaaagcatcaaacgaacgtaggtacgtttggtacagattacaaaagttaaaaagctcatctggaccaggcacagtggctcacgcctgtaatcccggcactctgggaggccgaggtgggaggctcagttgaacccaggaatttgagaccaacctgggcaacatagtgagactcccatctcaaaaataaatgaattaattttttaaaaacccatttgtagttgggaagattttggatgagtgcttcaagcttggcttctgaaacaaatcattagaaatcattaactatataattatttattcatagtagtgaaattctttgtatattagagaatgcatctgtcctactcttaataggatatctactttctggttttttttttttagtataggcgatagattcactatgaatgataaaatatatatgcattatgcctgaggttaggaaaataatgtggtcagtagccatggggcagccaaggaccttggtttcctagaatggagctatgacctgttgtagtaattggctgcttatgtgattgtagggggcgggagggtctagatccagtcaatgtgagagatcgaaaggtaagggctcagaagaaaggaaatacagcttgctcggtgctatcatctccttctctttgtaagtctggtgcttttgatgtggtctctagatatatatcatcagtcactgaaaggaacttttctccaaatcctgagcacccttgaaaacagaaactctacctgggaactgcttcactgccaggcctaagggcagagcccctgagctttttgtagtctttgggcaaccaaagtgaacaggattggttgtttacatttaaggatgaaatttgtacctagttatttttttagagacagggtctggctgtgtcacccaagctgagtttgagtctgcatgactcactgcagcctcaaactccagggcccaagtgatcttcctgcctcagcctcctgcctcagccttctgagtagctaggactacagatgcatgccatcacgcctagctgattttttaattttttgtagagacagggtctcgctatgttgtccaggctggtaggtctttaactcctggcctcaagcaatcctttctgcgtcagcctcccaaagtgctgggattacaggcacgagccaccacacccagcctgtacctaattctttttttgttttgttttgttttgttttttgctacagggtcccgctctatcacccaagctagagtgcagtggcctgatctcggcttactgcaacctccacctcccaggttcaagagattctcccacctcagcctccccggtagctgggaccacaggcgtacaacaccatgcccagatcatttttatattttttgtagagacaggattttgccatgttgctcaggctggtcttgaactcctggacacaaggaatctacctgcttcagcctcccaaagtgctgagatgacaggcgtgaacaccacacctgaccatctagttctttacaaccttaaacttgactactgatggctattaaaataactgagaaataattattagtaaactaatgatagttacttttagtaggaattgttttatttataaagatcttagtctaaagaggatgttttaatgaccatcttgctatgtctctgtgaaagataaaagtgatgctgtatatgagggcaaaaaatgatgtgggggaagaaaatttccatggctacatgaagaaaatattttgtgatctgaaatttgaaaggtacctatgttttgtttacttgcttgcttttttccacaaaaggtgtcagatgacttactattggactttatttcaaatctgtaaaattttaagaaaatgaagagggtagaaatcagcattcttgattaggggattgcaacgactgccacaaataaaatgtttactttccctgtgaattttccttgtcagtgtcatctcagaaccccttaactctgcttattagatgttattggggaggtgggttcctgagttgataattaagcaccgctttgtgcttttcaatgtttaggacctttcttggccaggactcgcagtgggtaacctgtttcatcgtcctcgggctaccgtcatggtgatggtgaagggagtgaacaaactggctctacccccaggcagtgtcatttcgtaccctttggagaatgtgagtatttattataaaaaattaaagggatgcattttacattttcccttgtcagctgtcattatgaattgcattctaaacatacttctcttatctgtttttgatgcacagtttcttttgaaattctttgacaaacacaatttctttttaagaaaattacatgatgattgtaattaactgaggcttggctgttctctgtggatgagagtactgtttaagataagagatagagaaattgccccactcagaatagccagaggcttgaaaaagagagccactaaaggagaaaccagttggggttgtatcctgctactgtttttttggccattgtcttgtcatcttccctgcaggattttacctcttttcgtgtgtaaggacactggaggctgcttgctggctcacttactccttcactggctattcaggcaatgtgggtgactgtgctgatctaagaggccctccttccattataagcatatagaagtgcttgaaagaatgtcacaaaaaacatttttactagcataactaaatttgaatgcaagagggggtgatatacacaggtgttacatatggatggaaaactcagaagccatagtggtgagcagaagctgacgctgaaactgtgtttcctgcagaaagccagggactagaaatgctgtcaacttgttcttgaaaagcagactagtaaaactagtaaagctggcttgctgcccttggctgttggacccaaagagtcccctgagataaattagaattagaattataggcttatgctgtgcagagtggttctttgcaaattcacatgacctgccccatagggacatctccatagccaagggctcctttggtcaaatacggaagatgagtggaatttacaaagcacctgaaggaaaaaaaatgccatgagaaacaggtgcaacaaacagaattcatctccttagaactacggagaataggccaatttccaagagatctaaaaatacatacattaaaattgtgaaaaaaagggccaggcatggtggctcacgcctgtaatcccagctttgggaggccaagatgggaggattgcttgaggccaggagtttgagaccagcttggtcaacatagcaagaccctatctctagggggaaaaaaaaagaaagaaagagaaaaaatttgtgaaaaaaaggaaggaacagaaactatgagggagttataagacatttttgatacatggtgctttagctgatacttcaaaatatttcataatttatattgtgattctttaacccatgagttatgtagaagtattttttccaaatgcatgggttttaaaaaagtaatttctaatttttaaatttctaagttcactgcattgtaatactgtggtctatgtgatgctgaagttttgggatttttttttttttcagactttcctgtggtcgagtatagattatttccaagtacacatggcatacttagaaaaaattactgtgcagtagtccacaaggcaaatctcaacaaacaataaagaatcagtgtcatataaactaacttctctgaccacaatgcagttaaatctgaaaataataataaaatgatatcttaaaagggtatttggagcccggcaccatggctcacgcctgtaatcccaacactttgagaggccaaggcgggtgaatcacttgaggcgaggagtccgagaccagcctggccaacatggctaaaccctgtctctactgaaaatacaaaaattagccaggcgtggtggcacgcatctgtagtcccagctactcagtggctgaggcacgagaattacttgaaactgggaggtggaggttgcagtgagctgggattgcgccactgcactccagcctgggtgacagagcgagactccatctgggaaaaaaaaaaaggtatttggatcaacatttctcctttccccatccacccgtctcccccagcgtcttctaaccatcattctactctacttctatgagttcaacttacaagtgaggtcatgtagtatttgtccttctatgcctggcttacttcacttaacataatgtcctccaggtttatccatgttgcaaatgacagtttcccgcgctttaaaggctgtatagtattccattatgtttatataccacattttctttctgcttttttcttttttttttgagacagaatcttgctctgtcgcccaggttggagtgcagtggcgcaatgtcatctcactgcaacttctgcctcctgggttcaagggattctggtgtctcagcctcctgagtagctgggattacaggtgcatgccaccacgcccagctaattttttgtatttttagtagagatgaggtttcatcatgttggccaggctggtctcgaactcctgagctcaggtgatccacccacctcagcctcccagtggatctcagtgctgggattacaggtgtgagccactgcacccagctgcacattatctttatccattcgtttgattatggacaccgaggttgcttccatccatatcttagaaattgtaaatagtgctgcagtgaacatgggagtgcagatatctcttcagcatactgacttcaattgctttggatatatatacccagaagtgggcttgctggatcatgctttagtgatctattgcacaaaatggtgactatattaaataataatgcattgtgtatttcaaaattgctaaaggagtagattttagatacttttaccacaaaaaaaatataagtatgtgaggtgatggatttgttcattagcctgatttaatcagtctactttgtaaacttataacaaaacataacattgtaccccataaatatatacagttactatttgtcagttaaaaataaaataaaaagtatttggaaatagtaacaaacagaagataacaactcctcagatttaaagcatatggaacacccagtaggcaaaagccagatccacacctacatacggtgaaattgaagagtcatcaaggaaatggaaaatcttaaaagctgtgagggagaaaagacactgtcattacaaaggaatgagagtagaaggaaagcaaggaaaatgtagtgattgtgtagtatgagctaggctgagtattatttgcattgtcataataatgaaatgatgctgatcaagtgaaaattttgatataactattgggtaagagtggggagatagaaacagaagcagagcgcatggatggctcagcgcatggatggggcagtggttggtgatgtgagagagctaaagcctcattttctataatggatagtaaatagacaagacctaaaattgaaaaatcaggagatgtaatttaagtgtcttatttagagatgttaaaagcaaaaaaagtcaacaagaaaagatagttggaatagatgcactcctaaataattcatgggttgaggaggaaatcactgtggaactttttaaattatttggaactgagtaacaatgaatgtagcatttatttacaaaattgggaggtgcagctaacgtggtaagaaaagggaaatttatagccttaaatgcatgttttagacaatttaggttgtctaagaatggaaattaatgagctaaagaaagcggaagaacttcagagtaaatacacataaagtagaaggaagggaacaatacagatcaaaaggcagattatttcacagggagcatttaagtcattttttatgtgatttctgtgaaaatcattgcagaagattttctttaaaattataaaaatccaaaatgccattttgagatttttattagcatgtaatccaaaaataaagatttaaaaacagactagcctcattttacatgagaagaagctgtgctgtgtgaggagctcattttattgcttggccctggttggctgctcaatgcttttcctagcagaagatggtaaatgagataaaagattcaggggcaaaccccacaaaacataaaaatcagagtatcttagaattccatttaacgaagcttccatttgattagctagctgttttagttagaatttcaagtcatacaggtacagaaatttgaggacagatatgcatctcccttacaatacagtgagagaaaaaccatcattcgatattaagcagccaagctttttactttttgagcttagctgcctatataattatttcttttccttcattggtgttcatttgattcatgagctgcttcaatttgatcgctatggacatggttcctaatcttcaactttcctgaaccgagcgccatttcactaagtgaagtgaggctggaaagtttgcatcatttgctcatgtattcccctcacagcctgaggaggtaaactctatgatcgctaaaggaaagcacctatagatgattcagggcggctgctagcagtatgcttttgcaactttgaactctcttccccctcttcacttactcattaactcattttgagagaatttggggaagagttaataagcatcttgagtaagagaaaaaaattatttcatttcacagaatcataaaattgatcacttaatattgatgctgggcctgggcatggtggctcacgcctgtaatcccagcactttgagaggccaaggcaggcagatcacatcaggccaggagtttgagactagcatggccaacttgatgaaaccccgtctctactaaaaatacaaaaattagccaggcgtggtggtgcgtgcctgtaatcccagctattcaggaggctgaggcaggagaatcacttgtacctgggaggtggaggctgcactgagccgagatcgcgccactgtactccagcctgggcaacagagtgaggctctgtctcaaaaaaaaaaaaatgtgatgctgggattttatcagtaagacataatcacattgatttctgcctgtatcatattagcgttactttgctacttgtaaacatgaatctttaagtagtaagggaactactgaatgaaagatcaatgtaagaaatctccattaaaacaaaaacatgactgtactgcttgttttaatacagtaatactgggaatgaaataatttttttaggggaaaaataactgtaatttatttttttaaatcatgtactgcaaaacaaatctatggggatagaagtcagaatttttgttacccttgagggtggaggtagtacttcgagggcgctgatagtgttctgtgtcgatctggctgggctacctgagtgcatgcatgtgtaaacatttgttgagctgttaccccaagatttgtatactatattatatgtattttgcactttaataaaaaaattgaaggaaaaaagtaggtcttatcaccattggttatttcaatctaataatatcaacatgtcctaagataaaggcttcaaaaaccttgtgacatacttaacaccttatctaagagtctttaggctatctgaagacaaatgttaaatctcattaaacatttttaaaattttgaaatgaaagatgaattccatttttatttcaattaaattcaatactcagattcctctaacctcttaaatgcaaattaaatactttattgtggaatatgcattcatcgtggcacatttagtcaatattgaaaccaaatgtattgctgcttcaaatacatgaatgaccaccagaaaatggtttgtgctagatatagtgttgtgtccatcaggtttaagttattttccactgaggcatgatgggagatacagacttggcttaccagggggctgtttaatcttctgtgccctcaaaagggcttgtttggaaatgatttcgggcttctaaatttccatagaaagtgctggaaaaaagtttaaggcttctttttaaataccatctgaatgatttttcttcccactttggttcacataataattgcgttcttactcttaaatttcaggcagttccttttagtcttgacagtgttgcaaattccattcactccttattttctgaggaaactcctgttgttttgcagttggctcccagtgaggaagtaagtgataagggttttattcaagacattttaaaaaataagcttttattatttgaaaattatgaaatgtaattttattatgaaaatataaaactaatttatgaacaatgttgtcatacctctgggtattggaactaatctgtagaatttgagcaacttaaaattttctattcttcttacagagagtgtatatggtagggaaggcaaactcagtgtttgaagacctttcagtcaccttgcgccagctccgtaatcgcctgtttcaagaaaactctgttctcagttcactccccctcaattctctgagtaggaacaatgaagtaagtgcagttattcaatgaatacatgaatatcattaatttccgtctttttaaaaaatagagacagggtctcactctgttgtccaggctggtcttgaactcctggcctcaagcaatcctgtcttggcctcccaaagtgctgggatcacaggcttgagccactgcatctggcctcccattccttatactacttgaaattttggaaattttgctattttagaaaatgaaagattgtgcacatttactgctggggtagattcttctttagtgtaattttcttatgactctcatgaataaactgatcctttttgtgagttgagctgtggtaaataacatcacattttagcacgagggttgccacctattaattcaaacaagccagaggtcatagatctacttggtgactggtggagctgtgtggatctggtaacttggaagccattgttcactgcctctgctgatttgttgccacatttttctcattcattctggacattgcagtggagggagccacctctacttttgactcctgtccttcagtttctccatctgctcatgcgccctcttaaccatgtggcatgccactttcgtggtggcctcccctttttatttgctgtggatgaccagggccatcatcctttattctctgatgtggaaactattcaagggaagtgagcaaactgggccaatggtaggatgtcattgcagagtgccaggatatcctgatgctttgaaggaaaaccactggagaacttggatgctttatcatggttttgccaaaaatatagctattgagtggcagtcactgtgctagggaatggccatcacctttttgttaggaaataatgttttatatgcattttcaattgaagcaaacataccaaatggaagataattatataaattcacttatatgatcaacatttgtaatatcctgtgccttgcttggtaaatggcaaataaagatctctggtgcacatttaaaagaatgctctttttttttgggctctctgaaggttgacctgctctttctttctgaactgcaagtgctacatgatatttcaagcttggtaagtaggctgctctaattttttaattccatttattttggtttctagagaatccttgaataatagtaaaggcagttgaaaagtttgattaagtatgccctagatttatgatcccatgaaaattgaaaaattagtggcaatattgggaattttgaacacatccatgttatagtcaaattattttgcatttctgctttttagggagagacaacatatcttccaagaacacaagcctgggcgtaagaacaccctggccatagtcctaacttggctgttgatttcttgtgagacttaattcctatctatatctttgggcctaaaatagaaataatagtttggactaataatgctgtcagtcaagtcaagaagggacgaaatccgtctgaagggtatttttttggtgaatgattttttaaaaatcatccttgttactgaaatagaaattcttatctgtttgctaccttctgaagttgttttccaaactttttcaacaggtgttggttcggggagtctggaagtgtagtgcattcctgggatcaaactggtccagccatctgttctttcatacgttggcccatacctgagtttttaaaactgaggaattttgttgaaagcttttattaaatatccaaggagtcttgtactgctcctaaacatgagattcgtgttggatttatcagaaacgcttattcaaaccagtttcttttgccaccattttagactatttgcatgttgtggtacactggtatggtttagtttagcctagtttagttaggcataaaactttaactggctgtgtttgacgtctttcatcttactttatccgctacctttttttgtttgtttgttctcctaagctgtctcgtcataagcatctagccaaggatcattctcctgatttatattcactggagctggcaggtttggatgaaattgggaagcgttatggggaagactctgaacaattcagagatgcttctaagatccttgttgacgctctgcaaaaggtaaatatcaatgcgacatgagaggttggagtatgaccatttcacttttagcctcttaatagaaaaatctgctgtttcaaacactgttgattgaactcttatttgccttctttggggctcctctaattatactggccaaggatggagtagggtcaaaaatgtatattgatatatttcttcctaatgctagaaagaacagcattaggaaaagttatctcacacaaagctttacaaaattattgtggtaaaatatatataacataaaattaccactttaaccatttttaattgtacagttcagtggtattaagtgcaagtacgttcacatgttgtacaaccatcaccatcttctatttctagaactttttcttcttccccaactgaaactctgtactccttaaacactatgagataactgaagtagaacacccagcacagtaccagacagtagatgcataataaatgctagttcccctctgcccttgaagttcttcacctgcatcctttcagtgaggcttcatattttaatctttatagatgtttgtgattaaccagagaccacttaggaagatttcatttctctttccaacttcccttcctccaatttatatgctgacaaattcagtctcttcttaaagtaattttagtctaaacatttgaatatatgttaaagcttaacacttttctgtatagttgagcaaaatcaaaacctttaagacttgcttattgtaagatgtagtatatttcatgagccaggaggtaagtgtacattgttcttgtagctgcacaaaagctttaaaaataattttaataagtatgtatttgactcactgcataaaatgataagtaggaggtaatgcatatgttaattagccaatgtggacttaagccattccacaatgtgtacatatttcaaaacaatatgttgatgtgataaatatatatgattttaatttgttaattaaaaatgaaaaaagtacatagttgagattcccaataatgttaataactaactttcagtttgcagatgacatgtacagtctttatggtgggaatgcagtggtagagttagtcactgtcaagtcatttgacacctccctcattaggaagacaaggactatccttgaggcaaaacaagcggtgagtatattttgagatcctgctttaaaactgtaaaattaacttcttataaaaaaaaaaaaaccaagtcctatatcacctaagggtgacatgaatgagcagtcagtaaatctgaaaaacaatttcagttaaaacgtaagcttcttgttcacatacatatgtgtgctttgccagtgatgatcagttctttagggttataatcagataatgcaagaatttgaattagggataaaagtaaatctgtccaagattataattcaaatatcagtacacacaaggagatatcagaagttaatgtggcgccaggtgcagtggcgtgcatctgtaattgcagcttctcaggaggccaaggcaggaggattgctttagctcaggaggagtttgaggccagtctgaggaaacatagcaagaccctgttttgaaaacaaaaagaagtgaatgtgtgcgggagtggtgtggtgcccacatcctatgggctctgcttttctagcaggcacattgtctttgtggcgtagtccctcacttactgagatcctctgtgtgcacctctttatgattttgatttacttaacagtttttttgggtatggatcttgctttgattttaagcatttagagggtcagggttaagcattaccatggttgctggccatggtaaaatacatatctgtttatgtgtatgtacgtgcacatttacatacatacatatatacttacagctgcagcagaacctagggagggtgatgggaaagagtagtgtagatgctccctaacatcctacgtctgagaacattgcttagggctggctgtatcacttgcagcagatagatatccactcaattacatacacctccgcttcagacccatttgcagccctcaccctgctcagttttactgaagtcagtgtgggacttggagtcggaaggtcgaagccagtgcctgtttgagatagtctagcgattactggtttgagattgtttctttctaaattaaattggggatggaaggacctttgtttcagacagcatgtcagtctagacaaccacccaagatttcccaccataaaacgtctagaaatgctagataaaaataaagatcttttaaaaagtacatagtttgggctgggtgtggtggctcacgcctgtaatcccagcactttgggaggttgaggcgggcggaacacctgaggccaggagttctagaccagcctgggcaacatggtgaaaccccgtctctactaaaaatacaaaaattagcctggtgtggtagcgggcacctgtaatcccagctacttggaaggctgaggcaggagaattgcttgtacccgggaggcagaggttgcagtgagccaagattgcaccactgcactctagcctgggagacacagcaagactccgtctcaaataaaaaaaaaattacaaaaataaaaatacatagttcagctcgcaagaaagggaaattctcttacagagtaaataaagaagaggaggccgggtgcggtggctcacacctgtaatcccagcactttgggaggccgaggtgggtggatcacaaggttaggagttcgagaccagcctggccaacatggtgaaactccgtctctactaaaaacacaaaaaatcagccgggcgtggtggcgcacgcctgtagtcccagctacttaggagtctgaggcagacaaatcgcttgaacccgggaggcggaggttgcagtgagctgagattgtgccactgtactccagcctgggtgacacagtgagactccatctcaaaaaaaaaaaaaaaaaccgaatgtggtaagcaggccgccctaaggatatttgccagctgggtcaccaagagtcctttggtgccttgtgtgtgggggatgggaatggacaactccagataaagctggggaccccgagagagctgtgccctcagtgagagggtagactggaaatttttgcccaccagcacagggaaacagaaaggcacctgggctctgggtggtcagcacatgtgttgagagtggggatgcctcccagagaattcttttttttttttttttttttttttttttggattttttggagataggatcttactctgtcacccagactggagtgcagtggcacaatctcaactcactgcagcctccacctcccagattcaagtgattctcctgcctcagcctcctgagtagctggaatcacaggcatgcaccaccacacccggctaatttttgtacttttagtagagatggggttttaccatgttggccaggctggtcttgaactcctggcctcaagtgatttgctcacctcagcctcccaaagtgctgggattacaggtgtaagctaccatgcccggcctatgagatttctttttagggtgatagaaatgttctagaattagattgtggtgataactatgaaaccactaaaattccttgacttgtacacttaaaatgggtaggaaaaagaacatgtttatcaaaaaaaaaaaaaggaaagaaacaaagaggtcttcatgggcgtgaaatcctttaacgtttgcctcagctctgagctccccgcaggtaaatatgcatgcctgtgtacccattctctcctacatttgaaatcactctcttccattagtttaaggagacaggagtttaaggaacatttactgagtactcacaacattccaggtgctggggctgtagggacaaatagatctcggttacattttcgttctcatcctcactgccaggcaccctgcccccatttctcccacctcatttgactgccgcctcctaacttgtctgaactcatctgtctctctgcttcccagctggctcctcccaaatccatcctacacattgtcatcaaagttatcttttttcttttctttttttgagacagggtctcgccctgtcccaggccggagtgcagtggcgcaatcatagctcactgtagcctcaaactcctgggctcaggtgatccacctgtctgagcctcctgagtagccagttctataggcttgagccaccacactcagctaatttttaattttaatgttatctttttaagacaaacctgatcatgtcactcactttctgcctaaagcttgtcaatggctccttattgcccagaggctcatgtcagattttctgtagcttccctgcttctagcttcatctcctgctgtgttcctacttttaaaattctctagccagaatgaatgatatttcccaaacagtgcctttgtcagaatgaattcagtttcccaaacaatgtttttacacagctctgtattttaaaaaaaagtgttaagtggatcatacatacataagtatataacatatttaatactagttatttaaataataaaaataataacactgtatagctccgttttcatatggctataaagagctacctgacactgggtaatttataaaggaaacaggtttgattgattcacagttccacatggctggggaggccttaggaaacttacaatcatggaggaaggggaaggggaggcaggcaccttcttcacaaggtggcaaaagagagagaaagtggcacacttttaaaccatcagagctcatgagaactcagtatcatgagaacagtatgggggaaactgcccccatgatccaatcacctcccaccaggtccctctctcgacacgtggggattacaaatcgagatgagatttgggtggggacacagagccaaaccatatcaatagcttaagagaatgcttgcttctttgaagctccctattttctccctctaccctccctcatccagaggtaactgctgtcctggatatcatgttaatcccttgcttttctttacagattgactgcatatgtatttgttcttaaacagtgttgtttggttttgcctgtatttgaattttatataaattgaatcatactacatgtatttttctgtgttctttgttcagtattctttttaagattcactcaggctgacaaatgtagctgtagtttagtcattttactgttacatattctgcttgtagggatataccacaattccattctgttgatgatttttttttttttttttttgagacggagttttgctcttgttgctcaggctggagtgcaatggcacagtcttggctcactgcaacctccacctgctgggttcaagcagttctcctgcctcagcctcccgagtagctgggattacaggcacctgccacgcctggctaatttcgtatttttagtagagacggggtttcaccatgttggccaggctgctctggaactcctgacctcaggtgatctgcccgccttggcctcccgaagtgctgagattacaggcatgagccactgtgcccagccttgctgctgatattcttatacatgtctcttggtacacatatagaaattttccctagcgtatggacttactggatcacaggatatgcacaccttcaactttattaggtattgtccagttttcccaagcatttggactggtttatacttccaccatcagtgcaagtgtcgtctccacaaaggcgctccttcttgcttcctcctagtataagtagctgttatgccacttatgaagaaatgtttgttagacaaatgaatcacagtcactagactgggataatttcctattttaaaattcttccctcttgatttttctttcttttctatattgtagaagaacccagcaagtccctataaccttgcatataagtataattttgaatattccgtggttttcaacatggtactttggataatgatcgccttggccttggctgtgattatcacctcttacaatatttggaacatggatcctggatatgatagcatcatttataggatgacaaaccagaagattcgaatggattgaatgttacctgtgccagaattagaaaagggggttggaaattggctgttttgttaaaatatatcttttagtgtgctttaaagtagatagtatactttacatttataaaaaaaaatcaaattttgttctttattttgtgtgtgcctgtgatgtttttctagagtgaattatagtattgacgtgaatcccactgtggtatagattccataatatgcttgaatattatgatatagccatttaataacattgatttcattctgtttaatgaatttggaaatatgcactgaaagaaatgtaaaacatttagaatagctcgtgttatggaaaaaagtgcactgaatttattagacaaacttacgaatgcttaacttctttacacagcataggtgaaaatcatatttgggctattgtatactatgaacaatttgtaaatgtcttaatttgatgtaaataactctgaaacaagagaaaaggtttttaacttagagtagccctaaaatatggatgtgcttatataatcgcttagttttggaactgtatctgagtaacagaggacagctgttttttaaccctcttctgcaagtttgttgacctacatgggctaatatggatactaaaaatactacattgatctaagaagaaactagccttgtggagtatatagatgcttttcattatacacacaaaaatccctgagggacattttgaggcatgaatataaaacatttttatttcagtaacttttccccctgtgtaagttactatggtttgtggtacaacttcattctatagaatattaagtggaagtgggtgaattctactttttatgttggagtggaccaatgtctatcaagagtgacaaataaagttaatgatgattccaaa

SEQ ID NO: 45 - DNA, 50903 bp, Homo sapiens
gcgatcacgtgagcacagcagggagggggaggggccctgatttccgggcggcggaaggagacgcggccgcgtgaggacgaggctatttgaaaacacgctccgggagctagagcctgaggtcggcggcgcacgctgttgccccgtgggcttctgctccctcgcttgtcttctcgggcttctcgccccggccgcggccgggtcctcaggtaagcggccgtcgcccgtcgggccgggtcctcccggggcgcgggactgagcgtggtggggccgtcgccccccgatccgcggcccaagcgggcagggtcggccgtgcacgatttgcgtcccccgggtctgggccgcggcgtccctccgagctgggcctgggtgtgcggccggcactgcgggggcgggaccccctagggcgtttgcggagcttcaggtgactgggcgggttcgcctggtttcgggtccgagagagttttagcccggagtgtgtgaatcgggccccacttccccgactctggtcctggccggcgtcccttggagtaggaggaacgatggtttcctaaaacccatggtgtgttcgcctctgggatggatgcaggaccgaatacggagtggggatgagctggcgtcccctgttccgtcctctggtcgcccaggcgggagagttaagcgagcggaaggggactaccagttttctggggtcgcccctgcctgggccatttgctttttgggaagtctgtcgcctctggttggcccctcagtggagtttggaggaactcatgagtttaagggtttggggaggaaattatcaaaggccgagtgcagtacgatcgttctctctgattttttttggaaaagaaggtggaaatgaggaagggtaagaaggtggcaggcaaactatttatagttggaatttagttcgattgaaatcctaaaaacgctaggatctgccttttgttggaattagaaaagacctacagtaggaatgtgtgacattcagctttgaaactattggggatcgcaaacctaaggactagtgatgtgagctcctcctctgagactggcgttcctaccttttgctaaaaaccggctactgtaaaagtggcttagtgggactttttgatttgctgtgttatgaaaatctttgttataagttaaagtcaattactagtagaactttgagagttcttcgcatgaaaatgctttgtatcccgtaataatattactaggtttgaaaagtcaaggaaggtcaatcagccttcttaattttcctaacagagaaagcattaatgtgactaatacaaagcgatagataatatggcatgaagttgacagtagactgttgaagatctatcaggtggttaatggctaaatagaacccacaggagtggaggaggaagggagttaatttttctgaatgtcctgtaccatttactttcgtgtctagtaccagctagtaataaaattgtaggaaaagctcacaaagtgtgcttgcttaattaatgaaaaccatttttgtattaaaagaggccaggtgagtatcatggccttctttttaggccttattccctcccacccacccacccaccgacccccagcttttttttttgttttgttttgttttttaagactaaggtaactagaggtgtgggtgagatgaaaatttggtaatagggacaaatgaaataagccaaactgttttgccacgaagacttccagtcttcaggttaattctggtatgttaaaggtggttttgcagagctcagttctgtgaatgaatcccttttcaacttcttgataaaggcgtgacttccaaacttttctgaggtacattgttaaaatgggtttagttccacctaccttgcatggttctgtgcagattgtatactgaggtacacaatgcatctagtaccgggcttggtatgtcctgatcctgagacttgagggacacgcacatgtttatgctttgagcatacgtatttaaccatgtaccaggcacagttctgagtgttttacaattgtgtatgattatccctattttgtagatagaaattgggacagtgtacagctggaaggcgtcagagtttggataaaagcctaatcaatctggttgtagaattggttcttaacctgtgggaaatcctacctcatggcgatctaatataaccctgtaattaagtaaatttggatatattgtcatagctgattggcttctgaattccttgaacttgagctgttcagtattgcactggccattttattaatattgtaataaaggaaactttcgttttacccatttttttataccctcatgtgtagcattgtcactttttatggccaggcacaggataattatgataaaccaggagattagcagaagttttatatattccagaggtacttaccctattcaagtggtgtacagtattgttctcaggtgtggaaaaggcttcaagaagaatttagctggttccaggtagaagaggctattgttttagatagagattagcttgtgggaagataaagctggagaggatggatggggccacattaggaaggacctcatatgtcctgctaaggaggttttactatgtatgaggaatagaacagctgagaactcttgagtcttggtcatgagatctgtgttcagagagagctgtttcgtaaagggccagtggactagagaggagacactagatagtaggcaggagtaccagtggggaaggtattgaatggtagaaataaaggacttcttgaaagtagtggcctggaaatgggtaagagacacagatcaaagatttcatgtgtaagtgcaaggtttggaatgtggtatagagggggaggaagtacaagatggcatggtgttatgcctgagttatttattataatagtggcttagctggtctttgttccttatccccctattacattatatttctttttatgctgctttttatcctttttggggaccaagggggaatactgttttctgtttagtctgaggtttattcacttttgctgtgctaggtttatcccctacacctgatctttaccttgttttccttgctcttgaaaggcctattattctccttgctgtgtatttgaatattacccatttttcacatgctcagcttaggttcataaatctttttctaatggttataggctgcattaaagaataacattggttttccaactttgtttggtattgctagagaagttcctccgaggctcttacgaagcccaggagcacaccagcagatacaagttacatctctaggaagtctgtgctgctctcctacactcgaacaaaggaaaacaaaaaaaaaacacatttcagaaggtttccctttagcatatagcttgacaaaaggttctgtgacccaaaaaactttgcaaaaccgtggcaagactgttgccttgttacagtattttatcactaaactgagtttttaatagttcttaacagcattttttaatattttgatctttcagcataatcagattcttgattacgattgaaataaatgttacagtagtatgtgttggaaagtgccttttttcataatttattcttgtctctatccattgcttttaattaattcttttcattatagtagtcgagaatgactaaaaaaagaaaacgccaacatgattttcaaaaagtaaaattgaaagttggtaaaaagaagcccaagttacaaaatgctactcctacaaactttaaaacaaagactatacatctgcctgagcaactcaaagaggatggaacacttccaacaaacaatagaaaacttaacataaaggtaaatcataaatcatgttttgacaaaataagattttctttggaatcgtgtagaatgttatatttttgtgaaaatttgtctaaactcttagagtaaatagtttgcctagggtcttagggtttattgatgtttggagtttatcttttacccaaagatctctcatgcagctgtgtctttccacttcctccagaaacgttcgctaaactaaatgcacagttgtttctccctggtatatttatttgatgatttatttatttatttatttatttattttgagacaggtctcactcttacaccatgttgagcacaatggggtgctatcatggctcactgcagccaggaccttctgggctcaagtgatcctcctacttcagcctcccaagtagctggggctgcaggcgagcgtcaccatgcctggctaatttatttttttgtggaggcaaggttgcaatatgttgcccaggctggtctcaaactcttggatgcaagcaatcctccagccaaggcctcctgaggtgctgggattgtaggcgtgaaccacggcacctggctgtatctggaaataattcttacatgtttttgatgtgtcaaatttttgatgaacagttttctagctgttttttagcgaattaagatacaatcctgtcattcatttttgaacccatacagcacatagtttattataggtttgtagtaaatacttgaagtcaattgaagtttgagaagtgttgcttaagaatctaacagctttatggagatataatttacacataattaaaatctctcatttaaagaatacaattcattggttttggtatatttacagagttatgctactatcaccttaatctaattttagaacgtttttatcactccaagaagaaaacttatacccattaggaatcacttctcatttcttccagccctaggcaatcactaatctacctctgatatctatagatttgcttattctagaaagtgcatataaatgaaatcatataatacatggccttttgttactggccttttacttagcacagtgttttggaggttcctccaggttgtatgtagcttgtagcatatatcagaacagtggtacattcctttgtattgtcgaattgtatttcattgcatgattaggtcacatattgttgatcactcagcagttgatgaacatttagtttgtttctggtttttggctcttatgaataatgctgttatgaatatttgtgtgtaggtctttgtgaggatatacatttttcgagttttgctttttaagctctgaagtttaaataatactaaagagttatttaaagttttttttttcccaaaggttacataaattattccacagataaaattgtcaggtagtatactctgaataaaacacaaacaccctgtgaaagcccatttgaaacaggcagaaacggcctgtcaagagtatatatatacaccttccatgatgtttggtacctagtaggttttcaataaatgatggtgtgattgctgtcactttatatcatagagcgcctaagcctgcatgtaggttaatgtaaagagagaaaattccaactgaaaattatgcaatgtttttattaagctgaaagtatttttctgtttctgatcctaacaaaagctaaataacatttaaaaagtacttattgaagcagtttccccaaggagtgtcagtttactagtgtagtgttagttagcatgtttacgtgaaattgatacatgtatataagtatacatctaaaatttgtatttttatttataggatttgctgtcacagatgcatcactacaatgctggggttaaacaaagtgctcttcttggacttaaagaccttttgtctcaatacccatttataattgatgcacacctttcaaacatattaagtgaagtgactgctgtgtttacagataaagatgctaatgtacgattagcagcagttcaacttcttcaattcctggcccccaaaatacgagctgaacaaatttctccattttttcctttggtaagtgcccatctctctagtgccatgactcacattactgaaggaattcaggaggactctttaaaagttttggacattctgctggaacagtacccagctctaattactggccgtagcagcatattgcttaagaattttgtagaacttatttctcatcagcagctgtccaaaggactgataaatagagacagatcccagtcctggatactttctgtaaatcctaatcggagactcacttctcagcaatggaggctgaaagtcttagtgagactcagtaaattccttcaggccttggcagatggatccagtaggttgagagaaagtgaaggacttcaggaacagaaagaaaatccccatgccactagcaactccatttttatcaactggaaggaacatgccaacgaccagcaacacatccaggtttatgaaaatgggggttcacagccaaatgtcagttcacagttcaggctacggtaagaaggatttcagttatgtccacacagttttgctgtattgaattataactgctaaccattgatgactgttggtgggaagacatgcagttgtctttcatagttttcatatagttactcatgatttgattttatttactgatgggaagagttatttgtatgttaatttatttatagcaaagcctttgagaaataaaacttgataatatcttttggctttgtcatcttagaatttcatttttcttactagttttgattgatgtaattatcagttcatggtgcttcattttactagtactttatatttaagatttaaattagcaagggataataaacattttttaatcacttaatttttttctttcttacccttattaggtatctggttggaggactgagtggtgtggatgaaggcctgtcatctactgaaaacctgaaaggatttattgagataataattccattgctaattgaatgctgggttgaagctgtacctccacaactagctactcctgttgggaatggtatagaacgagaacctctacaggttatgcagcaagttcttaatattatttcccttctgtggaaactctctaaacaacaggatgaaacccataaattggtgagaactaatggttctttattttcttagtattaatagccttttatcataaatggcaagattcgaaatcagctcattactactaattggttatatatttttctgaaaagtaccctgggtttaactgtaaacttgtttgttttgcacaaaactacaaattagttttctgaagttattatctgtgaatatatatatatatatatttaagtgaaatgcgtaactcatgcttggttccattagttttttactggctataattcatagtagtgttacagtgtattgtttatggcagattgattgtgtaggaacattctagtttctgaaaggtctcttacaaggtttaaaaagttgcttattaagtagtctctttcaatttattccacattgccaggtttagtagaaagggacaaaactgaagagctcatgatcagacttgaattgttttaagtgttgtgctatagtgaatgtagtgcatagtgtatgctacacttttcctttgcaaccaaggaggaacaagctgcaagattaagttggtgctaaatcaatacagtaacacacttgaaaagggtagctacagaagcaagacttcaaagctagaagcatctggttttcagaagaattgctgtaaggacttttgataaggcaggtgtgaatccttcaagtttatataaaactgagaaggtagttttcttgtttttgttttatttttatttcaagttgaagtttagaatgagtcagtatggtgcataagacgggataaattaagtagtatttgatagtcttgaaaagcattatagagttgtagtaaggtgtatattttaagagcgtgttctattgctgttaactcatcatctgtaggaatgttttgtcaattgctttttcaaataagatggcattttattgattacggttttgagactttgttttatgattcattgcatacattggcaaaaaattaataatagggctataatgtaagattttgagaaagcaaagcttgtttctcatatggcagttaatttgtgatgtaggctagagacagtaagaatgtatatagctcctttaaaaaaagtatatagtacttacagtcttgatctatgatcatctgaaaggttcagatagaaaataaaagtaatgctaaagtccttaagatgtcctataaaaaagaaaaagtaatattcaacatggactttgagtgctagttttttcttttctttttatttttgagacatagtttcgctcttgttgcctaggctggagtacagtggcacgatcttggctcactgagacctccacctcctgggttcaagcaattctcctgcctcagcctcttgagtagctaggcttacaggtgcccgccaccatgcgtggctaattttttgtatttttagtagagacggggttttaccatgttgggcaggctggttttgaactcctgacctcaggtgatccacccgcctcagcctcccaaagtgttgggttacaggcgtgagccaccacgcctggcctagttttttcatttttagagagccaagaagtaaaaattccaagcttcttcggtgtttgattacatataagcactagtaaacttttgttactgctttgttagtagcatttgtatttagatagactagtaggaccaaaattcaaaatctgaaaatttattaattatgctagttttgggtcatcttatctggataacactaacaaaggatctaaatactgctttagttttatggatatttaaaatagtatgctttagaactattttgtgctattataacatgactaggcttattagcagctcattaacatataatggtaagtttaaaagactgcgtagactgttgaagatcagaatacaaattgagatactgtataaagctgaaataaataaattcagataggaataatatttaaaaacatccactggtagaatgctctaattcaccttggcagatttgtaataacttgataagaaccattatttatttatttattttttaaaaaggaaccattatcttagagacagagtataaaaatgtacatcattggtacaatctatacaaaatgatagattgttagtagcattctatacaaaatgacattaaaatgcacattctggtcttgaacttctggccttaaatatccttgcaccttggcctcccaaagtgttgagattacaggcatgagcctctttgcctggccacagcctaatctttaggaggaaccaaatagcattgcttggcattgatgtcagatcacacaccacaagctgaattgtaactctttttctctcagaaactgtatagatttttctattggtaaattgatgtctcggttagatatagtcttaggactactgactgtttgcttttacatgttggtgctgcagcttaatgcatttagtttgctagtatttacaaaaagtcaagaaatttcacttgtattcaggtagtttttttttttttttaaactttttagtaatttgaagctttgatccttactttgaaaagaagtctcagggtacattaagtcttacatgcagtggctgaatagtcagattctgtaataatcaactgaagttgtttatttctgaaatactgtgtgtatcttttttttttcctgttcatataaacagccatttattccagcactatttgttgaaaagattgttgttttacatttgattaccttggcactatttttcttttctttctttcttttttttttttgcattcccttacctatcttttttattttaaagtcaaaccttcagaaggaatacaataagcacttgcctacccccatctagttgcagcaatttctaacattttgtgcacatgttgaactactactgtatgtattcttaatagttagctagctatatccttgatataactagtttttatttatttttatttatttttttttggagacggagtctcactcagtcgcccaggctggagtgcagtggcgcgatcctggctcacctcccgagttcacgccattctcctgcctcagcctcccaagtatctgggactacaggcgcctgccactatgcccagctaattttttttgtatttttagtagagacggagtttcaccgtgtcagccaggatggtctcgatctcctgacctcgtgatctacctgtctcagcctcccaaagtgctgggattacaggcatgagccaacgcgcccggccgatatagctagtttttaaaatgaaattacagtttaacattagctttttgatttactgtggtttttagggtactgtattagtagtgtcagggtcagtattatgttataaaaattgtgtcttagctttgcatttaatgcttgacttgcttgctactttttctctacgtgtgtgtctcattgcttttatccttttgctgtgagggttagagtttgtaaccaaacactaatgcagtcatactttataaggcatttattcaaagctttattgggcatcaataaataatggctacttaaattaattaaaatttaaaattcaattcctcagtaaccctagccacatttcaagtgctcaacagctacatgtgggtagtggttactatattggacagtgcagatagatatagaacagtttgatcattacagaaaggtcttttgaatagtactattctagactctggggctacagagataaacatggttgataaggtgcttgccctcatggtatgtaccttctggtgggatctatagacagtaaacaaatatataatgtcagtactaggaagaaagatgaaagtaaaatggggtataaagagcatgggcaggaacagtgagggggagctattttagataggttgtcaaatgctctctgagaataagatatctgaatgtcattgaagtgaaggagcaagtcttgtcaacatctgtgggaagaacattcaggcataggaaacagcaagtacaatggctttgaggtgagaacaggcttcgcatatttgaagaatggcaggaaggcctgtgcaaatgaggtactgggagaatggtagaagatgggggcgaagaagagtgatagtggccagatcatgtgggactctgtggtccctggtaaggagtttggattttaacctgagtgtggcgaaaagaccactggagggttttgagcagaggagtggcatgatctgcattatatttatttaactttaatgtgctgaatttataaaaatagaacactagtgaactcccaggtgctcacagtctaactctagcaaccatcatctcttggatgaccagtcctgtcctacatgtatatacatttcgtttcctttcccccttcctgtatcattttgaaacacgatttatgttttaaaagatcaccctggctgctgtgtggggaattgacttttggaggataagaggagaaacaggcagactggttaggaggctattgcagtaatccaagtaaaagatgatggtggccgggtatctagtggttgaaatgatgagaactagctggatctaggtaaagccagccagactgttggtatgtataatgaaggaaagaggagtcaaggatgatgccagtgttacatcgcccaaatgagaaagaaagtcatttggcagggagaatttggttttattcatgttaagttttaagatgcttgtcagaagttgaagaggaagtgtcaagtatgtatttgcatataaaatctggagctcaggcagaaatgattcaagtattattactgggcagatccaaacgtttagaagtcaggaagaagagaacccagtaaagatactaaggaggaacaataattgagctgtaaggccgggtgcagtggctcacgcctgtaatcccagcactttgggaggccaaggtaggtggatcacttgaggtcagcagttgaagaccagccgggtcaacatggtgaaacccagctctactaaaaatacaaaaattagccgagcgtggtaatgggcacctgtaatcccagctactcaggagattgaggcatgagaatcgcttcaatctgggaggcagaggttgcagtgagctgagatagtgccactgtactccgacctgggcgacagagcgagacttcatctcaaaaaaaaaaaccaaattgagctgtagggtgaccagctgttttagcacctcaagtcccacatctaggaaacttctcagtctctgacaaaatgggatggttggttaccttggataagaggaaataaagaatattctaatttggaattagaaagacagtgtttccataggagggaaatgataaattcaccaatactactgaagcattttaagtaaatgcattgctttgtgaaattgttaaataatggaattgctggagaatagagttatggtgtagacagaacatcagggagaaagactttcttgtatatttcataaacattgcattagtagtccaaattcagaattttcttaagtctcagatactttcactttttctctcttaagcagcagacagaatgcaagtaaatagttattaagcaccaaaaggatctatagatgaaaagtgggtgctttaacagttaattctgatttttaaatttatttacatattatattactggtagaaagtgaattatgatgggacatttatttgacaagttgtcatttctcttcaagttttattgcttattttacattttttcttgtagatttttctaatctttgctatttcaataggagtcatggcttcgaaagaactaccttattgattttaaacaccattttatgagtcgttttccatatgtcttaaaagaaataaccaagcacaaaaggaaagagccaaataaaaggtattatgattctttttcactgtataaccttgaaaagctgtttaacctgaaattatcaggaagtaattaaccttaatatggaactttctacactgctgtgtatttatgtctagattttgtgaaaataaaagtagtaatatggctgatttttggacaagtgagtttgaaccttgggattaacattttatttttattttttagtctgtaaaatggtttttttgtgctagatgaatgtatcagcttatgtaaatacgaatttaataaaattgccaaggtgtatggtttatttgggtgaggcactgtgtgattattgaacctcttaagcaagagaatatcttgatgatcatctagttccactctcatttatacatgaggaacctggtattgaaactaatatcagtatcccgaaggaaggagggtaattggagaaaaatcagaaataaaaggtaattgattagaaggtgaaagttaaaaaaaaaaaagtaagcctagaaattatttaaaatgtctacctcaagtaagagcagataaatgtgagaacaagttatgtaataaaatttgacaagcaggtacaagctaaaatactaatactgtagttcccgtaaatgagcatacacttgcaagggatcttaaaatctgtcaaaggctcttttatcaaagggaatacattagctagagaatcattgaggttttttgagcagggttcagagaatatgcttggaagcaatacagctatttcaggcataagagtttttcattcatgcactaaatatttgttttggttgcttactgtgaacagggtagaacaaagtattgtgatagagaggatcagattttttaagccttgtaccttgccctcctaagcagttttataaatatatataaatatatataaatatataaaaatgtatattatatataatatataaatatatataaaaaacaaatatgtgtatatatatatgtatatatatatatatactttttttttttttttttttttttttttttgagatggagtctcactctgtttcccaggctgtggcaccatctcagcttactgcaacctctgcctcctgggttcaagtgatcctgctgcctcagcctcccaagtagctgggattacaagtgttcaccaccatgcctgattaatttttgtatttttagtagagacagggtttcaccatattggccaggctggtcttgaactcccgacctcaagtgatctgcccacctcagcctcccaaagtgctgtaattataggcatgagccactgtacccagccttaagcaattatattctgaatcataaaagaatgtgtcagggtccagtcatgaaacagaaactgcgacagtgatttttttttgagacagagtctcactctgttgcccaggctggagtgcaaggcgtaatcttggctcactgcaacctccatctcccaggttcaagcgattctcctgcttcagcctcctgagtagctgggattataggcatgcaccaccacgcctggctaatttttgtatttttagtagagatggggtttctttcaccatattagccaggatggtctcaaactccttacctcgtgacccactaccttggcctcccaaagtgctgggattacaggtgtgagctaccgtgcctggccgacagtgatttttttaacaagagaatttaatgtaaataattgttaactaggtatgcaaaggaagttaggtattatggaggtaccaactgcaagaagcagatactacttgtagaactgggagaacaaagaagggaagaagcttggaggaagggagccaaaactctaacctctcagaagggtatgctcctcaggcaggtactgatatctttagctgagagcaagaaccccatagggctggggcccagtactctgaaaagcgggtgctggctggctggtgctgacgtttcttagaggcatgatgattctggttctgtgtcagaaaaactacaaactggagtctgctatggctactataatgaactgcaaatgacctgaagaagagctgccgatcaacactggcagcaataggaaacaaaaacaaaactagcaagcaaacagaagagtgtcccgtcttcctcttacagctttctaggccctttgtaccacccctttattggcagagcctaataagccatctacaaaggaaaaaatgtgggtcgcagagtcccaaccccagggtcacaaagcagagtatagagggcgactttgaagctgagaaacagtagctctgtaactaacatttacatgtgtatatttacatatgtaacacaaagcagtataaaagtatcattagaactatacaactaagtgctataagaattcataggaagagacagataactgcttattaggataaacagacaaagctaaattgaagagtagtatttgaactgggtatgaacgtggatatggtttcaggaggcagaaatgcaagggatgagacttttgtaactagaggagatagcatacaagaaagctacaggattaggaaatggatggagagcgtggatctgggtccagtctgatttctgctcttcactggccttgatgtggaagccgtttcttgactcaggagttcatctttcagatccttttggcattgaagacttttggttcagtcagaactgttttagggagcttctggagttgaggggacagaatcaaagagacactttattgagcaagatgttagactttttccccccatacaattttcttattagagtttttcttctgggattcataggtaagcttcagaaaatccatgaactctcaaagtattgatggagaattatatgtatgtgtattttttcaaataaggcattccatgtataattttcatcaaaatgtgattaaattgtggtttagatgtttaggatttagtagacttcagtgtaaataaattattgaaaaatgtatcagcatatcatcattcaagaaatttattggactcttatgtgcaaggcacttattgtactagttgctgagcatttcatggtaaaggaaataggtagagtaccagctctcatggagtacggtctaatgaaaaagacatttatttcacttgattctttaatcagtgactgattgtgatagatatagtgaaggaagagcttaggttaatacaggagtatgtaacaaagagttggtcctgatctttcatgaggggaggaccatcttagagaaggctgccctgatggaagtgacagcgtgctgagatataaatgggaaaaaagaaaaggaattaactttatgaggaggttgagatgatgaaattgagggatttttagcaaagatggattgccagtgtgacctacttttcaaaagattcccccctcatgattgatttttggggagcctacaggctactcttaagtaaatgcattaaatacttagcaaatagcctgtgaacagcagcacaaatcacagttagggaagtcaacagtggtctaggccaacggtccccaaccattttgctatgagggactagtttcatggaaaacaatgtttccatggacctgaggtgggaggcttggtttttgggatgattcaagtgcattacatttattgtgcgctttatttctattattacattgtaatacgtaatgaaacagttttacagtttaccataatgtagaatcagtgggagccctgagcttgttttcctgcaactagacagtcttatctgggggtgatgggagacagtgacagatcttcaggtgttagattctcataaggagcatgcaacgtagatccctcgcatgcacagttcacaatagggttcatgctcctatgagaatcgaatgccactactgatatgacaggaggcagagctcaggcagtaatgtgagcaatggggagcagctgtaaatacagaacaatcttcatttgcctgccgctcacctcctgctgtgtggcctggttcctaacaggccgcggactggtgccagtctatggccaggggttggggacccctaatctaggacaatgttgtttgcacttcttattcaggtacccccagtgtatttttattttttgtttatttatttattcatttttttgagatggagtttcattcttgttgcccaggctggagtgcagtggcactatctcagctcactgcaacctccacctcctgagttcaagcaattcttctgcctcagcctcccaagtagctgggattataggcatgtgccactatgcccggctaattttttgtatctagtagagacggggtttcaccatgttggtcaggctggtctcgaactcctgacctcaggcgagccactgtgcccagcctgtatttttaacctgatacctacattttaaaatctcaggttgaaatacagagttaaaaatgatataatttatttttattggggtaaaatatatataacattaaccatttaaaccactttttaagtgtacagttcagtggcattaagtactttcacaatattgtgtgatcatcaccatctatctcaaaaaaaaaaaggacatgctttgcatttttcattgttttgacatttgcactaatgatacgaaagcaatggtgggtaaaactgttagtatcttaggctgaattaaggcagtggcaccaaactatactagtagacatgtattctttaccaccatacactcacagttgaaaaaaaaacaagccagtttcacttaagaaggtcctgaataagcagtaaacataaataattgtattaagtcatgacccttgtccgggtgtggtggctcacacctgtaatcccagcacttttgggaggctgaggcagcggaccatgaggtcaggagacctagaccatcctggctaacacggtgaaacccatctctaccaaaaatacaaaaaattagctgggcatggtggcgggcgcctgtagtcccagatactcaggaagctggggcaggaaaattgcttgatccctgaagatgaaggttgcagtgagccgagatcacaccactgcactccagcctgggcgacagagcgagacttctccaaaaagaaaaaaaaagtcttgacccttgagaacgcatatttttaatattctgtgtgatgaatgggaagtgtacataaagcatttctgctgcatatcaaagaactatgattgtctcaaggaaatagccctgtgggaatttcttacttgtattttcctggaatggactagattttaacttgaaaaaaaatgactgacaaactgtggttattcagatttgggtgtttggcacatgttttcacaaaaatgaacaaagtgactggccaggcgcggtggctcacgcctgtaatcccagcactttgggaggcaaaggtgggcagatcacctgagatcaagggttcgagactggcctggccaacgtggcgaaaccctgtctttactaaaaatacaaaaatcagccaagtgtggtggcgcacaactgtaacccctgatacttgggagcctgaggtgggagaatcacttgaagcccagaggtggaggttgcagtgagccaagatagtgccactgtactctggcctgggtgacagagtgagactctgtctcaggaaaaaaaaaaaaaagaacaaaatgagcctatcagttccaggaaaacaaatggcatttgttgccaatgataaaatttgagctttcaagcaaaaattgatactttagtaaacttctgtctaccactgtgaattctgtccttagatttactacctttttgctcttcatgtttttcatgtatctcagtcctccctgggatcatttagagtcttctttagttcgtttttttctccccccataaaaatgtatttctctcgcatttctgaagaatgttttagcagggttaatattatagatttggcagttattttctttgagcacactgacaataatattttactgtgtcctggtttctattgttaagaagtcagctatgagtcttaactgttgatactttaagagttatctgtgttttttttttccccctaaagtttttcttcttgtctttcattttctgcaatttcacagtgatgtatccaggtgtgattttcttttctgtttattctgcttgggatttagtggatatctgagatcttgaatcttgaatgaaatgtcttttcatcgcttctgaaaaacgtattatcttttaaacatttgccaatttctcttcttccctttcaagaccaatttaatgcatgttacatctacttactgaatcctccacctattttttaatcttttatctcttccagtttttaattctttagttgtattcagttgtagtcaaacataagtccattgaattttcattttttatttttcaattctagaattctttccagttgttctatcaccgttcattggaaagactgtactttatccattaaatttcctttgctcatttgtcaaagttcagttgactattttcatgggtccgttttgggactgtgttccattaatttatgtatgtttattgtttcaccaataccatcttatcttgcttattgtagctttattgggagtcttgaaaatggggagtgtgagtcttccagctttgttttgctttagtgcatttttttgttgtggttttttttttttttttttttatgatggggtcttcttatgttgtccaggctgattttgaactgggctcaagggatcctcccgccttagcctcccaaagcgttgggattacaggcatgagccaccatgcccagcttgttttgctttagtcttatgtttggtattctgggtctttgacctttccatatagacttcagaatcattttgtcaacaattacaaaatagcttgctagaaatttgatttggattgtgttgaatctatctatagattagtttaggaagaattattccttaaactgctagaatgatgcagaactaggattcaggtttatcttgacttatttttactttcctgggagagaaacctttaagggccaagcttaaggtagggatgttgtccgggcacagtggctcacacctgtaatcccagcccttttggaggccgaggcgggtggatcacttgaggtcaggagttacagaccagcctggacaacatggtgaagccccatctctactaaaaatacaaaattagctgggtgtggtggcatgttcctgtaatcccagctacccgggaggccgaggtgggaggatcgtgccactgcactccagcctgggtgacagagcaacactctgtctcaaaaacaaaaaaacaaaaaacaggtaggaatgtcttggtaggccctaggctttgacttttgactttcttttcttgtggggccactaaaaggttgccttagttttgcagcttttttctttggaactggcagttgccctcaggactaaaccttgagtgctggaatcttgcacttctagttattttcagcaatttttttttttttgagatggagtttcgctctgtcacccaggccggagtgcagtggcatgatctcggctcactgcaagctccacctcccgggttcacgctattctcctggctcagcctcctgagtagctgggactacaggtgcctgccaccgcgcccggctaattttttatatttttagtagaggtggggtttcaccgtgttagccatgatggtctcgatctcctgacctcgtgatccgcccacctcggcctcccagagtgttgggattacaggcgtgagccactgcgcccggcctgttttgagcaatattataattacctatactacctttactggaagttaaagtttcatcagagatctgccttcctcctagaattgttggttggtatatttagtctttgaaatttctgtatatgttattggaggagcagaaggaactctcccaagtttgcagatgtccattgagactttccggattgtaatagattatgctgcctgagataaacttacggtaaattttccaaagctctacctgtggggaagaaatgttgcaattctatcccagtgtttactgtctcttttcttaatgataggattcttaattttcatctgaatgtatcactacacaaaataaaaaacagatttcccagttttctttgcagctaggagcagtcatatgggtaatttctattaaatagctcagacttcttccagtgtcagacttgtacattgaattatctgttggccatctccgtctggatttgattatgatactttaggctcaacatatccaacgtagaattaatttctagatctctctgcccctttttcttcatcatctctgaatttagtcactactgttagaacccttaatgattactcctcctgtctccaccatcttcagactcacatatttgtatatatttaagcatatttcaaatctggctaatttttcttctttgtaaatgctctccttctcccagttcataccagtattgaccctggttcttggacttgccatctcttgtctggagtgctgcttctttgtttataggctgtaactcattgtccttttcgtatccacacaatcatgtctctgaaagaagcttgcaaccatgttattcccttgcttacacaattaattttgatgtctttagcctctggctctttgtaacctggtttcattttacctttccaggctcatttgtcgttccgggtcttaacatttgatgcttgataatgccagatttcttttatttcccttctcatgtatttgtggttcctcactactgtgcccttgctcaagactaactaggattaatcttttcctttaaaattgattggcttgagatatttatggctttagtcaaatttacatgtttcttttctgttttttagtgatagggtctctctttgttgcccaggttggagtgcagttgtgtgatcatagctcactgtaacctcaaactcctgggcttaagtgatgcccctgccttggcctcctgagtagctaggactacaggcacttgccagcatgcctggcttattttatttttatttatttatttttttgagatggagtttcactcctgttgcccaggttggagtgcaatggcgcaatcttggctcactgcaaactccgcctcctgggttcaagtgattctcctgcctcagcctcccaagtagctgggattacaggcatgtgccaccacacccggctaattttttttttttgtatttagtagagacagagtttaaccatgttggtcagggtggtcttgaactcctgacctcaggtgatccacctgcctcggcttctcaaagtgctgggattacgggcgtgagctcccatgcctggctttaattttactttcattttttgtagagatggggtctcgctgtgttttccaggctagtctccaactcttggcctcaagcagtcttcccagttcatcctcccaaaacactgggattacaggcatgggccaccacacccagccagctttatgtttttctaaacatgaaagaaataagctctgctgttgaatataccacagtctgaaatgagtatgttctaagttgcaaattttgtttttattaaaatattttattttagattttttgaaattgtgttttgtttggctagagtgaataaactgatattaatatgtgaattataaaattgtttcaaatcagtgcttaccggggtatgtctccttatttcacatgtgagaaagttatggccaggaaagactagtgattcttttaagtcagatgattagttaaaagcagagccaagatctactgtgatttccatccaaatataagcatctgccttaaatcaggtgtgtcagggtttttaagtcttatttttcaagttcccaggcaatattataagggcatttacattttgtgtgaatagcaccttgagtaatgaattgagctgtatacactctgtaccttcttaacaactctgattccataatgaaatggtttatttatagaactgtggcctaagtcttgcctatgcacctatcttcttggccatctattaattctagaagggaattttttaaaactccattgatagattattttaagtattctaatgaagcaggcatggtagacgtaatgctttatagatgtgtgtgtctttgtttctagcatcaagcattgcacagttctctccaataacatagatcatctcttactgaatttaacactgtctgatatcatggtctccctggcaaatgcgtcaactttgcagaaggattgcagttggatagaaatgataaggaaatttgtaacagagacccttgaagatggctctaggctaaatagtaagcaactgaacagattgctgggagtatcctggaggttaatgcaaatacagccaaacagaggtaggtgatgctactttgcccttatttaagagtggagctcttacatgtgctatcttaaggtctagctttgaaatgatggcttgtaaacattccatgtagtcaggctaattgtattcaagccataaaaggtagctactgtctacttgaacactgaaattgtttatggctcagagtatctctaagtgggtaggtccactctgaagcagattgataaagatttctaccctcttctgatctagtttggctagaacttgagaactttttcccttgattgatatggcatgaatcttccctgtctctttaccttttttctagcttaaggttaagttatattaagtcagttttagagtgacttactaattctttgattttaaaacaaagttttcctatttggttcccatctaaattgcctttctaatattctggtttttgtcattcctaggtttgttgttaagaaaatttatactgtaactactgattggtttgacttttttattaggctattgctataggacttcaatggtagttgtctatttgtggctaaaattggctttgccataggaagaaagtaaagtacttcggtgcattcagaggaatttgggggctgttaaacattttttgattcatatgcaagttgttttctttctgtttgtagaggacacagagactcttattaaggcagtttatacattatatcagcagaggggccttatccttccagttcggactttgttattgaagtttttcagtaaaatctatcagacagaagaactgagatcttgtagattcaggtaaaatcttgttatttttcctttcttttttctcttgctgagtttttctgtagtctaagtatttaaataattttagagagattaaatctttggagaagttcattctttttaatcctacttgtttgcatttaagaaatggtataaaattttaaaagatgcatacgtaatagtgccagtaaactttatacccatatctgaacagataaaagactgcttaggcatgcatttctacctgtccacttatagctaagggacagttggaacaacctcagccctttctcttcccctcccataaaaattacggaggttgaatctctagccattagtgacatattgaggcatatgggataagagtgagggcaatagaagatgagaaagtttctggcttagtttagtgctatcagagagagacaacaaaagagtggactaaggaatttttcaataaggtgagtttgaggtttatttggcatagtcagaaatgtttgagaggaagatacagatttgggatacctcaacatatataggtagttgttgtaacgtattctggtatttactttaagccaagttactttacataatctcaataatcttcatactgctactgtgaggtggatactgttagcttccattttacagaaggaagcagaaaataaataaattggtgagtattatgtagctaatgtatagcagagctgagacttaagttcaggtctatcttgacagcaaagtccatgatagaatcaccagcctttcaggggacctagtgaaaatgttcactgttattcaagacatttacactccagcaagtattctaaagaaataaaaatagcacaagtttgaagctattttgtatgggagcaacttatggtgaatgtgtacatttgttaatatagtataataacaccgattaggataaatagttaagtgtctctatccttcaaaataaaaatacaatttagatactgccccagttaacattaatttagtgggtaaagccttggaaaatgatgctggcatcttgtaggttctcaaatgtttaaatgaataaatgtggtattattgatacataattagtcactttgtgatatatttaagttaaaaaaaaattttttttttgtttaaatttatttcccttgtctttgagtattacattttattcttctttggcctttctaagatatcgtagtaaagtgttatcccgttggctggctggcttaccattgcaacttgctcatcttggctcccgaaatcctgagctctctacacagcttatcgatatcattcataccgctgcagcacgagcaaataaagaattactaaaaagtttacaagctactgccctccgaatttatggtaagagttcatttgtttaatggtatgggtagtcattgatccaccctgatatacaaaagaagtttttaaggggagctctgtaattttgcctttcccttagtctgaattagtaataccatggttaaattgccagaacaaaacatcatacagtaaattcattttcaatatttattagaatatagaaggttaatgattgttgatgcttattgcattcttaaattgtctttcaaaccacttgctattcataaattcaaaactaatctgatacttaaaaattcctttgaagctctgatggcaagacatatctttattacttatttaatcatagtgaatatctcgtatgactttcatatattctttgttcatctaggactgacttaactaatattttaagcaaaattattaaaacataactgggatgtatgtatgcatataattattgaaatataattcacatactataaaattcaccattttacaatgtacagttcaatgaattttaaaaaatatattcctaaggttgtgcaactatcaccactgtctaattctaaaacatttttatcaccccagaaagaaacttgtactgattggaagttcatccttattcctttcttcccccagcccctggaaatcactcatctactttctgtctatatggatttgcctatcatggatattttggaattacataacatggggccttttgtgtctggcttgtttcacttagcataatattttcaagatttgtccgtgttgtaacaagtatcaatactttattcctttttattgttgagtagtattttgttgtatggatatgtcactggtatttatccatttgtctggtgatgaacatttgagtggtttccaccttttgtgggttgtagttttaaatatgtatttttcaatattggtcatatatctgtaggtatatatatatacacacagcaaacaaagtcttttgctttaagtcaggttgatgtaattgtcactgtttagcaaaattgcttgtttactttgcattcaatctcttttccttattacccccctgaaagtttttatttctaacaagacacttgtatattaaatctttaaattatgtttggtgttttattttatgcagtagcttaacaagccatacatatgtgttttatgatattaatataattatgcttttatgtaattgatattcataaaattcagcataaaatgttagcccataattcaatggaagtcattgatctgctttattaatctctggtttgcatgtcttttatagttgtttttaatatgtctatccacctcactagatccacaagaaggtgctgtggtggttctccctgcagactctcagcagcgtttggttcagcttgtatatttcctacccagtctgccggctgatttgctttctcggttaagtcgttgctgtattatgggaagactcagttcaagtttggctgccatgcttatcgggatactgcacatgaggtagcatgctcaagtgagctgtattttaagtgtataatctttttccccttttactggtaatttgtgaattacggaagccttttgaagtcgcatacactactttcatttactcttaatgcaacaattaaaactatatcactaggtagagtaagttcacaagagtaagactgtttcaagttacttgtttaatgacttttatagatagcttggaataagggttgaaatagaattatcaaaagtgtgtgtagtaagggatttattggtaggtgatggtgtcgtacttcaaacctttgttgttatggaattgcagtatagaccttttcttcagagagctcagaatttaatgtagctggtgaattaaacaagcttgtggactgagaccaggaatcacttgtaatctctcactttttttttcctggtggtataataaacataacataaaatttaccattttaacctttcttgaaaagttttgccaggcgtagtggctcatgcctgtaatcccagcattttgggaggccgaggtgggcagatcacgaggtcagaagttcaagaccagcctggccagcatggtgaaaccccatctctgctataaatacaaaaattagctgggcatgatggtgcatgcctatagtcccagctactcaggaggctgaggcaggagaattgcttgaacccgggaggtggaggttgcagtgagtcaagatggcaccactgcactccaatctgggcgacagagtgagactctgtctcaaaaaaaagaaagttttaatatttcaagagacaagttctcactctgttgcccagattagagtgcaagtggcatgatcatagctcactgcagctttgaactcttgggctcaggagatcctccctccttggactccaaagtagctagcactacatgccattttccatagcggctgtgccattttactctgaaactctgaaaggttttatgttgctcatgttggaagtatcctcatgtatatatcttcagtcatagtattttagtattcagcagtattactggttgtgggtagggtctgatgtggttttaggcagaaatagaaatctaggctgtagttgaaaacttttcttgtatagatcccctatctcaggtaggtaagagtagcttacttttaatagactttcttcataccagtataggacagatatttgactctggtcactggaagtgtgcttcataactgacaataaacttgccttttaccaaaacagagaaaaacatataaataaaatattgtttgtatttaaaaattttaggtttatttcttccttgtatatgcacattagaggggcctggacatattttttaagaattttaaatattgattagtttcccatgttttttctttttagatattaaaaaactgcactttgttttgtgtaagcaaaatgctaggccttttaaaagttaaatttttaaaaaaaattttccgtaacttaagagcttgttttttatttgacttccagtagagggcactctgttccttagatataacttacattcagttccgttaaatcaccccttgaatgtttcttgaaattgattctccttggaagatgcatttaatgtcttcatcaacatctgttcacttatgtttaataacttttgtcaaggattattttaaaatcttggggtttttttgcttttatctttttgtggcgatgagtggcgagaattgggaaaatatattaattttacaaatactgataatacagactcatatttaaatgattgtcattgtagttaaaagtctaccaaattaaattttgctttttagtatttgtacagagtccattagtagacttctctctatgtaggtatattattcccatctaaagtagtccctttttaaaaagaatacaaaattaggacttttcagccttcttgagcccatagcaccatcattttatcacttttcatagggtcataataagactagccaggcgcagtggctcatacctgtaaatcccagcactatgagaggctgaggcaggcagatcacttgaggtcaggagtttgagaccagcctggccaacgtggtgaaaccccatctctattaaaaatacaaaaattagctgggcatggcggctcatgcatgtaaccccagctactcaggaggctgaggcaggagaattgcttgaacccaggaggcggaggttgtagtgagctgagatcatgccgctgcactctaccctgggtgacagaaggagactccatctttaaaaaaaaagactgacggttagttcattcagacatatgttgggttacttcatatctttagttttttattcaaaatagctcctcttcttgaccatgactataaaatagtcaacttttaaattatttcccacttatactcttacaatgttgcttctcagtcctatgcatcctgtatactgttgccagattgatttttctgcaatactcctttactcatttctgatttttatcttgtcacactaattggtctgtgagatcaagtttagctcaatttttgtagttctgataccttgctgtctctattaaagcatttgtctaatggcaggacatgtaccacctaagcaaggattccatgtgttaaaaacccatcagctagaaatcattcatgtttattttctctcagcttttaaaaaatgtgtttagaattgctctctctacctttttaccaaccagttatagtttttttacaatctgatgttttcctcataccattctacttgtggtgtttcataataatatccagtggccttttctcagttcttacccctctaccccagtttatttatagccagattggggaaacagaaagcataaatacggaaagatgctccgtggtgttaggtaaaatctctgaggaaggagaaattggcttgcaccaagaagtttggcttgggttttaaatagggtgaacatatgacctggtctgccaggaacagttccattttactccttttggcccagcataatcagcgccagccacccccttttactcacagaagtgttcaggcttggaaagtatatatggttttcatagttttaaagacagtatgatatattgcttgtcatttatcacttttcacagggtcagaattttaaataggctgttaaataaatttgctgccccttttggccactggatggcacaattgcttcctgttttcattgaggtcaagaagataatagtttgtttttcaaccactattttgtacttctttgtgttgagcatctgtgctttttataacccccttagcatgtgctattgtccccatagacctttgcttatcacctgggaatgacactcaagaagagtgttttcattattttatgcctgtcccctccttaagaatattaataaggctgggtgcagtggctcacaactgtaatcccagaactctgggagaccgaggcaggtggatcacctgaggtcaagggtttgagaccagcctggtcaacatggtgaaaccccatctctactaaaaatacaaaaattagctgggtgtgttggtgcacgtctataatcccagctactcaggaggctgaagcaggagagtcgtttgaacccaggaggtggaggttgcagtgagctgagatcatgccattgcactccagcctgggcaacaagagaaactccatccccccaaaaaatatatatataaataaatataaatgcaattattataacagtaaaaaaattactaagtacttataggtgaattagaagttcctaattttgtttgatatttattcagttgtctgtgataaaaatttttagtataagtttgtctgattattctcagcctttttgcaatacccatgactgacatctgttttcttcctagccttaccttgaagggaatttttaaaggagacactagaaactgatctcataggaggaaccaaataatcctcatttaatgggaagctgctttacatttagctattccttttgagtcctctgccaataccttagctgcactattgtgaaatagacctagttacaactttactaagaataagaacacatagttgccttatagtggctttaaagataagttttctttgcctaattaagatacttttgcttagttatgtaggaagctgaagcttgtttaaacataactcatttgctgagggtaagactataaaaatcaaatagtaaatacatagcagctgaacctactactgaaaagcaaaacttcatcttggctccttagagtctgattttcagatgggatggaaattttctgttgtactatatatgttgatcaagtatgctttttaatgaaagtttgtattaatatgtttgaatttcaaactttcatactagggtacttgagcccttggatatgaaattaatacaaggcatactatgggttttattttaagctactaaatcaaacttgttttcagtaaagaacaatggttatatactgtgctacctttgacaagtctgtcaagttggtcacttctggtaatagttctccctttgttttttatagatcatcattttctgggtggaagtattcagctaaagactggttgatgagtgatgtagactatttcagcttcttattttccacacttacaggtaaccacattcacttgccagattaaaaaagaaaaaacctaatatgaatcacaattctccttctaagatttgccattttatcagtttggttcagttttgaagatgataaatattctatcttggagtgatttttgtgattagtaactggaaatcgaaagaatatttctaacctacatacactgttaggcttctgaggcaggaggatggatgatttgtctttaaatctcttatagtatgagtatcaaaaccctgagcattatttgaatgtcatgttattgtatttttaagtttgatgtactactactattattttaaatgtattatttgaatattttcattgtatacttggataatgataggattctttgaaattttctgaagacttgaaattaggagagttaatatagtgtcaggatccaaaaagaacttgacagatccaatactatgctgaatctagcaagataaatacttcagaagataaatgtaagctcctatatgtttactgtatatttatgaatgtatacatttgaggtgggagaggctgtgtgttttaatagtagttgtcagaaagtttttagtgattttagaaagctcattgggagtcagtactatgacatggctatcaaactagatgatgcctctttaggtagtgcttacagaagtatagtgatttgaacatcaaggtagatagggttgggccacatcagtggtattctgatcattttgagaactacctttcaggagtgactttggcagcttgtttgtgtaggttaggccaagtgtaaatagaggtggtaaggggaactagaaattgttgaatgaactatacatgtattgtcaaagtaaaaacacctagggggatggagtagttttgaaacatttgaaggtctattatctaagaacctaaagcatttgatatatatgtaggagtatattactgcttttacttgctcatttgcttttttaaacctaccattaattggaaagattatgcctttcactctaagtaaaattgtcaaaaccctagtagaagtggtaaaacctgtttcttgctatattatagattgggtctgatcacatcttttatataattatatgaatttaactgtcttcattgctagcattttattttttaaaatatagcatgaaatgcagaagctcagagaaaacaaggtagcttaaagaatgttcacttgaaggcatatgtcatctctgttttttaagaaagtcattgttttttgttttttgtttttttaaattggctttctttgttacctgaattagggttttcgaaagaggagttgacttggcttcagagccttcgaggagttcctcatgtcatccagacacagctttcccctgtgcttctctaccttacagatttggatcaatttttacaccactgggatgtaacagaggtaatagttcatttaaaaagaaactaataattattaaaattcagttcatcaaccagtaatagttactatatatgagttgccttgtgtgagatcttttcaaagatacttgtttaaagtgcttataatcttggatgggagaagtacgtttgaaaagggaaacattctttataaattgtgccactagaacagaacaaatcagcaatttgaatgatagatccatctttttaaaagaggaaagcattatgaaagagtaagaatttgaggttttgaaggataagacttaagtaagagttggtatccttgaaggtgactttttaaacggtagattattcaccagttcctttggttttaagaattactatgtaacttattgaaattaaatttaaaacccaaattctttaagttttgaagtttgttttacaagtcttattttttattttattttattttatttttttgagacagagttttgctcttgttgcccaggttagagtgcaatggtgcaatctctgcttgctgcaacctccacctcccaggtttaagtgattctcctgcctcagcctcccaagtagctgggattacaggcaggcgccactgcacctggctaattttttgtatttttagtagagacggggttttactatgttggccaggctggtctcgaactcctgaccttaggtgatccaccagcctcagcctcccaaagtgctgggattacaggcgtgagccaccacacccagcctacaagtcttattttttcagtaaatgtaaacatttaaaagaggactttgatttaattttattccttttacaaacctaatttttttattttcttaaataaccataatagtatttgtccaatacttcagttttctgacaaaccttcacaaataattgaagtaaatcttagagatatttaataaattaaagatataaatatgggaaatcttatgttttagtactacttaatgaaacttgaaattaaaaccacaagtctgaattaattaactactgactttaaaaagttttttgttactgttttggggtttggtttggtgttttttgtttttttgagatggagtctcgcttttgtcgcccaggctggagtgcattggtgctgtctcggctcactgcaacctccgtctcccgggtttaagcgattctcctgccttagcctcctgagtagctgggattacaggcgcccgccactactcctggctaatttttttgtatttttagtagagatggttttgccatgttggtcaggctggtcttgaattcctaacctcaggtgatcctcccatcttggcttcccaaagtgctgagattacaggtgtgagccactgctcccagcctggtgtcttctttttaagagatcttgctattttgcccaggctggccttgaattcctgggctcaagtgatcctcctgcctcagccttctgagtagctggggctgtaggcatatggcatcatgcccagctgctgacatgttttaaattggaattataaggctgatcttttgccctaataggcaaaattgtcttaaatgttacaaatacttatactaaatacacaaacagtatcacaaacattaatactaaagatttgtttcatttctaagtttttaagtttatttttattcttttgtgtgtgcatgtaaatttaggggtacaaatgcagttttgttacatgcgtaagactatacaatggtgaatcaggtatctgagagtatcacccaacaatgtacactgtacccattaagtaatctcctatcattcaccccactcccacccattcacctttttgagtctctattgtatgtcatttcacactctatgtccatgagtagacattatttttagctcccacttacaagcaagaatatgcgccatttgtctgtgtctgacttgtttcacttaagataatggccttccgttatatccatattgctgcagaaggcatgattttattcttttctatggctaaatagtatttcattgtgtgtaaatatcacattttctttatccacgcatacgttggtgaacatttaggtcaattccatatatttgctattgtgaattgtgaatagtcctgcaataaacataggtatctttttgatgtaattatttcttttcctttgggtacatacttggtagtgggagtgctggattgagtggtagttctattttcagttatttgagaaatctttatactgatttccacagaggttgtactaattgacattctcaccaacagtgtgtaagttctgcatcctcaccaatatctgttttttttgtcttcttaatagccattctgactggtatgagatgatatctttttgtggttttaatttgtagttctctgatgattaatgtgttgaacattttttcatgtgtgcctttttggccaatttgtcatcttgaaaaatacccattcatatccttttgtctactttttaacggggttatttgattttttgttgttgcttgagttccttgtattgtaaatttttggtattagtctcctgttggatgcatggtttgcctatattttctcccattctgcaggttttctgtttgcttaggtagttatttttctgtgtagaaattttttagtgtaatgaagtcctatttgtctattgttgtttttgttgcttgtgcttttgggctcttagtcatgaattatttgtctagatcaatgtccagaagagttttctgtagattcttattatttttatagtttcatgtcctacatttaagtgtttaatcatctcgagttgatttttgtatattgtaagagagattcagtttcatttttctgcatgacattccaattttctcagcaccatttattgtaaaagttgtcctatctccagtgtagttcttgttgactttgtcaaagctgagttggttataaatatgtgctgttatttttggttctctattctgttcccttgatccatgcatctgtttttatagcagtaccatgttgttgtgtttactacagccttgtaggtaatgtaaagtatcacagggaatgtgatacttccagctttgctctttttgcttagtattgctttggctattcaggctcttgttttggttccatattatttttaggatggtttttttctaattttgtgaaaaatgatactggtattttgacagccgtttcatttaatctaaagattaatttggttagtgttgtcattttaacgatgtcagtctttctatctgaacattgaatgtttttccatttgtttgtgtcatctacattttctttcatcagtgttttctagttctctttgtagagctcttttacctccttggttaaatatattcctaggttttttttttttttttttttttagctattataagtgggattgccttcttgattttgttttcaactagttattggtatatagaaatgtactgatttttgtatgttgatcttacatcttgaattcatttctagatataagatcataccatctagttggatatggtggcatgcacctgtagtactagctacttggaaggttggggcagtaggatagctggaacccaggagtttgaggatgcagtgaactatgactgtgccactgcactccagttggggcaacagagcgagactccatctcttaaaaaataatcatatcagcaaacagggataattcagcttcctcttttccaatttggatgtcttttattttttttctcttgcctgattgctctggctaggacgtcccgtactatgttgaataggatgatgaaagtgggcatccttgtcttgttccatttcttacaagaaatctttccaacttttcttcattcagtgtgatgttggctgtgggtttgtcatatatggatggcctttattattttgaggcatgtttcttctatgcctagtttgttgagggtttttatcatgaagggatgctgaattttatcaaatgcattttttgtgtcttttgaaatgatcatatggtttttgtccttaattctgtttatgtgatgtattacatttattgatttgtgtatactgaaccattcttgcacccctgagatagaaacctgcgtcatggtatattatctttgatgtgcttttagagttgatttgcaagtatcttgtggaggaattttgtgtctgtgttcataagggaataaaagaatgaacaaagccttcaggacatttgggacttatgtaaagtgactaagcttatgaattattggtattcccaaggggaagaaagatttaaagtttagaaaacctagccaacaaagtaattgatgaaaactttccaagcctaccaggagatttagacgtccagatacagaaggcctagcagtcttcgggagaatacattgcagaaaggacttcatcgtgacatattataatcagactgtctaaagtcaaaatgaaagagagaattctaaaatcagcaagagaatagtgtctagtcatttataaagaaaatcccgtcagactaacagcagactttttagcagaaaccttacaggccaaaagagaatgggatggcataatcaaagtgctgaaaggaaaaaacaaaaaaaccctgaaagccaaaaagtactttattggctgaaagctgggattagagaggtggtaaaagatactcatacaaacaaaccacaagtgagcaggagtagctatacttttacaggtaaaacagacttcaaatcaaaaacaggtttaaaaaatacagagaaaatcattatgtaatgatgaacggatcaattcagcaagaggatataacaattctaaatatatatgcacccaacaccactaagtatatatgcacccaacaccagagcatccagattccaaagtattactagacctaaaggaagaaatacatagcaatacaataatagtggggtgctttaacaccccagtctcagcattagatcatcgagaaagaaaatacaaagaaacatcagacttaagttgaactttagactaagtggaccttacagacatttatagaatattctactcaacaaactgcagaatatacattcttctcatcatcacatagaactacctatctcccagatagaccatatggtaggtcacaacaagtcccaacaaattttaaaaaatcaaaatcataccaagtatatctcctcagaccacagtggaataaaataagaaatcagtactaagaggaactttacaaatgatgcaaatacatcgttttgcattaatgtattgcaaaatcaaacaacatacacctgaacgatgacgtgctcttgagcaatcattgagtcactgaagaaattaaaatagaaattcaaaacattttagaaacaattgaaaatggaaacaaatcatactaaaacccatgagatacaggaaaagcagtgctgagagggaacttcatagcattaaatgtctacatcaaaaaaggagaaagataactaatcagcaacctaacgttgcacttcagggaactagaaaagtaagaacaaaccaagcccaaaattagcagaagacaagaaataacaaagattagagcagaactaaatgaaatagagatcaaaaaacaatacaaagggtcaacaaaatgcaaagttggttcttcaaaatgataagattgatagccggtagctagactaaggaagaatagtgaagatccaaatagacaaaaaaagaaatgaaaaggagacataacaactgataccacaaagactgttacaaacaactatatacctacaaactggaaaacctagagggaaaatggataaattcctggaaacatacaactccccaaggttgaaccaggatgaaacagaaaatctgaacagaccaataatgagtagtatggttaaattggtaataaaaaaatctccaggccgggcgcagtggctcatgcctgcaatcccagcattttgggaggctgaggtgggaggatcacgaagtcaggagttcaagaccagcctgagcaatatggtgaaaccctgtctctactaaatatacaaaagttacccaggtgtggtggcatgcatctgtagtccctgctacccgggaggctgaggcaggagaattgcttaaagccaggaggtggaggttgcagtgagcctagacagtgccactgcactccagcgtgggtgacagagcgagactctgtctcaaaaaaaaaaaaaaaagaaaaatctccaaagaacaaaaagcccagaaccagatggattcacagctgaattctgccaaatgtacaaaaaagagctaatactcattctcctgaaattgtttccaaaaatcaaggagggaagagggaattctccttaattcattctgtgacaccagtatcacgtgataccaaaaccatacagggacacgctgagaaaagaaggctacgttcctatgtgtgtgtctctttttttttttttttttggaaacacagtttcactctgtcgcccaagccggagtgcagtggcacagtctcaggtcactgccaacctctgcctcctgggttcaagcaattctcttgcctcagcctcttgagtagctgggattacaggtatgcaccaccacacctgcttttgtatttttagtagagacggggtttcaccatgtaggccaggctggtcttgaactcctgacctcaagtgatctgcctgccttggcctcccaaagtgctggaattacaggtgtgacccactgtgcccgaccctattctttatttcttaaatttttttctttttctttttcttttttttttttttgaccaagtttcactcttgttgcccaggctggcgtacaatggcacgatctctgctcactgcaacctctgcctcccgggttcaagcgattctcctgccttagcctcccgagtagctgggattacaggcgcttgccaccatgcctggctaatttttgtatatttagtagagacagggtttcaccatgttgaccaggctggtcttgaacttctgacctcaggtgatccacctgccttggtctcccaaagtgctggggttacaggcatgagccaccatgcccggccactatttcttaatgttgaaaggtgcttgtccagtgagaatgcaaaattatgtcatcctaagtaattttgatttcattttttcatgaagtaatattctctcctggctaattttattttttgttagccagttttgacagtgttgtcaacagggtagtctctaggttcaagttacaacctaatcttttgttgttgttgttggtataccaatgaatttatttacttgataaattcattttattttgaattaccttcatgttcttcctatctctagggactatatcttttatagatatttaacttatttctctcatggctttgtttgactctggtcacaatgctagggtcatgccaatgacatcctctttttattacccatagtgcctggtactgtgtttacttataggtcttgaaatcttacgtttattttaggttttcagcttgcttttatctctcagggtctgtatggtgacttgtaaattctcagggaaagctcagcttctatacggttatggtagcacatgtaactttcttggtatgatacttggggagagttcaggtagtctcctatttgtgaaagaggagattatattagagtagttatggcagaccagttttctgcaaaaaacagtggagaatggtatttagaaaccaacatgtggaatttaggtgtgcttattgctgttggatgttgcttctcccgtatcctcttattggacataaagtagtcattcaacaccacagagtttattctagttatatcctgtttcttttttgtacctgctttctctgatagaaacctggctccagttatacttaatatatttacttgatcagcttctctgtctataattagtcttcctttgctgccacccctctcatctcactccatttgggctctggttctttcgggctgtctactctgggccatctcagcactcccaccaaatccagtgccagagtttacctagtttggctccagccattggctttagaactgaattgtttagggcagcaaggggaggcagaagggaagtgatgaagtggtcattattgaatgtgcacttttcaaatgtggtttggattaataaaaatattcaccatgtttgttttggagtaggaagatggccttggaaatgagttttttctcattgttacttaatggtataaaagaagttaccaagtaaaatatctgggtaatatctacaagatattttacagagaaataatgtatagatctgttgattcccccccccacacactctcaaatctgtaaataacaagtataaaaagtcttgatttttcagggctagatgacagctctcttgaacttaactgactgatctcttcctagagtgatattcatccttctaccattcttgttttttcatgtgatgtttttacatatttcatttttggtagtatactgtatcagattctggagtttgtgctgtgactgatatctgtgaaggacttagtactgttcttgactcttcttgtttttctgagaacttaggaaattaaaaatactaggggttttacttctaactctctactttttgtgcagatttcttttttacctttagagaaggcagtgttatgattaaattgaacaggatatttgtattttctgggtcataaatatttttctgtgatacatttctctatcaggtgggcaaaaaaaagcttttgttagccctttgttcatatcactcagatctttctgtcatagcactcaatagaaatacagtatgccctcacttaatatcctcagtaggttctttaggaaacagaaatgacatacacggcaggtccttgaataacacttattttttggagacagtgtctcactctgtcatccaggctacagtgcagtgtcaccattatggcttactgcagtgcagcctcaacctcctgggctcaggcgatcctcctgtcccaacctcctgagtagctggtaccacaagcatgtgctaccacatctggccaactttttttttttttctagatgaggtaccactatgttgcccaggctggtttcaaactcctgggcttgagcagtcctcccaccttggcctcccaaagtactagaattacagtcatgagccaccaggcctggctgaaaaacgtttcttaataatgttgattggggggaaaaaatgattgcattatacattgttttgcttaaagtcatagtttccgagaacctgctgaagttgttaagtagaggacttactgtgtggtctccatgttggtagattgtaagccacttgaggggtatgagaaagaagagaaggtttctcattcttttattcctgtgcatggcatctaataggggctagctcaatattcaacatatgattagtagatgaattatttggaaaattaggccatatataaggtctatttgtttgatctttgacatttgcatcttcaaaataatttgttatgtgtttcctattaatatgtagagcaagtaggtattaaaagaatctattgctgggcacagtggctcacacctgtgatcttagcactttgggagtcttgaggtaggtgggttgcttgaatccaggagtttaagacaagcctgggcaaaatggtggaaccccatctctactaagaatacaaaaattagccaggcgtggtggtgtgcacctgtagtcccagctactggggaggctgaggccagaggattgcttgagccaggtcacgggggttgcggtgagctgagactgcatcactgcactccagcctgggcgacagagtgaaactctgtctcaaaaaaaagaatctgttgaacttgtttctgatctaaaatgttctgatttggttagtggttttctccttttctgacaggcagtttttcacagtttattggttattcctgcccgaagtcagaactttgacatcttgcaaagtgccatcagtaagcatttggtaagtatccttaaactttttctcttaagaatgaacacaggatgcattggttagaatagagttttccacagccccagaaagagcatgtctggaattctaagattaatgatatcatagtctcttgcagcatgatgcattggcaagaactgaggaatcttggtatttttcctggctgttattaatttacttctgagtgaccttgggaaaagtctcttcttaggacctcacttttctaaatcagtgaaataagggacctgaaaattaaacttcacatcctttccaacttctgtaattcacgtgtgcttggcctcattgtattgagaattcaacatctagactgaagtctgggttccacctagaaggtttggggtccaaagtaggcacatcatctaacccggcacaaggtgtggtcactggcagctgtagactcaaccctgagactgacctgttatttgatattggatgtctcatttccattggtattaaattcacattagatatacctctgtagttgcttttaactttctccagtgtttatactcttatctttggctttttattgtaatgtgttatagtacaaagcagggctcccaaattatatctttgagaaacacacttgtttggataaaatataggcacatccagactcctttttctcttaaaatgttacttcccttgagttggaagagagtactgctttgaattcctagtactttctccctgctgtcaaacttccagtccttatccctgtgccatcaacaatgcccacttttttttccctacctccactccagagaattagactctccgttgactacattcattattctagtaaaagatcaatatgccagtcagtcttggccactattttcacacagcctgtggaggaggttaagacatcagagtttgcagactttgtaaaatcattacccaacagtagtctccaggagattgaaaccatgtatatatacagttacaagttagactctaccttaatgacaatgcatacagtacattctagatgaattagcaaactctaatgacccttcctgggtttcctggcagtgaaacagtcaaatgttaactatagtaatatcttttactgactccagtagaggtatgtttattcatgtctgaatgactaaatcaaagtgcagaggaaggctaattttgaaatgaactatttatacatttaattacctggcatatgagtggtgccacatgcaagttttccagcctgaataatttaaaaatttttaagtatgattgttggtattcagattttctttgagtgcatgaaataatccctttaaatagttatttctaaccagcagtagacattttatagaacatttagaagattctgtcatgaaggggaggcagtggattgggttaatagcacttcttgtgtttgcatgttttcaaagtcatataatttagggattaaattctcaaaggaaaacaggaccttaaggtgtggcaggtggcatatgttaggtatatattggttttcagtagaaataatgtaaagttaatcgtgaattaacaggttttggttttatgtggaggagcgggtctgttatgaagaggtgattaatctcgtttttctctgcttaggttgggttgactgtaattcctgacagcacggctggctgtgtttttggtgttatctgtaagctcctggatcatacttgtgtagttagtgagactctactgccatttctggcttcttgttgctacagtcttctttattttctgctcactatagagaaaggggaagcagaacatctaagaaagaggtaattattttttattcttcaaccttaattttcctactgttcctcctcccccaaccaaataataaaatagacagttaaagataattaggttatacagataccttaaattctgtttcagagagtttgtgtcagcctagctagctttttctttgttccttcatgaatcccctttgtgttgtagtgaaaatttttagttttttgttctttcccctttaagttacaaatttgaaaacttagatggcattataaaatttcttgagaggtttcttttattaacattgctataagtctagcaagaaaaataaatctaccgttaggaggatgggctattagtaccaacctttgtattttgttttgagcttcattagagctagccagagtgggaattttaaaatcttggatttaaggaaattcttctaagatgctagtgcttttaattagtacttttgctcgtatataaaatattcaggctagagcttttagcgtagttgggaagattttactttaattttaaaaagtattttatgcttgtgttcttatttgtgtgcccattaaaagttcattgtagaaggttttaaaacctgctaacaggttggcaaatattctgtcacctgctgttaatgttttgatatgtgcctttttggtcttttttgaacttttaaatgacatgaaaatacatatactgaatgtataaaaaaacatttatgtagtttaaaaggtaattataaactgaacctccatttaaccaaccccaggttcggatatagaatatcatcagcacatatactgttaatgtaccctgcacagttaaatgtcttctacgtacccctctgccccagatcacttggtgttgatcaacttcattaccttaaaaaaaaaaatggttttatgtgcatttgtgaacagtatcaggtttgttttgcatatttgtggattttttgtaatgggaattatactgcatgtattttttgtgatttgattctctcagcattgcttttgagattgattgaagttgactcattcagctgtatttcattcgtttttatttctccataccagggttcagcaaagttctttctataaagggttagttagtaaatattttaggttttgcagaccattaggtctctgtcatggctactcagcactaccacggtagtgtgaaagcatcaatagataatatgtaaataaatgagtataattgtgttccagtaaaactatttacaaatacttaccatgggctggatttggcctgtggccatagtttgctcagtctgctctatagtattctgttacatgcatgtaccataacttagccattttattgtcagcattcaaattttttccagtaagagtatgtgcatagaaaaaaattgtgtatttcactttaaatatactataaaatttatgcataacataaattcgacgatagttttcttatacatcatcaaacattaggtctgacaggtcaagaaaaggctttataagtagcaaggaacttctcagggttctagagattttataagatccccacttaatgaaatgtgtgtgtattgctatttgttatttcctgtcacttgaagtatggcccctaaaacaacttcatgcaaagtttcaaagatctattgtagtttcttatagagaaacatcctttgacttcatgtggctggaatgaacaaaattaagtgtgtgtaatacttgtttgcctgtttaaaatgcccagttgtaggggtattctatactgggtactggaaaggttaacattactaggatattaggcacagttggcagccgaagtcttaggtacctaaaattcccatttgggctatttcttccccactggagaaggtgtttataagattacaaaatgatgaaaatgctaatcaaattactggggagcctttgatttcacaagtgctggccagaaagttaggtttgaccgagttgagttgtttagtactgtctgctgtgccttgaagatactgttctattgtctccttgcctcagtgttaactaatgaaaaaatctgctgttagtctgagccctcttagtttgtaggtagtaatcttacaggtagtaatctatatttttactgttctctctttatcttcagtgtgttgcagatcaggatgtgtcctagtgtagatttgttatttatcctgccctagacatagtgtgcttctgtaatgtgaagattcagttttttttcttcaagtctggaaagttattattaatttttaaccatcttcccccattgtttctattttcttctaaaaactccttttaaacatagggagctttttattctgtcttcgtctcttaaaaatctttcaatttgctaattcttttacttaatcctcctactgagattttatttcatcaacttttgttttcttttggatttgtttctattttggatttttatttggtattttgtcattttcgcgtgttcttggtttattggtgtttctttaaagttcttgttagttccattagctcctttttcctgcggtgtcggcattctcccttattttagggagcaagttgaacagacttgtatattttgggctgcataccttttccctaagtgtgtcttttgtgggagttctgtggaggtttatagagacttccctgtaggatagtttgacatttgcattttcctggcttcccattctgtgcaaggagcatagttcaaactccctgccttccatacctgggttctgaagcctcagcttccagtactgttgactgttgaaaatccttgccctaaaatcccacatacagtttttatgactgttggatatctttatatgaatttcattatagtttctttcacctagaggttttacccatctggccttgagcttggctgtcttttttttttaaggtctgtggttatttgaaatccactcaaattaagaaaagtagaaaatgaaaatatttgattattacaggagtaacttgtaaaacccaagggctaggaattagaaatttagcaagagacaaagcagcttactctacgtttcttctagtttgtgtagtctgtatctccgtgcctttgcattagctatgtctgcagtctggctttctcttttctccttgcacgtgactgtcccagctgggctctgcataagagtatctatttggcctagaatggattcattattcaccatagatggaattaccatatgtgcagtcagggaaattggttatatagtgaaggggctgctccctctagacctggaggtagtcaggttctcttagaaagatttaggaactaggaagattatacactcctggtaaagaagctgcaaaaaggtcagagcctttcatagtcagtggactctaggtctatgtgaatattgcaccatctaattaacacttggagaatgtggttaggctagctgcaaggtcacctgtctctaccataaacattttgctccataaagataccgagagaatgatgttcttgatttggctcttagcctaaatgttagtgaaaaacaccatgtttattgaaatgtggatagtttctcttgttcttaagtttaattagggcccacttgtcattttttgtttttgcaattgcttttgaggacttagtaatgaattcttaatctatcttgagttaatttttttttttgagacggagtctcattcttttgccaggctggaatgcagtggtgtgatctcggctcactacaacctccacctcccggattcaagcaattctcctgcctcagcctcccgagtagctgggactgcaggcgcgtgccaccatgcctggctaattttgtatctgtagtagagacggggtttctccatgttggccaggatggtcttgatttcttgacttcgtgatccacctgcctcagcctcccaaagtgctgggattacaggcgtgagccaccgcgcctggccgagttaattttttgtatatgatgaaagatagggatccatttttattcttctacaaaaggatagccaattgtcccagcaccatttattgaatagggaatccttgccctgttgcttgtttttgtcaccttagttgaagatgagatagttgtaggtatgtggctttatttctgggttctcttttctgttccattggtttatctgtctgttgttctctatcattaccatgctgttttggctactgtagccttgtagtgtactgtgaagtcaggttgtttttgcttaggattgctttggccattctggcttttttggttccatgtgaattttagaatatttttttttaattgtgtgaagaatgatgttggtagtttgataggaatacagttgaatctgtaggttgctttgagcagtgtggccattttaacaatactgattattccaattcatgagcatggaatgtttttccatttatctgtgtcatctgtgatttctctcagcagtgttctgtagtttttcttgtagagatctttcacctccttggttagatgtattcctaggtatttagtgtgtgtgtgtggctattgtaagtgagattgcgttcttgatttggctctcagtttaaatgttattggaaaacatgttccttaaaaggacatttcactttgggggaatatagaaggggggcttttcctgtgggcatttgctcactgactcatttctgtctctgttattgtagggacaagctgtggggggtctgtgtctccatcctggctctcttgcctcgagtcctcaggttgatgctgcagagcctgcgggtgaacagagttgggcctgaggagctgcctgttgtgggccagctgcttcgactgctgcttcagcatgcacccctcaggactcatatgttgaccaatgcgatcttggtgcagcagatcatcaagaatatcacggtaagaagcatggtaccggaggctttgcagtattagcataagaatgaatttatgacgggggcatgggggaaagtgtgttttgagggaggaaagggatcccatacattgagtccaggaattaatcccaatatggtagtttctcagggtctcccgtgctgtccagcacctgactgtgacttaatgggggggggggtgtgtctgtgattccagaattagtaataaaagtcttaaaataatcaaactcaatgaaggtgacaaagcttagtttagtttgaaaaggtaagggcatcagagtcattcctacctagactgtgatacagactctattaatgaactgtgacagcttggcaagtttttttctttctttcttacctatccaagcttgttttcctatctgtaaaaatgggaataatgccaactttattgtgttttggtgatcattaaaggagataacccaagtaaagtttttagtatacctgacatttgttaagtgctccataaatgttgtcattaaggaaattatttagcaggaataaacttcaggccaatttctagtcacttagttcactctaaagtaagaaaatcagaagttgcagacttcagctttgtctaatggttggctctctgccttcagctgtgtctgtttggccgggacagctctgttgtttaggattcctttggtgattttagtttggggggggggcggttaaaaaagtgtcttgtatagtttgattggcagattatcccttgagattcgtagtgatactttgaagtaatagtgcttttacatgcatataacacaggtgctcattagtattttttcagtagcctttgtaggggtaatggaagtggcagtggaataattcagaaatagtgaagggaagaaaatcaagagcttggattattcccagactggggaatcagcccatctttgtaaagaagagattgacagaaattgttggttggccctgtagagttattctcagttggcactggggtaaagatcatgagacactagaatggcaagagggagaggcaagggtgaagggatggttggtggtgaaatttcattagtctctagcatgtgcaggagggaacagacttaacaagaaaccattagcatttgaggatataactaggaattttcactgcctgtggtaatgcccaattaatagttccctgtttcctggaagacttcctatggtaatttacagatggggatacagttgccaaagctctgggaaattgtgtttgggtgtgaaaaatactgtcaggtagcatagtgatttgggtgcagttctcagattactcttgtttttctctccagacattgaagagtggaagtgttcaggaacagtggctcacagacttacattactgcttcaacgtgtatatcactgggcatccccaagggcccagtgcactggctacagtgtattgaagaggccatagtacctcctgtttgaagttgtttattcacatctatcttatttgaagaaaaagactgatgtaatagatctttgtcattaaagctgaacttttaaagaagtttacgaa

SEQ ID NO: 46 - DNA, 88777 bp, Homo sapiens
ccagctacgagtggcagcaagaaggcaattcctggctggcggttggcatctaagcaggtaactcagggtgaggtggaggctcggtgggaccccgaggggatccccatgttctccctctagaaaggcatttaggtaggaccaaactggcacggtgggaaacctgtggcttccctctatctggtggagcttggactttagcgggcatcagaattttcaggacagcttgtacaatgcaaattcctaggtcccccaggaggacttgggggacctaggaatctatattttcactagctctccagaagactctggaaatgctggtggtgcaacaccatggctccccgagctgccactcgtgggtcccccttcccacctgagcctccctcatcaaagtgcagtcagcagggacacgggtgaaagatgggagggacctgcaaaaattctcatttaggaggaaaaagaaaaatgggggatcggggaggcttccttagtcatttccagaaggtttagaaatgcaagcgagaattgctgcctgctgggaagggtctacaggcctggcccgcggaagaggccaacactcggcaaatgccacgactacctgggaatacatgtggggcagctggaatcgggcagacctgagtgtaaactcaagttggccactgccggctgtgctgcttcaggcgattctgttgacctttctgtgctacataatgaaaattcttattttactgagtgcaggggctgggcggggcgtggtggtgagagcgaggatgagtatgatcatgggtagaatgcacttagctcagccctggctctcggggctgcctggggctggctggggtcagtgaaatctgctatcccaacatgtgagctctggcagtcccgacctgggaaaacattgtgtctgtgcccccaccttcagggaaatggaagaccagaggggtcatgtctggcccaagttcattttttgggaggctgagccagggatctgacacttagagctgtgttcccaccacagcctctcgtgggagaggctgggctgctgatgccagagtgggaacagaggtcagggctgtaagtagaggacaggcagcacagccgtgggctctggggagctgggcttgggggcaaggatcctgggcctgggctgccctcttcagctggggccagggtccctggcagaaaggggcatacagactctctgccaaagcccgggttgcccatggctgggagaggggtggggcacactcatgtggggcaagaacacatctagggctaggagttagcacacactgacctgcacgctgcgcactggccaggccatcctgcaggggttcagtcataagggctggggctccccattccccaaggagaaatcaaccagaaacaacctgtacttaaggtaggactgaaataacacagtatatcatgaaaaaagtcttacctggcattttatctttttctttctttctttttttaaaatatagcactataagcattttatttcagttttgagacagggtcttactctgtcgaccaggctggagtgcaatggctgagtgcaatctccaccttttgggctccagtgattctcgtgcctcagcctcccgagtaactggtactacaggcacgtgccaccacgctgggctaattttttgtatttttggtagagacagggtttcatcatgttgcccaggctggtctcgaactcctgagctcaagcgatctgcctgcctcagcctcctgaagtgctgggattgcaggtgtgagccacaccatgcccagcctttttgtttgtctgtttgtttttgagaaggagtcttgctctgtcacccaggcaggctggagtgcagtggcacgatctcggctcactgcaacctctgcctcccgggttcaagtgattctcccacctcagcctccggagtagctgggattacaagtgcacaccaccacacccagctaatttttgtatttttagtggagatggggtttcaccatgttggctaggctgatctcgaactcctgacctctggtgatctgcctgccttcacctcccaaagtgctgggattacaggcgtgagctaccacaacaggcccatttttttttctttttttgagacaggatcttgctttgttacccaggcagaagtgcagtggcatgatcactgaagcctcgaccccttgcctcagcctcctgagtagctgggactacaggtgcacaccaccataacaggctttttttttttttttttttaaatagagacagggtcttgatatgttgcccacagtggtctcgaactcctgagctcaagtgatcctcccatcttggcctcccaaagtgctgggatcacaggcatgagcctctgcacccagcccattttatcttaaaaattaaaaaatgatgaacataggttaagtttatcttaagacagattttccactcatgtaattactcataatgaatatttttacttataatgagattatgtagtacatgcatattacacaattagtgttttcatttgataccatgtaatagtcatagtcaacatttattaagccctcggcatgtgccagtcactgttctgagtatgttacatttattattattattattatttttgagacaggatctcactctgtcacccaggctggagtgcagtggcacgatcttggttcactgcaacctctacctcctgggttcaagagattctcatgcctcagcctcctgagtagctgggattacaggtgcctgcaaccatgcccagctaatttttgtatttttagtagacaaggggcttccccatgttgccaggctgctctggatctcctgaccacaagtgatccacccacctcagcctcccaaagtgctgggattataggtgtgagccactgcccttggcctgagtatgttacacttatcaattcattttatcctcacaattagcccatgaggtaggtactattaatatccccattttacagacaagcaaactgaggcacagagacattaactgatctgctcatgacttgacttcagagcaggcacatcttcttgctagctcaattagactgcttctttctttttaatgcccccataatattctattattgggtatagtgtaacttatttaatacatgcccctcttagagatgaacatttagttacatgtaggtactttccaataaccagtctcctcttgatgaatatttgggtgtttttcatcttttgctataacattgttgcaaccagcttctttgtacacatatatttatggccttgagtaattctataaggtaaatacctagagatataattgcagaaatatatacacacacacatatctgtgtgtatatatgtaatatgtatgtgtatatgtatatcaaatatatatatgtatgtgtatatatattatatattttttgagacagggtctcactctgttgtgcaggctggagtacagtggtgcatcatgacccactgctgcctcgacctcctaggctcaaacgatcctcccacctcagcctcctgagtagctgggactacaggagtgagccactacacctggctaatttaaaaaatattttgtagagacgagggtctcgctgtcttgcccaggctgatctcaaactcctggattcaagcaatcggcccatctcagcctcccaaattgctgggattacaggtgtgagccaccgcacccagtcgaaatgtttttaaagttgatgaaggaaaaggaaatgtacaactcataagagtggcccataagtggcgggagctactgtgagtgctccagggagggctaaggactctgtctcctacaggcatcaggatgttgggctgggtccagagggtgctgcctcagcccccagggacccctcggaagaccaagatgcaggaggaagaggaagtggaaccagagccagagatggaggcggaggtggaaccagaaccgaatcctgaggaggccgagacagagtccgagtccatggtgagaggtagagcgggaggaggggcaggccggcctcgctgctcagggtcttcccagtttgggccatctgctctccagggactttctacagcagaaaaggttggcatcagaaggaaaagtgggggtcacagggtcccacacttgttcgagtgagaaaactcaggttcagacagtgggtagggcttgcccaaggctaacattttctgtaaaaggatagatagtaaatattttaggctttgtgagtgatgctatctctgctaattactcaactctgccattatagtgtgaaaacagttataggtaatgcatgaatgaatgagcatagctgggttccaataaaattttatttataaaaacaagcaatagcctagatttggcccacaggtcgtattttgccaacctctagagttcagaacagagctactcacaggagccagtccatgaactgtttattactagtccatgatgattaaacagtttgtaccagaatgtaaatctactctgtagctaagtacactgattagtttagttgctatttattttgtaccaagactttctcaatgaaggaagcagtgcattgataaacattctggtgcaaactgcttaatcatcatggaccagtaacagtttgcagactggcacagatccatggaccacactgtggagtatttctccagaacttttcctctgcaacccatccattcaggagctggatgacaactaattcagcagctcaattcgacacatttgatttagcttctaattgatgccaggccctgtggtcagtgctgaaagcataaagatgaataggcattgccccggggactcagcagacaagagcccagccagttcattctgccaagagacataggtggagaggagggaacgtggtgagtctcaacattggcctcaactctccccttcttggggagccaaataagtgtgtcagaccaaactatgggagctcagaagagggagagtcatcttaactttggagattggaggctgatgggggagagcttcttagacgcagagggtggagcagaattttaactgagggagatggagaggctgggcattcctggcagaggaaaggctgttactagagaagggcagggtgtgtttaggaaacaggtatagggtgtgcgtatgcatgtgtatatgttgcatgtatatacacgtatatgtacatatatgtgtgtagtgtgcccttggtatgtctgtgtgtgcacacatgtatttgcacaatgggtatacatgacaatgtatgtgaacatgtatatgtacatgaatgcatgtatatgtgtttgcacatatgtttatgtgcacatgtattagtatgtctgtggttccatgtgcttgtgtgacatgctagtgtgtatgtgtgtgtatgtgtctacatatttctgagtatgtgagtgtactcatgtatttctatgtatctgcatgtttgtgcatctgtgaatgtgtatatacacatatttgcctgtctccacatgtgtatatatacacattttgtgtctgtgcatggatgttcatgtatatttaggtgcagaaatctgtgtgtatatgcatgtccatatggacatgcttctgtgtatgtgcaaatatgcacatgtgtgtgactgagcatatgtgtgtatactcatatttctgcacctgtatacatctgcaatgtacctatgcatatgtgcatgttgtgtgtctgtacacaggcagttatacgcatgtatgtatctgtatgaatgcatgtgtgtatatgcacgtttgcatatgactgtatgcacatatatgtgttggggcatgcatgcatatgtacatacacatgtatatgtacatatgtttttgcctgtacgtgtgtgcacatgcacttatttttgtgtctgtgcatgtgtgtgtatatatgcatgttggtatttgtgtgtcattgtatacatgcatatgtatgtgtatatatgctcacattgtatgtctgttcatgtatgtatgtgcatgagagtgagtatgcacacatttatgtgtctgtgtatgtatgtgcatgtatatttgtttgtacatacacataagtgcacgtagtagcaggaggtgtggctgcagaggcaggtgaaaggcagatggcagagaccaaactccacctagctactagggaggaatggaaagtttgggccagaaggagagggagagcactggcagaggatgaggggcgtgggctcctctcacctccctcttcccctcagccagccccaaggcttcataactatctctaaatggtcctttctcctctcaggccactgaagtggggcagcctcctggggatgttgtaggcctgggaggcttggaggccaccttggaccttgggggctgtgagggcccccagccccagatgaggggtccctggggctaggaggaagggagtatcccaggtggaaggtaaggccaacaggatttacagagatgatcctgaggaaagagtcgttcaggtcttttgtggggcagggatcccttgagggagaatcaggctgcccctgtccaaaccaggctggtctcacctaggacttacatgatcctgttcgaaccctctagccccccgaagagtcattcaaggaggaggaagtggctgtggcagacccaagccctcagggtgagtgcgagtgctgaagcccaggctggcatggcaggggggcccgcattctcccctcggagccgcagagcccacgaggctggcggacccatttcacagatgaggaaactgagactcagagaagctaagggtgggctcccagagacttcagttgagctgagctggagcctggctttctgacccctgggggtctctctcctctcccctgacttgatctccccaagcagggtagaaatgggcctgtctgaggccctagatctgaaggatgagagattcttttccagagaccaaggaggctgcccttacttccaccatatccctccgggcccagggcgctgagatttctgaaatgaataggtactgcaccaccctcccctctcttcagggccagcccgcctcccaactaccctcccagctagggagccctggggatgggggtggggatgggcactgcccttagctctgctgtcattctggggaaagccctgggacatcctgggaattggctgaagtgagcttcaggtggagggcgggctctccctaagtaagcctgaagctcccagtttgtaatttctgctggaaatccagtcatgcattcatctccattcaccctattcattcattccttcactcattcattcattagactgttaattcactcattcattcattagactgttagccccttgagggcagggcaatgtgaccaaaagaaacagtgggtcagagctgcatagtgagcgcccctgtacagggggccggacgtttctcagtgcttgggtgagatgcaggcccaatggggtcagagcttctgcttttctcagaaaagccagaaatccaggcttttgcatggaatctcccagttggctcagacatttcagcccatggtgcttggggcctgagcagggctggggctgggctggcctcaggcagggaggctgtgaccttcacatttaggctgctcagcctgtgccacagcattacacctgcagcaaaccttggccctttgggagcacgatgtgtgctcagagcaggacagcaggaggcaggaggagagggaagtcagctgctctgtcctaagcatcccatggagggtgggctctgaatggcacccggtctgcctggcctcatgaagcatcagcatcccctatttttcagagaaggacgtggagctttttggggaggtgatgggtctgaagtctcacagtggggagacagtggtttaggattcaagccaagttcttttggacactggactggccttgggccagtggtacatgtaggtactttccaataaccacaccacacacatacagatgacagtgacactcagggacagagactcacctagtgtcttgggcctcgagggcctcattgagctaggggaagttgagggcgggctggtgtctctgtccatcgcagtcccagccgcagggtactgacctggctcatgaagggcgtagagaaggtgatcccgcagcctgttcacagcatcacggaggacccggctcaggtactgctggggctggaggctgaaggggccgggttggagaggggctgtggggaggctgcccttgggctccctgcccatgtctgtctgtctgtccctggcagatcctggggcatggcagcactggggacacaggtaagaacaaggggcaggatggcttttcagcagcagggctgaggggctgaggggctgctgggatgggccctgccccttgggagcctctgcccaggctggatcttctcacctgactgaccctgctttgaacctggggttgagctgagctctcggtgcccactccaggctgcccagggggctggggcaggtctcccgctgctgactgcctttctgtattttctgaccctgcagggtgcacagatgaacccaatgaggcccttgaggcccaagacactaggtgagtccctatccctgagtgtcactgttgtctgtatgtgtgggtgggaggaacaggtccttggtttcaggagcagggtctgttaccacctcagggtgtgaccttggacatgcctcccgtctcttctgggcctgtttccagccatagaatggggacagtggaccgtgtgctgctcatggtttgtggtgggatgtccctgggtgttcccagggatgactgagaggtccctgggtggggccaccctctgagaatagggaggggcagggatgagctcctcacaggtgggcttcatgtaggtaggctccgtgtggagcctggaagcagggcttggatcactgtgggggacatcagggtgcctgggctggcctcagtgtctgagttctcagagctgactcagggaggggtggctgccccatcagtaagggtggcagactggcagggggactgtggcgaagaggggagccagggagctccgagaaggggccctgcttggtttcaactgcctcttccttgctggcgtttaggccctgtgtggccagatcctccaggttttccagagaagctagaaatctagctttttatgtaaaaccctcaatttttagtcaagaagttttcaggacactgtagacttccaaagtaagcttgaagctcccagtttgtagtttctgctggaaatccagagacatgcattcatttccattcaccccattcattcgttccttcactcattcattcattagactgctggctccttgagggcaggggcttttgtcctggtcactactgaacccttggtgcccagcacagcacctgccacagagtgaggactcagcacacatgggacaaatgaatgcatgaatgaacacacgtatatataatcacacacttcattcactcattcattcattcattcattcattcattcattcattccttgctgcagctctctctctgtgtcttttggtcctctacttccttctgagacatatgcagctgattcctgggaccactaaagcaatttaggatgagggcacctagaggactcaccagccttcttttgggccatacttgggggaaccggttgtcctgggaacatggtgcttctctgaagagagtggagcttcccagaggccagatggatttgggatccaatgcttgatcttaggaccagccacataatttgtggggcccagggcaaaatgcaaatgcaggccccttaaaagtttgtttaaaatgttttcagactgtgacagcagagtatgaaaccaaaaccaggtccttctaagtctaaggctttgtgtgatggcacaggtcacactcctgtacagccagccagccctgtctgttccagcacagggagcccccagggctgcattcaggtcctcaagcggctcttgcctctcccctgctgccccaggaggccatggctgtggttccagagcctggtccagccctggctcagaaatggaggctgacaggatttccccacccgcttggggccctttgagagtttccaggacaaggcccccactgtgcagaacaggattggagggcacggaatggctggttgaggcctggccccgaggtgggctgttagtgcgctggccggttccctcagggcactctgctgatcactggcccctctgcaggcctgggctgcggctgcttctgtggctggagcagaatctggaaagagtgcttcctcagccccccaaatcctctgaggtgagccaaggaagggagaggcagggagttgagtatatgggggggcttctggggccccaggagggactgcctcctccagcaggctgtccccacccaccccagaactcatgagggggcgatgccccactttggagagtcctctatggggaggagtgactgtgagagggggccgggattcagaaggagagacaccccccacccccatccccggctcacccgccttgggccaggacacagctggtagtggcggttggggaagcgcacagagcttgctatggcccatgaccttgcgccctgtttgtcacccaggtctggagagatgagcctgcagttgctacaggtgctgcctcagacccaggtacagggaggggagctcgggagggggctgcctgggatggtcacgggctgggctcagggatcaactgggccctggaggatcccccagaggcccttagcccccacccagactaggacggggttcagggcttgcctggagcaggctgttggcggggacaccagaatcccctccccagtccaggctgggaagccagtgtcctggaacagacttgtgggtcttgggtaagtctcttcccctccctgggtctcagttcccttgtctgtctggtctgtttgaggattgggatgggtgaggtggtcccaaagggctccccattcagtcctgttagcgactcgaatctggccccgtgcccttgaggggttggaggaagccctcaagggatggcgtctctagctcctgctttccccgctgcttagcgcctccaggacgcccccaggaaatggggcccaagctgcaggcccgggagaccccctccctgcccacacccatccccctgcagcccaaggaggaacccaaggaggcaccagctccagagccccagcccggctcccaggcccagacctcctccctgccaccaaccagggaccctgccaggtgagccaccctcaatgcagcgcctcccaccagggagcaggatgagcaccttgtccccgcctaacacccaacctcctggaaacctggaagaaaattcaactggatgtgtgcagcctccttcccaaggcagccacatcagcttcgtgccctttcccacattttctatgcacgtccaagctttcaagctttgggtacttttcttttcttcaacacacacctgacaggagcaaactatacatactcgtctgcactttgcttttttgtttgtttgtttgtttgtttttttgagaccgagtctcgctctgtctcctaggctggaatgcagtggtgcaatctctgctcactgcaacctctgcctcctgggttcaagtgattctcctgcctcagcctcctgagtagctgggattacaggtgcccggctaacttttgtatttttagtagagacggggtttcgccatgttggccacgctagtctcaaactcctgacctcaagcaatctgaccgccttggcctctcaaagtgccaggattataggcatgagccacccggcctggcctgcttcctcttttttttttttcttaacctgaaaaatgtgtcttagaagtgcttttattcacacaggtcttactgcattctttcttgaacagctgcattaaatggatgcaccagtttttatttaaccactcagtggacatttacatttgttttcactcttttgccacagtcaataacccgtgcatgcatcattgggttcacgcacaagtaaatctggaggataaataagtggaaatggagttcctgggccaaaggatacatatatttaaaatgggatacaggctgggtgcagtggctcatgcttgtaatcccggtactttgggaagccatggcagcaggagttcgagaccagcctgggcaatatagaaagactccatctctacaaaaaattaaaaaaaaaaaaaaaaaaaagctgggcatgatggcatgtgcctgtagtcccaactactcagggggctgagacaggagtgagatatgatcacatcagcctgggccaccaagtcaagaaagaaagatgggagaaaaaagaagggaaggagggaaggaaatcgggacaggtattgccacattccatgtgtgagatgcccaaagtgcactcccttccgagaacgggtgggagggtggggggaggccgagctacctgctagggcctgaacaatagccagagcaccgagggagggtggagaggggggagaatggtcttcagggctggagacctgggctctggctcctggcaggctctgccttttggcaggcttgttttctgccttgggaacgagctgactccagcctcagtttacccatgacccttcccacctggacaccgcacactctctcccacctgcaggctggtggcatgggtcctgcacaggctggagatggccttgccgcagccagtgctacatgggaaaataggggaacaggtcagtgctgggctcatggagtggtggccctggtggtggtgggaggggtcttgggaacttgggtaaggaggaggatggttggccctgtggcagaagcccagctcccccagccttcctgtctgcatggcccacgttcattccacccactccctgagacatgctggcccagccccacctgccaggagttcacagtcagcgggggaggtgcttccgtgggggagcagagaggatatggggcacagaagtggagcctcctgggagcatcaagaagggcttcccagtggaggtggcctccaagcatgtgcaaaggtccagaaatgagagatacctagattctgggaagaagtaaggctcacaggagccggcagccctatgtgcattcctgatagcctagggctccaacatgagtggccagggggagcgctcatgagctctgtcaccccttcttttccttcctcaagaaccgggaacctggcccttttttcttgggtgcaattggacgtctttatagaagcacctggaactgggaggtgggaggcctaatctctctcctggctgtgtggcctcagctctggccctctcagaactgcagttgtcccagctgaccaatggtcagttgtttacagaactctttacctgcattctcatacccagggctgtgagaatggaggtaaagagttccgtaaacaaagctgtctaggccccagagagaggaaggcctggccaggtcctgggcctttgtgtcactcaagagctcggcctggctcctctgagcaggtgccgctgctgtggctgtctggggtcacccccaccttgcttcacttgagccaaggctcgagctctcaaagccccctccccccacctcaaatccttcattggccctgggcacagcagggactctcttctccatcccatgggacaactaaggcccggagaggtgggtcaaggtcacgtgctagaaggtgtggctgaaacggggaggctggtgaagaggccgtggcaggattttcccttttttctctctccatgcaggagcctgactcccctgggatatgtgatgtgcagaccagtaagtgacacattactgagtccccatgtacatattaggaagggttgcttggtgtccttgggtctgactgtatgtgggcaggggggctgtccctggccagacctggactcacacaggggggcagttagggtctcctgggctggagctgagagagccccatgctctgcaggccctacctctgttcaggtagccaggtagccagagcctggcccagagccagatggtggttggaggcccccggagcccagtgtccagcttctatccagggaaaacagtcccagggctaagtcagatgagctctccttcctgctggtaatgcccagagagcttcccccatcccctggcaaatgggtttggccaagctgaagggagaggggtggggtctcactgggagaaccaggctccacagcctccagctcccttgagctggagggggtccctgtcacctgcagctgggttggggaggcatatgatgccctttatcccagccctgagccaggaatcggggacagaggactgagaccaggaaggggctggaggcaggatctgttctttcttcacttcatggcctctagagaggcatgcggtggacaggcattcattcattcattcattcaatacatagttaaggacagcctactatgtgccaggcctgtgatgggttctagttgtgagcagagttcaggggctgtgggtggtggcatcccctgttccatcctgaacacaagcccttcaaccacaggcctcaggctgtcccagggctctgagctctgccctgtgtctgcaaggctgtgtccagccccagccccgctagtctgatggtggtctccatgagtgccctgaagccgggggtggccgccatggcctggagcacacacagcccagtggactgtggagctcaggtctgatggagaggcgtggggggcgttagggttgatggtaatcatggcgatgacatgaggaggaggagagctggcctgtctcagagcagggcataagcagtctctcatggaagctcgtggccaacctggggcagcagagcagagaccctcatggctgttggggcaggcagtgggcagagctcagagaaccaaaagcacctgcccagggtcacagagcaaatcgagtccacctggcctggcagccacagcttaaaggaactaaaaacgtttccttggggcagagagccttcagagggtctgcatctgaggatggagcatcagaaccctctggaaggaggcaggattccccgccagctgtggccagggcctccctgcaatgcctggagcatatgggttatgggtggacgctgggtggccatgggggcaggctcatggggacagggagaggagctggcttggtttcattttctaggactgccgtaacagatgtgcgcacactgggcggcttagaacaacagacactgattctcccacagttcaggagccagaagtccagggtcaaggctttagcagggttggctcctcctggggctctgagcgagacatgcccatgctgctctccttgctcctggtggccacttgcggtccttggcaaaccttggcttctggctgtcctccagtgcccgcctccgtctctacacagcctttacctctgtgtctgtgtgtgtcaagcctccctctccgttctttaaaaaggacatcagtcactggatttagggcccaccctcaatccgggatgatctcactttgagatccttaacttaatcacacctgcaaagaagctatttccaaataaggtcacattcacaagtaatggggttaggacttgcaattatctttttgggagacaccattccactcacgtcccatgtcatggggagactctgagaggctgggggatatgtgtcccttaccttccccattcattcactcatccactcactcactcactcactcattccctccgcctgtccacccagccacccaccctgtcttctcctttgtttcaggggtgatgggagctggaggtctctgaaataagggagaagggaatctgggagagctcagatggacacatggatggaaggaaagaaggatgccctgaagagaagaccttcccgggggaggtggccactgacaccccaccctatttgaacagcgaacccctccctctccacacactcccaggcaggacaaggggagccagagtcacctgcaccagccccagagcctcccagaccagaacaaggggaaggccagccatgggcagcctgcaagatttaggctagacagcaggacttacccccagagggctgtggaaaaggcccatagccgggcgtggtggctcacgcctgtaatcccagcactttgggaggctgaggcaggaggattgcttgagccccgaagttcgagaccaccgtgggcaacacagtgagaccctgtctctaaaaaaccttttttaaattaataaattaaaaagccccatggatggaggactcagtattgagcatctctttgagaggacgcgtgcacagcccccagtgtggtacctggcaccgtcagcacctcgacaggatacagtttttcccagaagaggttctccctaggcctggccacactctctccttccaaggcttggggacaccaatgagcagcaacaaatgttttcattaacattaaaagagtgtaaatgagcacatcaaacctgtgattgcattgatattattgcttaggataaagctaaaagaagggtttaggttttaaaagtgggtggactgaatagccctgggcttgcggtgttgggttgcaggaggagaggaattagccaggggtcctgagctgggggtcctggctcccagctggcccacatgtgtctttgtttgggccatggagtgattttaaaaattagaattgattgccaacatttaaaaatcaggtagctttacatggaaaaatctggcttctcttgaaaactgggtggacttggctgtcatgggcccacactgtgcttgtgaggacagtctgggcagctgctggcacctgaaggcaggtggcacctgcctcttcatttgtttacatcatcaccctggctgggcaggcctttggatttgagatccctgaggtctcaaactggtgatgaggtggggcaatcccagtagagggaataaagtgtggcatacaggagagtggtgggacttcagctaatctggagcccagcatccttaatgcagaagataaaactagagaagttggggcctgactttaggaaactaagctgtaggcaatggggagccattgaaggtgattgagcaggggagtgacttcagaaagattactctgaggctgagcaagcattggagacagggaaagcaatcaaagcagggacacttccaaagcacctggggccaactatgaaaaatgtcctaccccagactttctgattcaagagtaccgggagctgggaatttggttctgtgttgttttttttttctttctttctttcttttttctttgatgaccaagcaatggttatggaagaatctgctttattgagaagcacctgctttctcagatgattctgatgacggggtagaggctgggaccatactttgagaaacatccagtgagaggttagtgctttggggccaggtaggaggagatgtgagcctgagccagggagaggcagaggaaggaggtatcatgacccaggcctgccagaaaggatggaggtttggagttagggctcaggctttgacagagacccaggggtccaggtggggaccttagcctagaattcatgtgccctggctcctgcctgctgatcctggaagcaggggctccttcctacatgaggctgttgactttctttttttttttttttttttaagattgagccttgctctgtcaccaggctggagtgcagtggtgtgatctcggctcactgcaacctctacctcccgggttcaagcaattctcctgcctcagcctccctagtagctaggactacaagtgtgcaccaccacgcccagctaatttttgtatttttagtagagaatgggtttcaccatgttggccaggatggtctcgatctcttgacctcatgatctgccgacctcggcctcccaaagtgccgggattacaggtgtgagctactgtgtccgaccgaggctgttgactttcactggccagggtcagaacctcatttgatggccctgagggcagagaggccactgaccaggaggtggtgtgccagggtggagtggcagtttctatgggaactagggcactcatagctcctgagcacctgggtagggccacggagaagctgggcgagctatgaatcagctgcctgtagagaggggcagttggagctccaggggtgggccaggggctcctgcaccacgcctcctgggggcctgccctgggggctgtgtggcagcatacccaatccctccccttccaggttggtgatcttgggcaccgtcctcctctcagtgctgcagaatctttagctgtaaaatgggaacagtataggacacatcttgcaggcctgctgcggagatggaaagaggaaatgaggccgggcatggtggctcatgcctgtcatcccagcactttgggaggtcaaggtgggtggattgcctgaggtcaggagttcgagaccagcctggccaatacggtgaaaccccatctctactaaaaatacaaacattaacccggtgtggtggtgcatgcctgtaatcccagctactcgggaagctgaggcacgagaattgcttgaatgggaggcggaggttgcagtgagccaagatcataccattgcactcaagcctgggtgtcacagtgagactctgtctcaaaaaaaaaaaaaaaaaaaaaaaaaaaggaaatgcttgtaaaacacccacgcactaaataggacctaaaaagaaaatgttaatggaaaggaaaggaaaggaagtgtggaagcaaggacagcatcaattcttaaggacggcaccccataaggagtggccactgatgccagtgaggcgctcgtggggcacatttatcacctgggatagtgcactgggaaaacgggagtcaggggacctggctctgcctccaccttcctgtgtggcctgggacaagacactcagcctctctgagctggctctctttaaaagggggaaagtactgttcctgccctttggggctgctgtgaaagctcacgtgctgtcaggcaagatgttctgttccctggatgtcccctgctatgcccaggcaggaactggcatcccaaggggctgcttagagtggagacatggcactattgctggacagcagcatagactgacacagacaaagcgtcccaccaccggattcagggtcacacttggaggagcctccctggccaaaccccaggggcgtttgcagggccagaggagccgggagcaaccatggaaacagctagttcaggatgctcttggggcttccctagagggcaggcagcacctcatctgtgaaacagggataatatctgtacctagaagtggggagctctgtgcctggcaatggaagcaccccataaaagaaggtatttatctgtgtctcagtttgctcatctgtaaaatggggagaaaaacataaaagagggaaaataaaatggggatgcaaattataaccccaaaatgttgatgtgaggactaatcgagttattccacgtaagccattcagcacagggcctggaacatagtaagtgctcaaaaatgcagctgctgttactattattgttgttatgcaacatcatgaacaataacagccaaagtctcaggataagacttgaggccggcttccatttaaagtcattgttactactacccaggtatggtggtgcatgcctgtagtcccagttactcagaaggctgagtgaggtgggaggattgcttaagcccaggaggtcgaggctgaggtgagccataattgcactaatgcgctccagcctgagcaatagagcaagaccctgtctcaacaacaaaaaagtcactattactaattcatgtttggctgaggtccaccaagatccctggagctttcgggggacacctagtattcaggcattgtcctttgtccctgacacctgcctgggggtaggcttaggttcctgatgagactgctctgcactccctttgagcatctgccaggcttataggcccagggtgtttttgttgtcaaggaccaggatacttgaagaagtgttgaaaattagactcccatctgaaattgggaccacccccatgagaaagatgagtttccctggagggcggagcctctagacccaggagggagggaaggactctcagaagcaaatgccgaacgtatgggcgtgctgtcacccgggggtggcatctacagagcaggaagcgggcaagctctctctgcatcccccaggacaatccagtccacctgcacctggatgtggccaggtggaccctgaacctgggccttttggcatccctgtgatgctgtgattggaagcattgtttctgcctctgcacaaacctttaagaaggaatcccccgtgagaaacaaacaggatcaaccataatcaaagctctgtctcaagaggagaaggggggaaaataatggagacagagtgaatgagcacaggcttcaacctatcaccggaacaccgatctggtcccgctgaaaatggaaagtgccatttccccactgcatgactaagcactgaggcactgctggcgacagccagggctccctgcaggctccctgggactcagaggcccaagcccactctcccgcacatcccataaatggctcttcctgtgttccctgcagtcagcatccttcctggaggacaagtggagcctgaccttgtcctagaggaggttgaaccgccctgggaggatgcccaccaggatgtcagtaccagcccacagggtacagaggtggttccagcttatgaagaagagaacaaagctgtggagaagatgcccaggtggggagtctgagaagaccctaaaagattagttattgtttgagaaagtgccaagcatgcagtaccttatctcaaagatgaaaaggcacagagcaggaaccaagcctgcttccccctgccttcatacagccatccttctcccatgggtagaatggctaccaggttcttatgtgccactccagagacagtctgggtacatgcaagctcgcatctccctccttttttctttttgtacagaagatggcatagcacatgtacctatctacaccttcctgtatttattcaacaatataccttgaggtctttccacattcaggatatagagggcatcttcatttttcactgctgcatagtattccatcatatggctgtaccataatttattaaacctcttcactattgatggacatttaggttggttccaaaattttgttattatgaacaattctgcatcaggcactcttgtatgcatgtctttgcacatgtgtgaatacgtctgcaggagatttctagaggggaattgctgggtcattggtcatgggaatgtggaattgtggtcatgattgccaagtcgccttccacagggatgtcgcaatctttgttcctactagagatgcttggtgacagtgggaggtctcgggttctgaagcccataacttacatagctaagatggggaaactgaggcccagagaggatcagaggctgacctagggtcaccaccaggacagtggctgggacagtcccctcatgcagaggagagggtttgttgccagagagagttcagggttgctcgggtggggctccccaggttgagccttggttggaaagtccaggtctgggctcaggtgtcatgggacatcctacagaaaatagaggcaggaggtagactcagcggggcagcttcgggtgggctcacctcctgcctctaaccccaactcagagagctgtcccggattgaagaggagaaagaagatgaggaggaggaagaggaagaggaggaggaggaggaagaggaggaggtgactgagtaagtcatttgctcacctgtctgggaacggccctggggctggggttggctgagctcctggggtctgggcactctttgctgctcatgggagctcctttctgttgttctgtgctgtgtaaggctgggctttgaccaaagaggctgcgagaagctggggttcccctgctgtgctcatcatgacctgggaatcatattacccaccactccacatccccccccacacacactagaatgcagcctccaagagggctggggcttttatctgttgctttcactgccatgtccctagagcctagaacagtgcctggtacacagtgggcaccaaataaatgttagttgtctgcatggacatatgcagtgggctcccagttctccctttattcacaaagccaaggctgcctcccctccatatccacccaccttggttgcctttgatgccttctagggctgtcctggattctgctctactgcccagtaatggtcgatcgtccacccacatccatatatttcaatgttaaacacacagaagagttcagttaaaataaaaattaaacactggagatcaggaaacactatggagggtgagtggaaggatgactggacagggggatatgcatggggaagagcaggcagttggacacctgtgcctggagttaggagcaggagaggtggggctggagatgtgacattgggattctgggcatgtaggtggcattgaaagctgtggggctcgaggagatgcccagggagcgagtgtggatagaggagaggctcatggacaagaccagaggttggggagatgaggaaccaaaaaggactgaggaggaggcaccagtgagcagggcagagacaagaagagtatggggcccagaagccaagttagtgtttcaggaaggtcgaccaggcgtggtggctcacgcctgtaatcccagcactctgggaggccgaggtgggtggatcacttgaacccaggagttcgagaccagcctagccaacatagcaaaaccccatctctacttaaaaaaaaaaaaaaaaagaagaagaagaagaaagaaggactgcctcaaaagcaggttgtaaagccttgaacttgttttcccaaaggcgatggggagccattgaaggttcatgagcaggagagtggcatgatctggcagctgtgttggagaaagattgagtcagggagaacagtgaggagactgttatggtgggccaggtgacagtaagttactctctccttgctccagtcccctggcattatgtccctgtgtctctgaccaccatggtacctcatgacccgcgtcctttctccctgacctgtccctctggccatggcctgagacaggatagcactgtgagtgttaggagcacaggctttggcatcagaaacgccaactccactttgcttctgttagtgaaatgactggggcaagtggtgtacccgctcagagcttctgcctccacatctgtaaaatgggggataataaaaggctcctgcagaggggtcatcagggccagcggtgatgatggaagttgtaggggagtaagtgccccatcgatggccactgatgttctcgtcccccagtggcctcttttcgttccagtcaggaaatagttaaacaggatttcagagctggaagcctgttcagtgtcagctgcttttagtccatccttactcagttcacatagactctttccatccttgacaggaggccacacagcctctacttgcttacctccaatgacggggagctcacaacctctcaaaggctgtccatgtcatccatatgccccgctgacttgtgaaattatttcttagaccaaaactaagcctgcttccctatggcttctgtcccttcctgacttgtcctaattctgccttctgagccaccctgcagtcccagcaagatgaggaacttagctgctgcctggtttcattagagcagcttgtttgccctctgctttctatggagctgtgcttctgtgtggggtgtatagctacaagtggctgccttgctgaacttgtacacctaacacccaggctggaaaacccctgtatttgccactgctctggatctgagacaccctttgaaggccagtgatcaactatgctcacatacatgcatgtgcagatgtgtactaactatacacatgttctcagaatgcagtacacatgggcacacacacacatatctgcactatacccatatgcaccagcacaccaacacagacatacatgctgggttatgcacacacttacatgtacaggcatgcacacacgtatacccacacacatgcttcatatatgcacaagcacaggcagcacattcatacatattcatacatgtgtgtgcacacaggcacacatgtacatacttgcacacatccacgtgacagccttgcacaaatgcacatgcatccagagttaccggcagatgctgcaggcgtgaacatcttcatacaaatgtttacccagagttttgaacttggggaacttttgggctccaggcccagggagggacaagggagtgacagagttggtgatcacagggccagggccagagggtgtgaggcccagggcaagaaaaactgggctgtcaatggctggggaaggatgctcttggccagctttgcagagacacaggttactgatgatgtgagggcctggtaacgggcagatggtcgcctagagacccggtatctacaggcaacagctcagctttccctagcaaccgaggccttttggttccacctggcctccctggggatgcttctgccattccctgcacatctcctcaatctgattagaagcaggaaggattgctggctcctctgccactggagccaccctggctcgggagctgggctcccacttgcatgcaccgacccaggcttgggatgaacgccacagcccccagctgaacccctgcaccatgggcatcctgactggtcccgaccgagagatccaagtaggtggctgcctctccctaaggctcccctccttcctgcttttggggctgggatttcaggtggacagtctgctgaaggtgacagtgaggaccttaatgttggggcacggcctgcgggatggcacaaggcgggaggagtggacgggtaagcttttgagagctggctgccactgctgctccctggatcttaaacttggaaagccggagggtgtctccaggaagccaacctcagccaatctgtctgttcctttgcttggaaatccctgggacttgggaactttctggaagttgatggcttgctgcttctgggctgcacaagagggggccttggcaggcactgggcaccctgtcaagcaggggccatacggctttggtaacatggcccctagacagcccccggtgatgctgacagcgccaccactgggctgtttaggtgttttgatagctggggatttttgtgcaaaaggtttctcaatccacgtgggtgatttcataaccctgcagatcaccgcctcctctgggattaataataataatgacaagaacaataataatggcctccatttgacttacgatttttttccatgccactcacggctaaggcagcctgaatggcagattctattattctctcatcccatttcacagatgagagaactgaggttcagagacagagccctgccagtaagcgtagagctgggattcttggcattacagacaaggaaagctgctcccaatgtttagtgatgaagaatccagaagaatcaccagaacaacatctggcagtctttttttgacttttctgtgagattctcattggcccttctgatcttactcaaataggtcaggctgcacaggccaggcaaatcctgcccatttgacagatgagcagacagaggcagcccaagggcttcgaggtgacttgcccaaggccatacaggggcttctggtctgacactggaataagcaggaccccaggaagcctctggctgggcctgtgggcagttcattttctgagccttgtgctgtaggcagagagccgagacagaacctgtatctatttcaggaaagtcatccagtcatcccccttgcagccggagacctgtctttaacccatttgtgcaaggctgacttctccttagtgtagaaggcacagtctccaaaatactcagaggcaggcagtgaaacagagcattaagcacgtggccttggggtcagtgatgcagtatcttatccaggcccaccttgcacaggcggtatgaccgtggattggccatcgaaactctctgagcctctgttttctcagcttgcatgtgagcagtaacagttacgatctgtcagggttatgtgagatttgagtttttttttccctaggctcttttaaaaagttaattattttttcttttcttgttttttttttttttttttttttaaagacagagtctcgctctgttgcccagggagtggagtggcatgatactggctcactgcaatctctgcctcctgggttcaagcgattctcctgcctcagcctcctgagtagctgggattacaggcatgtaccactgtgcctggctaatttttgtatttttagtagaggcgggttttgccaaattggccaggctggtctcaaacttctgacctcaagtgatccgcccacctcgacctcccgaagtgctgggattacaggcatgagccaccgtgcccagcctaattattttttcaattgacataaattgtatatatttttgtgtataattgttgttttgaattatgtatacattgtggaatggctaaattgagctaattaacatacacatttcctcatatgttcatcattttttgtggtgagaacagtttagatctactcttaacaatttttacaaatacattgctattaactagagtcacaggctgtataatagatctctcacatttgtgcttcctatctagctgaatctttgtaccctttaaccaacatctatctccccacctctcacccctccccagcccctggtaactaccattctattctctccttctgtgagttcaacttttttacactccacgtataagtgagatcatatggtatgtgtctttctgtgtttagcttatttcacttaacataatgtcctcaaggttcacaaatgacaaaatttccttcatcttaaaggctgaattctattgtgtatatataggacatttccttgatccactcatctgttgatagacacttgggaggctgaggcaggtggatcacctgaggtcaggagttcaagaccagcctggccaacatggtgaaaccccgactctactaaaaatacaaaaattagccgggtgtggtaacatgggcctgtactcccagctactcgggaggctgaggcaggagactcacttgaactcgggaggctgaggttgcagtgagctgagatcgcgtcattgcactccagcctgggcaacacagcgagactctgtcttgaaaaaaaaaaaattaatgctgcaatgatgggagtgcagacacctcttcaacgtactgttttcatttcccttggatctgtacccaacagctgaatcatatggtagttccatttttaacttttggtggaacttccgtattcttttccataatggctgtgtgaatttacaatcccaccaacagtgtgtaagtgttccctttccactgcatcctcaccaacacttgctatcttgtcttttttcgggtgggggcagggcgacagacagctggagtgcaatggtgcaatctcagttcactgcaacctccgcctcctgggttcaagcaattctcctgcctcagcctgccaagtagctgggattacagaagtgtgctgccatgcccgcctaatttttgtatttttagtagagacagggtttcacaatgttggccaggctggtctcgaactcctgacctcatgatccacccacctcggcttcccaaagtgcttggattacaggtgtgagccactgcacccggcctatcttgtttttttgataattgccattctaacaggtgagaagttaatatttcattgcggttttgatttgcatttctctgatgattagtgatgttaagcatcttttcatatacctgttggccatttgtatgtcatcttttgagacaccgaggaatgtctattcagattctttgcccattttttaaaatcagtttttttccttacaattgagttgagtttcttatatattttggatattaaccccttatttgacttacggtttgcaagtattttctcccgttctgtagggtgtttcttcactatgttgattgtttccttggctgtgcagaagctttttagtttgatgtaatcccattttgtatatttttgctttcattgcctgtgctcttgggttcatatttttaaaaatcattgcttagaccaatatcatagggtttttcccctatattttatatattggttttatagtttcagattttacatttaagtagtgttcaatcaatgtgggtagggtttttttttttttttgagacagggtcttgctctgttgcccaggctggagtacagtggtgcaatcacggctcactgcagcctccacctcccaggctcaagcaatcctcccacctcagccttccaagtagcttggaccacaggcacatgccaccacacccagctagtttttgtatcttatagagttgggattttgccgtgttgttcaggctggtctcgaactcctgcactcaagcaatcctcccatctcagcctctcaaaatgccgagattacaggcatgagccaccacatccagccatcttcttgagtttctttcgtcgatgttttatagttttcagcatatggttctgtcaccttcttgattaaatttattcctaagcattttattttattttatagctattgtaaattgggttgtttcatttctttttcagatagttcattgttaatatattgaaatgctactgaattttctatgttgattttatatcctgcaactttactgaattggcttatcagttctaacagttttttggtggaatctttagggtttttttttatatataagatcaaattatctgcaaagaggaacaatttaatttcttcccttccaatttggatgcctttcatttcttcctcttgcctaattgctctagccaggacctcttatagtacattgaatagaagtggtgagagtgggccaggcgtggtgggtcacacctataatcctagcactttgggagaccaaggtgggaggatcacttgagcccaggagtttgagaccagcctgggcaatgtagcaagaccctatctctactaaaaataccaaaccaaaccaaaccaaaccaaacaaaaacaaaaatagccaggagtggtggagcatgcctgtagtcccagctactcgggaggctgaagcaggaggatggcttgagcctgggaggttgaggctgtagtgagccatgatcatgccattgtactccagccttggtgacagagtaagaccctgtctcaaaaataaatgaataaataaataaataaataaaaaggaaaagaaaaataaataactagtgagggtgggtatgcttgtcttgttcttgatcttaaaggaaaagctttcagcttttcaccattaggtatgatgtcagctgcgggcttgtcacatatgacctttattgtattgcggtccatttcttctatatgtaattggttgaaagatttgatcatggaatgatgttgaatgttgtcaattactttttctgcatctattgagatgatcatatgattttgttgctgtggtgtaccgcgtttatagatttctcaaggtaatttggaggaggatctggggagacttttcatgcagactgcctggcacgcagcccaggagccgctgtggcaatgtgattaccgactgatttctgctgccaagcggctggctccagaccgactaggcaacaatcccgtctccaccttcctgccccaccgtccttgctcaggagggctgagacttggccctctgggtagagaatgatgcattcaagtttcctgggtggcagacaccccagagcatcctctgtgaacccctggatgacaggagtctgaggggtggggagggggtgttaggaagcaggaactaatcctaactacaaaaatcacattagtccctggtcctgagtcatcattttaacccagaggtcgcacacggacatctaatttagcctggagatgggctcttttggctactacatattaataaagatatattaatttgaattatcagcatctaaatatcagacaactttaccttagaaacatatatttcaggctctgtttgaaaatggaatgatctggccacctgggcccccttttccagcggagtggggttgctgccttcaaatggacatgggttcgctaatttgccacagccctccctgcccactgcaccctcacccctggccctatcacttatgtatgcctgctgcttgggcccggcacccatgaaaacttcagcagttgcagtggctctgatctcatggcatgggaagaaccagggcctgggtttgaggtttgtgtggtttgggacaatttgctgtgtgattttgccaggtcacttcacctctctgggcctcacttttgtcatgctctacccatcaccaagattgcctggagactgggagaccccagatgacagctcctccaaccgtcctccatgcatttctcgcacatgttgttctcatttcctggacaaccttttcctccccaccattctttgtggtaaaatcatcatcctggaggctcagcttacaggccacctcctctaggaagccctccttcctagcagagttgtggcatgtccttcacagtgccttgctgagtgcatgtctcagatggggtgattgttagtaggacactgccctggaggctcctgaggttgagactggttcttgggcatctctgtaccctccgctcctggcacagagcgtggccctcagcagggctggggaaacctttaacaccctaacccagtccttttatcctccccaccccgccccgggtcacagggtgctgctggatagctgtgtggtgtcgcaggtgggcgtgggccagagtgaagaagacgggacccggccccagagcacttcagatcaggtatgagaagcaccaggcactggcacctctgaggcctggcttggcattggtggaaggatggggaccttgtccactttgcttacagggggagttttggctggtaagatgcccgcaggacagagggagcagggtggcgggtcctgcgaggccccctcttggcaggggtcagatagcggcccaggccgtgggtggggagacgggtggacccagctcgagtcctcctgtgggtgcctggcttggggcaagtcgcctccccactctgggtcccagtggccacctgtgcacgagggggctacagacgcctcccttgggcctgtaggaggacccaaaagggcttgcacactgtgaagagtggtgctgtcgatgctttgttcccccatgtgccaggctgcgagtgtccctcatcacaggtgacacgtccagctgttaggacccgtaggtcctgggtgcactgccctctacaggttgtaggctactcccaggatgcccagaaggtgggctggcaggacctgactggctgggcagggcaagaagcagaactgggcccatgtggacttctgaaggcagatctaacaggagctgctgagactagggctgggggctgatggtcacagtttctgttttcactttattctctgcagaagctgtgggaggaagttggggaggaggccaagaaggaggctgaagagaaggccaaggaggaggccgaggaggtggctgaagaggaggctgaaaaggagccccaggactgggcggagaccaaggaggagcctgaggctgaggccgaggctgccagttcaggaggtaggtgtggtggtggtggtgatgggttgcgcaagaatgtctgaggtccttttaggctggaggcagccttcgtgcaggggcaacccctcctcctctccctccatctccttccccccattgccccctcagccaccctgtcttcaggaaaatcccatccttggtgtcttggggccacattatcagagcctactgatacatctcaaaggttctaaggaatttcactgaggcccaggactcccagtggcgccggggaaatcccgatcccagccaactccttccttccagcctctccctgccagcccctcctgcaggcccctcctaaccagcccctcccagccagtccctcctgccagcctctcctgccacttccgctcaatgaggatgcagctcttgggctaccgcccagtgagggtttggctcagacatcacatagctgagtgaaaactggaaccagaacttcctaacagagtgtcctggactccatgtctctttatgagcttttcctgatctccagctgtacccagcacatacattttgctgtgatttaccaccctgccctcaatcctgagaactcaagcaatggcggagaaagagtcccaaggagtccagcaacagctggaccctggagctgggacaggtgggacccaacccctggccggcaggtgttgcgtgccttacactccacattccccacgcaatgggtcttcagccgctctgtgaggcagacagaccattttacagatgagaaaactgaggctctgtgtgtgcggatttggccaagaggtcaaggcacagacctgcatttcactcctggctcctttctctcttccttgctgtgtgacccagagccagttctgtgacctgtctgaaccatgacttccaaatcaagaaaaaaggggcaataatagtacctagctcacaggttgctgggcagagtaggggagacaatgtgtccaaggcaccccaaactgtggctggcactgagggaggagtcaatattgggacgaggatgtgtctcggccagcgagtggttgaaatgggactggacccaagtgtcctaaccctgggtatcctgagcttgctccctacttggtctttgaaaagtgttctctgttaacttcaacacatatttataggaattcctactaagtccaggcctggggctgggtccccacatggatgaaaaagaccaggagcaaacaggtgcaggcttggttcagtggggtgggttctgccccttcccaggtgatttggaagcaggtggtctgggacccacactctgagaaatgctgaggcatagccatttgcactcaaaagtatggacctagacccagcagctttggcgtaacccaggagctggttagaaatgagtaacttgggccgcgatccagacctgctaaatcagactcctcgtggtaacaagatctcctggtgatttgtctgcacatttgtgtttgaggggcaatagccttgagccctggtcctcaaacctgacagcccattggaatcacctggggagatttaaaaattcctgctgccaggcctcatcccagccattaagtcagaatctctgggaatgggcctgggtaacagaaattgtcaaaccttcccaggtgattccaatgcacagcccagttggggaaccagggccataggaagagttactgcttctggttggaagtgaaattagttgacctccagggctgctttggactggaaaattctaccaggctaagaatgttcgagtcctgggtttcttgggtctaagaatctgagattctgtgagttctgggttctttgattctaatatttttgggaaatgctgccggtggttggtaagtggagggagcatgggaagttgggggcctcctgggctgtccctcggtgctcctgggtgggccagccacatgacctgatgacacattagacgttgaactccagggacaagagcgatgcttctggctttgggtagcactgctgaaaatgcaggtaggcaccaggctggtcgtgttaggctggtgggaggacccccacctattgtctcctccaactctgtgctcctaattgcagtccccagggtcactcctctgcctgagactctctggccccagcaccatggctacaccatgtcagaacatggagctgaattgcctagtccaggaccagatacctggccaggtggcctctgcctctgccctccaaaacctggtagagcatctccctaatgtgcccagctaccgcatcccaatcacccgcatccctgtcctcacctcccggagaaccagcttgtccaactccagcttcgccaaggagaccaggagctccatccgccaactaggtagcacgatcttgcccacccagcattctcatatctgtggcgtgtgcttctgcatggctggggctgtcttcctgcctgggtgctgtggtcatagtgtggaccactagttgcttatggaaaaccatctccttttcctctgccgatcaataccttcatcctgctttgtgatagtgacttgaggggttgtagcccccttctcttcctgcctaaaattccaccacaattagcaattcatttatttttttctctctctttctcttcctctttctctcttttcttttgttttttttttgtttgtttgttttttgagacagagtctctctctgtcacccaggctggaatgcagtgacatgatctcagttcactgcaacctctgcctcccagcaattcttgtgcctcagcctcccgagtagctgggattacaggcatacgccatcacgcctgactactttttgtattttagtagagacggggttttgctatgttggccaggctggtctcaaactcctgatatcaaatgatctgcccacctcggcctcccaaagtgctgggattacaggcataagccactgtgcctggccagcaattcatttctttgggttaaacatatattcctttctttaggcacattgtttttatacaggtaaaaccttataaaccttagtttaaacaagtcacttgctcagatctctaggccgagaggcttggacagggagtctgggatcggagtggaggggagtgaaaggagggaaatggaatagaagagtaatgtgggtgctgattgcagacagaacccactgaccttgacagtttgctgctcagcaaattccatttcaggaaagaagctccaggtgcagatagtcatcctcagaggctagggtggagggagggctgtctggatccattgattgtgacaaggtccccgtagtggcctttgggctgctactgctcactccctgatgacaaagagctcaggaacatactggcaccctggactaacccctgtcactttctgacttaacccaagccagacatgcctgcttgcccttttgattggcttgtttgtttatttgtggttgacacggtgcagagctgcctctgagatcagtccaaccaggcaggacagaacatttcacgggaagacgtccactgttgtccttctctcctctccctggcttgaggtgggcacagagaggagatgaggtggcatggaggtcatccaacagtaaggggtgccaccccggcctccatcttctggtaggcaagccttgaatctactactccaaagcagcccacccctatcattgaggatgctgaattgcttaaaaaaaaaaagaaaaaggaaacaaagcaaaaagaccccaaagcatcccccagctcccaccgccacaggccactccctgataactgctaaatctgtaccaattctatttttttttggggggggacggagtcttgctctgttgctcgggctggagtgttgtggcaccatctcggctcactgcaacatccgcctcccgagtagctgggaccacaggtgtgcaccacctttccgggctaatttttgtatttttagtagagacagggttttgccatgttggtcaggctggtcttgaactcctgacctcaggtgatttgcccacctcagcctcccaaagtgctgggagtacaggcatgagccactgtgcccggcctcaattctaattttatttgcttactatttttctttcagtggattctcttttttatttaattaagtatatttaaacaggaaaactttattactattcaaatggaaaaccagcattgcttgccataaacagaggcataaataaaaataacctcaaatacactgaaaacacaatggtgttgctgttttctaatgagacggatgggcctgctgcaggctcgaagctgggcctgctctgttagccacaagtgggattaggctgtgtgagagaggctctaaggccacagtggcaccgacccgagacttcctctctgggtattcactaaaagagggtgtaactttttttttttttttttgagatggagtcttgctctgttgcccaggctggagtgcagtggcgcgatcttggctcactgcaaccactgctgcttttttttttttttttgagacagaatctggctttgccacccaggctgaagtgcagtggcgcaatctcagctcactgcaagctccgcctcccgggttcacgccattcacctgtctcagcctcctgagtagctgggattataggcacatgccaccaggcctggggaatttttgtatttttagtagagatggagtttctccatgttggccaggctggcctcaaactcctaacttcaggtcatcctcctgcctcagcctcccaaagtgctggaattacaggcgtgagctgctgcgcccgaccaggagtaacattcttattctaggttatactttgccttgtctgtaccatctgagatcatctcgtgtcctccccagtctctgggagccccacacttgggaaaatgttcccggggacacattgacacagggggctgatctagctgtgctagagtacatgatgattctagatgctacagacaaggtaatgagaagctgtagtaagaacattacttccattttattttattttttattattttgtgagacagggtctcgctctttcgctaaggctggagtgtagtaggcgcgatcttgactcattgcaggttctacctcccaggttcaacctatcctccaacctcagcctcccaagtagctggaacactgtgaccagccgatttttgaatttttttgtagaggtggggttttgctatgttgctcaggctgctcttgaacttaagggatccttccacctcagccttccaaagtgctgggattacaggcatgagcaactgtgcctggccccctttacatttttaacaacttctccattcctgctcatcctcttctccagaggatttagggttcactccattaaactatagagtaagtgtaagcaatttaacagagtgccggcttttcttataaaggccatttgaaaaaaaccccatatcggctgggtgcggtggctcatgcctgtaatcccagcactttgggaggccaaggccggcagatcacctgagatcaggagttcaagaccagcctggacaacatggtgaaaccccgtctccactaaaaatacaaaaattagccaggcgtggtggcaggggcctgtaatcccagctactcaggagtctgaggcaggagaatggcttgaacctgggaggcagaggttgcagtgagccgagatcacaccactatactccagcctaggcgacagagcgagactccatctcaaaaaaaaaaaaaaaagaaaagaaaagaaagaaaaagaaacaaaaagcacatatataattatttcaaaatctccctgcttcccgcttttggggggtgtatccctgcctgccttgctggtgcccacacctgtgcccagctgctattgggtagacccccctaggtgtaggggagaaggaggaatactatcccagcctctcagtatcctctgagcttggacttggggcagacctgtccctgcagtccctgaggtgggtgatggagcccaaggtagggccacgtccaggctccctggagaggacctgattctcagaatgtgggacacagtacagggcctctcagaggtccagagtcaggctagctgatgaatttgggggcccctggcatgtacaagaacaaggacataaccaagcagttatccaaataggaagtagcacacactacacagtctgttacccttgattggagggaccctgcaaatgtctccatttgatgctcttcaagaatgtgaggccagccgggcccagtggctcacgcctgtaatcccagcactttgggaggccaaggtaggtggatcacctgagctcaggagttcgagaccagcctgggcaacatggtgagacctcatctctacacaaacacaaaaattagccgagcatggtggtgtgcgtctgtggtcccagctactcgggaggctgccgggaagatcacttgagtctgggaggcagaggttgcaggaggcagaggttgcagtgagctgcaatcgtgccactgcactccagcctgggtgacagagtgagacccgcccccccttctcaaaagcaaacaaataaaataatttttaaaaagaatgtgaggacttggctgggtgcagtggctcacacctgtaatcccagcaactttgggaggccgaggcaggtggatcacgaggtcaggagatcgagaccatcctggctaacacggtgaaacccggtctctactaaaaatacaaaaaattagccgggcgtggtggcaggtgcctgtattcgcagctaattgggaggctgaggcaggagaatggcatgaaccctgggaggcggagcttgcaatgagccgagactgtgccactgcactccagcctgggtgacagagcaagactctgtctcaaaaaaacaaaacaaaacaaaacaaaaactagccgggcgtggtggcgggagcctgtagtcccagctactcgggaggctgaggcaggagaatggcatgaacccaggagaaggagcttggggtgaactgagattgcaccactgcactccagcctgggagacagagcgagactccgactcaaaaaaaaaaaaaaaaaaaagaatctttaagaatgtgagtacttgtgccttctggctcctccccacaggcctgggaaggcatggtcaccctaacttggggtggggaaactgaagctcagagaggggaagcagctgactcaggctgtgctaggccaggcgccaggactctggctctcctgtgtcctctctgggggctgccactgcctcagctcttggagcttgctcaagtgcagggaaaccaaactgggctttgagagctaggagagctgggctccaggctgtgtaggggagctcccgtggtttctgtggctttgtggcttctttcgtggctcctgggctggtggctgtgaccctcagaggaccccaggcaccacgttcctgtaccccctgcatggagcttttctgtgtgccccattgggaagtgaagctatcagagtcccctccaaacatgctttctctggttttcttcaagaacacagctggactcctgggacccagcttttgtctctctctgactttctcctctccttcctctcccccagtgcctgccacgaaacagcacccagaagtgcaggtggaagatactgatgctgatagctgccccctcatggcagaagagaatccaccctcaaccgtgttgccgccaccgtctcctgccaaatcagacacccttatagtcccaagctcagcctcggggacacacaggttaccttttatgcttctcttgggcttttctcggcactgtgccacctgtttatttggcagatgaagagactgaggccagagggagaagcagctggactaaaatcacacagcgagttggtgtcagaagtgggactatgatgccccttcctcgttttcctaactcctgaattaggtctcttataaaagctctcatgggaggccctgtcccaaatgccctcagctataagttagaaggagtaatataataaataatatagtaatagcgaggcacggtggctactgcctgtaatgccagcgctttgcgaggctgaggtgggtggatcgtttgaggccaggagtttaagaccagcctggccaacatagcgaaaccccgtctttcctaaaaatacaaaaaaattagctaggcatagtggctcactcctgtaatcccagctactcgggaggctgaggcatgacaattgcttgagcctgggatgtggcagtgaactgagattgtgccattgcactgcagcctgggcaacagagcaagactctgtctcaaaaaataaaaaaaaaaaactttttaaatttaaaataaataaataatatagtaatacataataaatgttacagaattaatttctacctccacattttattttatttcatttttgataggatgctatttattaaaacttgcatattataactcaccaagtcttttttaaaaaaaaaactcttaaattttaagtgtacagtacagtattgttacctatatgcacattatttacagcacatctctagaatttttcgtcttgcatgactgaagctctatactcattgaacagcaactccctattcttcccttcacccccaccccagccccggcagccaccattctactttttcattctactttctgtttctatgagcttgactactttagatatctcatatatgtggaatcatgcaatatttatctttttgggactagcttatttctcttggcacaatgtccttaagattcatccacattgtagcatgtgacaggattttcttccttttttaaggctgagtaatgtcccattgtatggatatgccacattttcttttctttgttcttttattttcttttcttttttccttcctttcttccccctcccccttcccctcctccttcccctctctctcccctcccctctcttcccctctccttccctcccctctcctgctttcttcctttcagacaagatctctctctgtcacccaggttggagtgcagtggtgtgatattggtccactgcagcctcaacctcctaggctcaagcatttccccttctcagcttctcgagtagctgtgactacaggcacatgccaccacccagctaattttttattttttgtagagatggggtcttagtttgttgccaaaggctggtctcaaactcctgagctcgagcaatccacctgccttagcctcccaaagtgccggaattacaggtgtgagctgccaacacagcccacattttctttatttatctgttgatggacatttatattgtttccatctcttggccattgtgaatagtgttacaatgaacatgggagtgcaaatatctctttgagatcctgattttgattattttggataaacaaccagaacagggactgctggatcatatggcagtcctatttataatattttgaggaaccaccattctgttttccacagtgactataccatttttcctatttctccacatacttgtcaatgcttgttattttctgtcttatttatttatttattttttggatcatggatatcttaacaggtgtgagatggtatctcattgtggttttgatttgcatttctctgattatatggtttggctctgtgtccccacccaaatctcctctcgaattttaatccccatgtgtcaagggacggacctggtgggaggtgaatggatcatgggactggttttccccatgctgttctcatgacagtgagttctcacgagatccaatggtttaaaactgtggcacttctggcatttaaaactgtgtggcccctccgcatttgctctttctttctctcctgctctgtcatgggaagatgtacctgtttccatctgccttctgccatgattgtttgtttcctgaggcctcccagttatatttcctgttaagcctgtggtactgtgagtcaattaaacctcttttccttataaattaaaaagaaaaagtctctctctctctccctctctctcttttcctctctccctctctctctctctctctcactgctgtgtaagatgtgccttgcttcccctttgctttcctccatgattgtaagtttcctgaggcttccccagccacgcggaactgtgagtcacttaaacctctttcctttgtaaattatccagtctcaggtagtcctttatagcagtgtgaaaatggactaatacacccaacgattagtgatgtcgagtagcttttcatattcctgccagccatttgtatgtcttctttggagaaatgtctattcgagttctttgcctattttttagttaggtaatgtgtttgtttgttttcatattgaggtgtaggagtttcttttatttatcaaatatataattttcaaagattttctcccattctgcaggctttcttttcactgttgtttccttctatgcagaagtttttagatggagataatcccacttgtctatgttttgcttttgttacctgtgctttcagtgtcatctacccattgtattattagacaatataatgtgggctgggcatagtggctcatgcctgtaatcccagcactttgggaggcggaggcagatggatcacctgaggtcaggggtttgagaccagcctggccaacatggaaaaaccctgtctctactaaaaaatacaaaaattagctgggcatggtggcacatgcctatagtcccagctactaaggaggctgaggcaggagaatcgtttgaacctgcgaggcagcggttgcagtgagccaagatcatgccattgcattccagcctgggtgacagagtgagactctgtctgaagaaaaaaaaaagataatagataatataatggaaacaccacagaacactagaaaaataatcatctacaatcccaccacccaagatggtgtttttactactctgcattctcctctatgccttggttaggcccatggtcttgaatggttttaattggaggagggatccagtttacggtgctgtctcattccatgaacccttttccatattgctgggctgtctccttaatgctcacttatgatggctgttgggtattcctccagctccatgtgccggaatgaacttaacaaatcccctcttgttgggccctatccctaatggcaccatgatcacgtgtttggtcttccgctctctgcccttaggctcctttctcaagagtgacactcctagtcaaggtggtgcacatttttacacctcttcagataaatttgttgctgagtggttagagctgcttttggacaactcaagccaggtgcctgggagaaggctgtgtgtacagctggaggcaaactgccaagggcaggacagtgctttataagctaagggaggctgtctgtaactcttctgcactggttggatgtagagatggttctttcttcttagttaatttttgctctcatccatgagctcctgagtaattgctcagctgaggtcagaaggctgtcagagtggagatggctaggtgtagcaaactgagggctgtgaggtcttaacacagagaaaagagacacagtttcactgagccttggagtacagctcacaacttcatcagttcttatgtttagttcactgaagtatgtacaaagcccattaggggatccagaaatggctccacttgtagacatctctccatttacccctgttccctttatatgggcagggaaacaatgaaggctgggctgggtagggggtggcatatttaggggagggaggggaccaagatcatgtgtggctggaatctaagcctctggctttctgcttgtgagctgggcctgtgaggctcctcttgtccctgtcattcatgcattcgcaagcatgtactgaacatctgtatgtgctgggctctgccctgggtgctggggatacatgagggagaagcctggcaggggcctgccctcatgaggctgacattctagaggggccaagatagacaatgaacaagtaaccaaataaacaagcaagtgccaggttgactgtgactatgagaaacagggtgggaaacctctgcctgagcccagccctgagaggggagagttctgaggcctgcctctctgtagaggccgagggcggtggggctgactgtgagcagggacagaatgaacattgggagccaaaaagccacagaggagcttgagcaagtccctctttccagcttaaggccatggcttggagtgaatcccagagcatcacttgtaagacgtgggtcttaaggcaggtcatttaacctccctaggcctccattttccccgtgtaagacgaggaaagaaacaccacctggttactagaattgtgagaatttaacgagctactgcaccctaaggtactgagcacagggccagacacaggcagtgctgggggaccagaagctgccagcttaggtcctcattctggcttctctggggcagcttgacttttgtgggttttgttttgttttattttgttttgttttgttttgagatagagttgtgctcttgttgcctgttgcccaggcaggaatgcaatggtctcagctcactgcaacctctgcctccctgatttaagcgattctcctacctcagcctcccaagtagctgggattataggtgcctgccaccatacccggctaatttttgtatttttagtagagacgaggtttcaccatgttgggcaggctggtcttgaactcctgacctcaagtgatctgcccgcctcagcctcccaaagtgttgggattacgggtgtaagccacagcatccagcggcagtgtgcactttctaggctcaggagagtgccctgtgctgggcacaggaggatggactttgggtcccagcaatggggtttttggccccaatcttcttgtgtggggctgttcttgttaattacagtgtgaaaaaagtgaatccatgaattttgccatcctcggcgagttggcagaaggcaacaggatcatttcagagccttctggaatcaaggtggatgtcacacatccctccctctggatccccctagaaatcctagtggtacaatcctgagtcaagatgatgaggctggggaagagcgctggcctagaaccctggcagactcaggtttgggtcccagtggagtgctgcgtctgcactgtgatggcctcagtgacccctgccccagtgtcctcctgcccagctctctgattggccctcaggggctggagtaggaacctctgctgaggtgagcttcttgggaagatgtgcagatgtcagcaggtttgggctgggccccagggtgtgttctcagaggctcctcctctgacactccagctggggaaagggtggaatttggggactggctggagttttcagcttctgctgggaattgcagattaatcactaaagatccttgtcaggcttggtcccaaggtgaagctccctgcctgtggattccatttctgatcaaacctcacggaaatgaaggccctggtaaaaagtaatcatggccgggggcggtggctcatgccggtaatcccagcactttgggaggctgaggtaggcagatcacctgaggtcaggagttcgagaccagcctggccaatatggtgaaaccctgtctctactaaaaatacgaaaattagctgggcatggtggcacctgcctgtaatctcagctactcaagaggctgaggcaggagaattgcttgaacccgggaggcagaggttgcagtgagctgagcttgcgccactgcattccagccagggcaacagagcgagactccatctcaaaaaaaaaaaagtaatcatgaacttcccttgggaaaccaaggtcccaggacctattttctggaagtcagctccaccattttactttcacagagtcacagctaaagaccgaagcaaggctgccctgtgttcaccaaggctgaggagagccctgctgagtgtagcaattgcagcctgaccttcacagcaggtgcccagcctctaaccgttttctagtcctaccactcccaacttgcattttattttcatgtccccacagccaagtttctcttgctgattcagctgtgtgtactaccatgttatgcccatttttggtacactcaggttcaattcctgtattagtctattcttgcattgttgtaaagaaatacccgagactgggtaatttataaagaaaagagagaggccgggcgtggtggctcatgcctgttatcccagcactttggaaggctgaggcaggtggatcacctgaggttgggagattgagactagcctggccaacatggtgaaactccatctctactaaaaaaaaaaaaaattagctggtgtggtggtgtacacctataatcccagctacttgggaggctgaggcatgagaattgcttgaacctgggagacggaggttgcagtgagccgagatcgtgccactgcactccagcctgggtgacagagcaagactccatctcaaatgaataaataaataaaatactaaaaaataaagaaaagaggtttaattgggtcattgttccacagactgtacaggcagcatggcagcatctacttctggggaggcctcagggagcttgtactcatggtggaaggcaaaagaaacaggctctcacatggcaggagcagaactgagagagagtggggaggtgccacacagttttaaacaatcagatttcatgagaattcactcactatacagtaccaaggggggatgttgccaaaccattcatgagaactccgcccccgtgatctaatcacgtccaccaagccccaccgccaacactggggattacaattcaacatgagatttggtgcggtcacagagccaaaaccacgtcaagtcctaaactctcatcttcatgctactgactgatctgatgctcatcctgatgtgctttcatgtgtgacatgcatacccatgtccccagactcttggtttcatgtgctaacactcagccttctgtgttttaaatgctaatggaagtcattaataatgaccattcttctccaccaggacttcattcatggacatatgaaatgctcttcctattggtagatattggcctgggcggagtcctccagacacaatctttgtgtttctacatcagttagttctactctatcttaaagaggattctttctctaacactggagcttggtttcttggtggtattaaggaatttctctctcttgatcttttttcctctttcccaggcttttgcgtttctcagtaaaccaattcattctctctgctgggacagagggtgggaaaatccagagagttagcccctaagataccaacataaaatagtgtcaaaatcacctcttccaccaagtcagacacccaggctccaacctgctgatgtcaggccagaggcaggttgggcaagaaccttcttgtctctgaaattcaggtggatttcagatctagacaccataagccaagacactaatggctcaagaatgaggtactccatggcagacttggacttcctgactgatggaggaccccaggatcatttagtcctcattcttcagatagggagcctggggctcaggaggggatgggacttacctaaggtcacaccgtaaggcggagactggattccatggcttctctgatagctgaaaaggtggtgtgatagagagtagaggggaatgaggtgggtgactttagacagggagcaggagaggggaaggaagttgaaactgagaactaagtgataagtatctcatttacttgagtagatttaatcccattttacagagggggaaactgaggtaactcagcatgttttggtaatttgctgaggccacacacaggtaagaggcaggactggggtgcaataccaatgctgttacctttaggccaagccatttaacagatgggaagactgaggtctagagagtggctatgcccctctcttctgccgttttccctccctccaggcaaatgaggactcagaagttcatgctccgccccccatcctctatctaggaattggctctagatgatctttagggatcaaagtcatgacacttctccctggggcctctgcctttgctgaaggccccttccacatctgtgtctttgcaggaagaagctgccctctgaggatgatgaggctgaagagctcaaggcgttgtcaccagcagagtccccagtggttgcctggtctgaccccaccaccccgaaggacactgagtgagacccctctggggtctcagaaaattgaaagactgcggggagggtgggggatgtgggggggctagtgtggatgcttttagaaccttctaccgcaaggcagactttgccagtggcttccgagcagtaagtcgggatcggtcgcctgcccaggctgcttctggctggcccaggagtcctgttaaatccagtgggctcaacctctgggcccagctgtgtccacggccagcagtgctcagagagggagggatctctaggcagaggtccccttgtgaaggagaggctgaggggagctgcctgcagggctcctgctgctgaacttctgaaaggtcagtggggacagggaggaccaccaggatctccagtgggttctgccctggggagtttgtgaaaaaagaaaaaaaaaaaagattccctggccctacctggctgcgctggatcagagctgcagacagtaggcctggggagttcacattttccaaactccccaggggatgtggtgcagctggcctgcagaacaatgtttagaaaccactatgatgacggccaggcgtggtggctcatgcctgtaatcccagcactttggaaggctgaggtgggcggatcacctgatgtcaggagttcgagactagcctgaccaatatggtgaaaccctgtctctaataaaaatacaaaaattagccgggcgtggtggcacatgcctgtaatcccagctacctgggaggctgagacaggagaatcacttgaacctgggaggtagaggttgcagtgagctgagatcacacctctgcactccagcctgggtgacaagagcaatacttcatctcaaaaaaaaaaaaaagaaagaaagaaagaaagagagaaagaaaccactgtgatggcattgggacctgggtctctgagatcgaactgtccccagggctgggccagtgggaggtttcttcccgaaggatctgagaagctctggtggatggcgaatacccgggccctgggctctgcctggaatccccaatcacagtccttggccatgactcctagatgagccacaggagacagtaggctttccttcttccttccagtctttttttctatccacaattttatgcagtttatgcttaacagagctgtggaaagttagaaaagataagcaagaagaagccccaaccccaccctcagtccagttgcccactgcagcacgcagtggactcacattttatgagatagggtaggggtagggtttaatatcagaaacgaaggcagaaatgaggtataatgagaaaacctattcttgaaaactcttaaggaggtcaccttggagacccatgtattagctaggcaggctaggctgctggacctcaaatggacctcaaaagctgagtggcttaaggaactgtatcatataccatcatcatctcaatagttgcatgcatcaggtcagcagaaggttctgctccatgcaatcatttagggacccagatgacagtgctctgccactttatccatgtgccttcccatgtcccactggtcaccactagaaagggagaactccaggcctgtcttcagtaaggaggcccctagttgcatgtattgtgtctgagagctcacattccaatagcgagagcctggcacgtgatccctggctgggtggctatatcccagtgagtgtgcaccacaggagagaatgagtgtaggggagcagctcatgtccccgccacacctgtatgccagctctcattaggagccccacacttggccgggcacggtgtctcacgcctgcaatcccagcactttcagaggccgaagcaggtggatcacctgaggttgggagtttgagaccagcctggccaacttggtgaaaccccctctctactaaaactacaaaaattagtcaggcttggtggcgtgcacctgtaatcccagctactcaggaggttgaggcaggagaattgcttgaacccaggaggtgaatgttgactgagccgaggtcataccactgccactccagctgggcgacaagagtgaaacttcatctcaaaaaaaaaaaaaaaaaaaaaagagcctcattttctccagcccgtcttcctcagttgagctcaaaaagagtagtcgactgcagtttctgtgtcctaatgtatgaaaaaaaaaaagataaaaaagatattcagctcagcaagatgatctcagtgaggctactcagaggaaagaaagcagtttctctctctctcttgctgacagtgcagaaactttaattcctgtaagttaaagggatatagaatgtatctgcactgctttttccaccagttacatcctaagcctaaaaaagtaggcctgctccctctctgttctgcccctggacacatatctcatgtgaaccctgcactgggatgaacagcccaattttgctgaactctaaactgagttccaagagtttcctcctaaattacaagtggagtcacgctttttccagaactgcccatctgaatcagagcctacgtggtacattttccaaaagctgggccagaacacctgggcattattcccggactgaatttccttctaggtgattacggtaggtctgtggtttctgatgtcagaaggagatgggggcaggacttacctccttcaggctctgtcagaaggtgggacacagacgctgcacagctctggcctgggggtgcacaggtccctcccggctcagcctgctcagctttgggtgatgttcccacagtggccaggaccgtgcggcctccacggccagcacaaatagcgccatcatcaacgaccggctccaggagctggtgaagctcttcaaggagcggacagagaaagtgaaggagaaactcattgaccctgacgtcacctctgatgaggagagccccaagccctgtgagtctggagctggagggggtctacctggatggggatggggtggggcctccaaagttccctgtcaactcatggcaagggtggccccaaggaaatggttgaggtccatgagagaagcccagatccccactctctggatttgggatccatatgtacaggttgagatatgtacccaagggtgggaagatcaaagttctgaccaacaatccacttgcactcggccctctctcccatggggcaagtgccttccttgacccttctgtccctttcctactggtaggtgagtggtgccaccccaaaatgtatcttatggtcttacactcagattgtgtgcacagcctgctctggaactaggcagtcctatttttcagagatgtcagtgccttgaaagttcttattgaggctatccgaatttttcttttctttcaaggtatcaggaggaaataagacacatgatctcttgtcagggagattttttagatctttccagaggaaggctgtatcttggaaatcatggtgcccacaacaggccatgcagagcctgatgtcccagtcttgaagctggaaaacatagccatattgaacctataagagccaatccctagaccaaaagtatcatcatagatgcacagggaggctgtgatcccatctggtctctgtttttagagatgaaagagttgagattccctctcagaaacctggagcaatacttccttgattttgttaggcccttcagcattccagccatgggtactgggaacactgggtacaaaatgcccccatcccatcagagggaacaaagggggtctaagcacaacacacaagcagacattgaaacatccaactggcccagaaacagctcatttggggcagcttctgagaagcagttccagactgtaattggtaagaacttctgggtgggcacccaggttgctgttgctgttgaggagggttgtggagttcactccagaagagcaccttgggttctgcacacagagcttgcagtagcttgtataatggtgccagggtcctctcagatctggatccaaggtctgcagttgggacccttctctctgcatcctctacctgggcctcagggctggttcagatggtcaccaatgtcatcccacagccccagccaagaaagccccagagccagctccagacacaaagcccgctgaagccgagccagtggaagaggagcactattgcgacatgctctgctgcaagttcaaacaccgcccctggaagaagtaccagtttccccagagcattgacccgctgaccagtgagtcctggggaatgggtgttcccactgtgtaagatgagagagcaggagagttggagcgggatggggagagggtcaggggattcaagaggtgggatgggaggccacagacaacctgggttcatgatcttttatacctttcaaaagtattccacagtttcttgcctgattctcaaaacaaacccagcctggctaacatgacgaaaccctgcctctattaaagatacaaaaattagctgggtgtggtggtgcacacctgtaatcccagctacttgagaggctgaagcaggagaatcatttgaatccaggaggtggagagtgcactgagtcaagatcgcacaattgcattccaacctaggtgacagagtgagactctgtcttaaaaacaacaacaaaagtccctggaataggaacataagatcatacccattttacagatgaggaaactaaggtacagataagtcagccagggtaaagatgcaactagttagtgcggacccaggactcctgactcttggccaagtcctttttcactctggtcgtgctggccttttcctagagctcctgctctgaacagaaaaagagcaggaatgtgaattcctcttgcttccctttaagcccacttcatattcctcagaaataacccacttcatatgtgcatagcactttagagtttacagagggctccctgcctttcttatctgaccttttcctgtgatttctcagaagagggcaggtgccagagagggactttctcaaggtcacacatttggggggcaggacttcaaccctggtgtccactggattctttaaataacctgatgggctgggtacattggctcacacctgtaatcccagcactgtgagaggctgtagtgaaagaactgcttgagcccaggagttcaagatcagcctgggcaacatagtgagacctcatctctacaaaaatagtaaataaataaataaataaataaataaataaataaataaccagatgatctggaatacccatctatccatccatccatccatccatccatccatccatccatccatccatgcattcacctgtctgtccatctatctgtccatccttcatgcattatttactattctgtatttactgaggaagaaaatacattttgggaaaaaattaaagaagaataaaagcaaatgagttttccagttggctgcctattatcttataataccagcatagtccctcctgagagtactctgatttattagggattagcagtaatttatttttaaaacagatagttgtgtttttttttttaagtagagatgggggtcttgctatgttgtccaggctggtcttaaactcctgggctcaagcaatcctcccacctaggcctcccaaagtgctgggattacagacatgagccactgtgcctggctcctaaagcagagagttgtgtgtgtgtgtatgtgtgtgtgtgtgtgtgtgtgtatatatacacacacacacacatacacacactcttacaaaagtgccacatgtagtagttgaaggagtagaaagaacaaaaccctacctgatccaactggtgaagagccttgcctggctgatgctctagcgtccccgtcaaccttccccacagacctgatgtatgtcctatggctgttcttcgtggtgatggcctggaattggaactgttggctgattcccgtgcgctgggccttcccctaccagaccccggacaacatccaccactggctgctgatggattacctatgcgacctcatctacttcctggacatcaccgtgttccagacacgcctgcagtttgtcagaggcggggacatcattgtgagtcacaggcaggtggtgttggggtgaccgggggcagaccgctcagccagagcctccagggcactgacccctgatgctgtcatagatgacaaaataagtgaataaggaaatctcaagaacggctgctgtgcttgttcaatagcatggttgtttattttgcatgcctttgatacgttcaaattacgcacatcagatattgctcataggtgaaatagttcctggaccacttgacagaatcaaagatagagaagtggtccagggaatggtctttagtgaggatgtacctggtttgaatcccacctccaccacaactagctgaatcgcctctgtttcctcatctgtagaatggggctagtaatagcttccacctcccagtgttgccatgaggattggttgaaacgatgcatgcggggcgctcagcacaggtatccactggcaattgacttctcccaggggtcctgcaaaaacacactgatgctctcctacttgggccaatttgagaccctggcctctggtccagccccgtgcaccacccctgccttaccagggaggaaactgaggccctgactgtgacttctcaggaacaggagacacagtccctgtctcccagtgtgggtcactttccaaaattccaccccggcagtgcctgttttgctgtgtgcagacaagctcaggttttgcctgtaaacgattttccttggagagatttaaagagagtaaagtaaaaagtaaagagatttccttggagaacctcttttctggcctgatcagagtgactaccaattccttagtaaacagatgtgcaaatggtccaggtaagaccaatgggcagagggaataagcttaatgtccttgctttccacccaagaaatcaggatctagctgggtgaccagaacagatccctcctccctgggggctgggcctctccacccataaaactcaaggctttcaccaaggctcagatggtccttgggctgttatgctcgtttcagggtggggttcttggggaagtttcacaattgctccacagggtcagagattaagctgtaaggtcatttcaccatcatcattccctttctttcagacggacaaaaaggacatgcgaaataactacctgaagtctcgccgcttcaaggtgtgtgccgggcatgcaaggtttagcgtctgcggggtttcagaagggggtgcctcagagggccctgggtgcctggggcgttcatgagatgtggtttctgccacacggagggatgctggtccctgtgggagtgtcctccaaaccacaagccccaggagaccagcacaggctgggtagcccccagaagttatctttcttctttttcttttcttttcttttttttttttttttgagacagggtctaactctgtctcccaggctggagttcagtggtgtgatctcggctcactgcaacctctgcctcctcgttcaagcactcctcctgcctcagcctccctagtagctgggattacaagtgtgcgtcaccacacccagctaatttttgtatttttagaagagacagggtttcaccatgttgggcagtctggtctcgaactcctgacatcaagtgatctgcctgccttggcctcccaaactgctgggattacaggcataagccaccgtgcctggccagaagccacctttcattgtgtctgtaccactcccgccccttactgtatggcacagcagccactatcgaggataatgaagctgcccttggggctggcaacacgggctttgaagccaaacaagggcttgtcggtgggacaccttctgccctctagttttaagctctactggggcattctgacctcacctttccatggaagggagagactccgcctctcactcccctcaccttccaccctggagtcatccgttttacccccatggtgtcccactgggatttcagatggacctgctcagcctcctgcccttggattttctctatttgaaagtcggtgtgaaccccctcctccgcctgccccgctgtttaaaggtaggactgctgggcccaccaccccaggccttcagctcatccctgctctgcaccgacactggcatcttcgtgtctgcccccagcagcactggggaggggagttcctcaagggatggcccgaggggagatgcatttattccacgtgtgtcttagtggaaagttcattacaatttgctagtgcttctgtggtgctgcatgttaggtagtattattgccagcattttacaaatgaaggactggggcacagagaggttaattaatttgcccaaagtcacacagccaggagggagtggagcccagatatgaatgcaggtcatctgtctccactgtttacgctctcagtgattatagagactctcaagaggggatcttctgctttatgatggtctctgtctaaaagatggggacattggtgcttggagaggctgggggacttgccctaggtcgcaggagcaaggaagtgccagggatggatttgaatgcacagccagacacccgtttcatcactggccaggcctcagtgtcattccagccattccttctggcactcactgggcagagcgaaagtctccaggatggtctggctgccacagctggccatggtcctgtcacgtgatcagggtggatagccactcagagcattcaggatcccccaaatggattttgatggccaaccaatcacattcatctgtctcctgaaatgaagactggtgcctttttctgaaaacagtactgagggaatttacaaaaaatgcaaatgcaataacatgaacaacccagagaaacagggcagagaaaactagggggcgtgcaagtgccctgatgagaagaaagcacacctatgtggaatcgagcatggaagctgcctctgagcttcctggctgccaagaggaagggggaaagtggaattggcaccattcttatttgacacataccagcctcccaggggctgcagaggttgctttagagccaaacatcagagtgaggaaggttgggtccacaggccaagtttcaccccagacgcagaggtgagatccataccttgggtcacatggtggccccagtgagggggcaaaactcacaggcctaacattgaacaccattcagtggacaaaactctttaagtgagccatccaagcccctgttctttctgcctccagtttaaactgtggctggaactagaatgaacacatggatgataactggaatatcccttagagaatcttcataaatactattttcaaatatcaaaaaataaatccaaagatctagaggtggtatagcataaggagagagcttgcagctctgagtctggcctgggttggaatgctgactctctcacataccagctgtgtgctttggacaagttactggacttccctgagcaccaatttctgtcaaaggagaatgataatacatacttcatatgtaaataaggaataaggtaatgtatataaatgtatgtgctggctgggtgtggcggctcatgcttgtaataccagcactttaagaggctgaggcaggaggatcacttgagcctagaaatgtgagaccaacctgggtaacacagtgagactctgtctctacaaaaaatttaaaaattacccatgagtgttgatgtgtgcctgtagtcccagctacttaggaggctgaggctgaaaaatcgcttgagcccagaagttcgaggctgtggttatctatgactgtaccactgcactccagcctgagtgacagagtgagactctgtctctgaaaaaacaaaacaaaaaaaggcatatgccagtcatataataggtgctcaataaagaaaagtagttattaatatacttttattcttataaataaacctttgaaggatataagagtggggtgttagggatgctgtctctttattaaattgttttctttataagaaacattaaaaacagcagctttaacctggatgcatgtacccctaaaagtctcatgatagaattcagagggtccaggagtcccctgaaattatatgcaaattgtgagaacaagattacatgtcatttccaagggaagacgggctatgactttcttcagattcctaaatggagtttctggcccctacccgtcaaggggctgaggacttctgatattgaatgctcaccgtcctgttccctcctgggggctgcaggaagagccctgagtctcggcgcccgtgggcgtgggagcagcatgctacctatggccggtgggctgctctcacgccctcctctccctccagtacatggccttcttcgagtttaacagccgcctggaatccatcctcagcaaagcctacgtgtacaggtgagactccccctgcatgtgcatgcatgcacacacacatgacactcacaaacacacaacacacgcaatacacacacaacacagatgacacacacacaacacacacacgacacacacaacacacacacaacatacacacatacatgcacacacaacattcaacatacacacacccaacacacaatgcacacacacaacacacaacacatacatacgtgcacaacacacacacaacagagatataacacaaaacaacacacacaaacacacacaacacacaacacatgcagtgcacacacaacacacaatgcacacacgacacaaatgacacacacaacacacacacacacacacacaacacaggaagtttgcacctagaacagacagcaagacattgtctacccccactgacctccaggccccgtctccactggaagccaggcatcttcctggtcccgcctcctctttcccagagaaatgtttgttatttagagaaccaggaatatccgatgcccctcattgtgatgagggtgcacatcagctggcacgaggggcttaccagcattgcagcgaaccgggcctcattttggcctcagctcagggaactggagcccccagccagctctaacagaatgggaacaggtgtaaggtggcggtggctgtttcacagatgtctgagcatgaggtgcaagaccagccaggccgtgctagggagcaaggctcctgtccacatctctcctggggcgacatggccccatcttcaactcaactcctctgcacacatcagtccctccctgctcctccacacacacacacacatttcccctctggcccctccatcccccagtgcacagtcagctctgctacctctgttccaatcctagccccaggtcatgacaacgccccattcaagcaccacccttcctaactggtgcaatctcaacaaagcatccagtcgggccagcccagccatgggttggctctcactgtccaggtgtctatacctcacctcccccttccgccgctgtgttcatgcgctgtgttccttctgcagggtcatcaggaccacagcctaccttctctacagcctgcatttgaattcctgtctttattactgggcatcggcctatcagggcctcggctccactcactgggtttacgatggcgtgggaaacaggtgagccacagtcctccccctggggccatgcctgggtgaccttcctgttctttataattcgcagcacagagactccaggaaggagtcttattgctgctgtattgccaaggccactttgctcctaagcaatcactggcatgacaaggctcaagagccacatcttgggccgggtgtggtggctcacacctttaaccccagcactttgggaggccaaggcaggcggatcacctgatatcaggagttagagaccagcctggccaacatggtaaaaccccatctctactaaaaatacaaaacttagctgggcgtggtgatgcacacctgtaatcccagctactgggaaggctgaggcaggagaatctcttgaacccaggaggcggaggttgcaatgagccgagatcgtgccattgcattccagcctgacacaagagcgaaactccatctcaaaaaataaaaatagaaaaagagccaggtcactacatcttccccaagctaaggtttcctgagcacctgcatgtgccaggccggaggtactggtgtgaacaagacttgcttggatcctttctgcatccaaactctattagggtgtgcaaatacgctgtatttgtgcatctactcctgcttccccgggcatggccaagagggaatgaggccagagaatactccccagcacagctccccaggcactgctaccatggaggtgctggcgaatgaggtgagacccacttgccaatcagagagccaccatccattatgagacttgccaaagggatgatgatgacgtgcgaaccaaaaagaatctggcacaagtttcaatcaatttagaaagtttattttgccaaagttaaggacacgcccgtggtacagcctcaggggttcctgatgacatgtgtgcaaggtggttggggtgcagcttgcttttatacattttagcgggacaggatacatcaatcaatacatgtaaggtttatattggttagatctggaagggtgggacaactcaaagggaggagtggcttccaggtcataggtagatttaaaaaaatctctgcttgggaaaaaaaaaaaaaaaaaaaaaaggccgggcttggtggctcacgcctgtaatcccaacactttgggaggctgaggcgggcagatcacttgaggtcaggagttcgagaccagcctggccgacacagcgaaatcccatctgtaataaaaatacaaaaattagccaggcatggtggcagcgcctgtagtctcagttactcgggaggctgaggcacaagaatcacttgaacccgggaggtggaggttgtggtgagatgaaattgcaccattacactccagcctgggtgatagagcaagactctgtctcaaaataataataacaataataaataaaaattccctgcttggcaattggttgaaagagttatcagtagaaagaaatgtctgggttatgataaggggctgtggtgacctaggtattttcatgcagatgaagcctctaaatagcgggctttagagaaaagagactgtgatgtttcttaccagacttaaggtctgtgttgatgttaacgctggaggggtacaatgaggcgtgtccgaccccctcttccttcatggcctgaattaggttttcaggtaactcgggaaagcccttggccaagaggaggggtccgttccgatggttgggggccttataatttatttttggtttacaatggtggtgatggtgacaatgatgatgataatagcagcaatgcttgtaggatacctattttgtgccagccctgcttaaagcactgaacacagtaattcacaaccatcacatcagatagtaccgccccattcccattttacagctgaggtagcagatgggagttcccaaggttacacggttcatgagttacagagctgggatttgaacccaggtgtcatggccacagagtcctaactgcctcgatgaaaaggaaaagtgccaacctggtggccagagggagtgggggaggtgggcatgagcactgttgattccaccaaaagtcaccaaaagttactaacatttaaaaaaacttttttagccagatacagtgactcatgcctgtaatctcagcactttgggaggccaaggtgggcagatcacatgaggccaagagtttgagaccagcctagtcgacatggcgaaaccacatctctactaaaaatacaaaaattagccaggcgtggtgatgcacgcctgtaatcccagctacttgggaggctgaagcaggagaagtatcgctggaacccggaagggggaggttgcagtgagccaaaattgcgccactgtactccagcctgggcaacagagagcaggaaaaaaaagtttagaaaattattttaatgaacagacttaatttatttaaaagtggtttgaagtttatagagaggtccactggaaagtagagagagttcccatatatatgccacctccattattattattgttactattttttgagacagggacttactctctgttgctcagactggagtacagcagcatgatctcagctcattgcaacctacacctcatgggctcaagtgatccccccacctcagtctcccgagtagctgggaccacaggcacacgccactgcacctagctaattttgtattttttggatatatggagttttgccgtgtggcccaggctggtctcggcttcctgagctcaagctatctgcctgtgattggcctcccaaagtgctagagttacaggtgtgcacctcattttaaggctggatggtgttgaaggcgacactcgctcccctgccctgtcaaaagccttaagcaggagagtgagcagagggagggctcagccctcgtgctgatggaagagtgcactgggggtgagggcaggcagcagacagccagcaaggggccctgctgtgtcagagagagcagcaaaccctccaggccaaccggtggcttgacctaggggagggagggcagtgtgggcaggagggatgcgcacaggatgggggctgggcctgcagagtcagagcggaggcttgagggacgagggatgaggagtccccaagtgtgactcctagagctgccccctggcagcggagacaggccacttctcttttctgggcctcagttccctcacctgcaaaatggggctgcaaatgggactcccaccctaaagaagtgacaggagtagatgcctctgagcccctgcctcagtgcctgggcacagtgggcgctcagtcagccatagtgaggatgagaaggtggaagaaggaaaggtccagcggggagttactcaccgaagggtgcccgcctcaccctgggctgtgcccactagtgacacaaaatgcccgtggtccagctgtctacccccaggcccttgctcccagtgggaacaggtgggatgcttgcgtccaaggtggcggctttgtagagtggttaattgttcagaacgtcccctcccagtatagatgccccaacctcagccatcatggctatggccgtcgccttctgccatgagccctgccccgagggggagccacgcctttacagagatgtcccaggctggttttggtggctcatatctgtaatcccggcacttttggaggctgaggcaggcagactgcttgagctcacaagttcgagaccagcctaggcaatatggggagaccccctctctacaaaaaaaatacaaaacttagttgggcatggtggtacacgctcgtaattccagctactcaagaggctgagatgggaagatcgctggaacccaggaggtggaggttgcagtgagcccagatcgctgcactccagcctgggtgacagagtgagaccttgtctcgaaagagatgtgccagaggccagggcagcccaggcaggcaggagaggagtccctgagagccactgtgaggtggagaatatcagggatggggtcaagatctaatgcttccccacgtcaccagtggcccttttacccattcccattcacagccctgctcctgagccctggctaaaccatgcattcattcacttccttattcatctaacccatcacaaggaggcagagggggacttgaagcccctttctatgcaaaggggagaatgcaatttctgcatggaattgaactctgtgagcttaccctttctgagacccagtgttcccacaggcacaatgtgggtaacttacatccagatttcttatgagaaataataaattaatatgtgtagcatgtctagcctgggcctgaacaggagtcagtggcccctgtgcctagctatggctattgttagggggaagccagcatggcaggaaaggagttaataacctggggtatagagattttagggggtcacaaaccccccagacattggagctaaaatttgagcatatgttggcttttctagggaaagagagctggctttctctagattctcaaaggggcttgtgccccagtaaactaagaactctcctccctggggctaagcctggcacatccgtcactgggcagctcagggaagggagagtaagcagagcagggcaggggtggggcagggggacagctatctgggacctccttctgcagggccctctgcgggaggagctcgagctgcccagcagtgggaagggcacgcttccttggcagcaatactccttcccaaatgtcgtcctgcagggaaccccaacatgtgaaccgagtacgagtaatgaaggaggattcttaagaaattccaatagcatgaagaataacaacttttacaaagcgaacatttgtggagtgcttgctgtgtgccaggggctcagggtcccgagctcctacaaatgctaggccctgcatcccgccccagtgctctcctgccccagttctgcccatcctgaagcacagatggtccccacagacaaggacaaggagacttcagggaggcccctaagatgtggcatgtcattggaagattcctccagctaggaagggtttggggtaaagccagagctttgtggacatcgcgcctatgtcctctctctgttggtggcccagcggcataagcacccagctcccggacagccgaggggtctgcagagttgggggtgctgctccgtcccgctaaacgctgcttcgcgtgccctctgatggccagaaccagtatgacgggggcttgacaggcccgttttgggttctgaaacttgcaggcaacaggtgatgtggaggtgcagggcggcccacagccctgcccaaggccccgcagctatcagaggcagagcccctaccacactccccagcaacctctgcttcctccttcctgcacgcattgcacgtcacctgcctgtcccctcactggaccacgagcttcttgaggatatgggcgaatctgttcagttccccagggcaggcaacagtggctgtgaaggctttgacagctcccttgctgagagtccaccacgtgccaggcttcttctagcacctcattttgtcttcatggtcttctgtaagggacattctattgccatccccatcttatggagaaggaaactgaggcttggagagagagagagagagatttgtccaagttatgcagccagaaggtggctgagccgaatggctgagcccagccagcctggtccagagcccatgttctatctaggacactgcataaatagctgctgcaggaaagccggcagggactgcccagtgtctaggcccttctgacctcacctttgctgacccaggggagggctcagcctgaggtgtggacaggtgtcagagggacccttgctgctctgtgataatcacacacaagcttggtgtcttcatgccttttgagctgctgtagtaaaatacatgagactgggtaacttataaagaacagaaacttatttttcactgtgctggaagctgggaagtccaagatcaaggtgctggcatctggtgagggctgctctctgcttccaagacaatgtcttgaaggccacagtgtccactagaggagaggaatgctgtcctcgtatggaagaaggcagaagggccaaaggaagtggaaaccctccaccagaaccttttgtaacagctttaatctattcatgagggcaaagccctcgcagcctaaacggcgcccgaaggccctagctcctgacaccattgcactgggaattaagtttccaatgcctgaatttcgggggacacattcagactggagcacttggggcatttcctatgccttttaccacacagtaggacaccctcccccatacctcccttccagaaggttcacaagccgacgtcagagggttactgctggtggatgacatcttagagaagcagacagcgcccagctcttgtacttaccaactagtgaccacgggtgtgccctttccctttgggggcctcagtttcactctctggaaaatggatgggccgggtaggggcgggtcagaaaaagtcatcctcaagatatcgtccaaacttgatgttgcttttgcttttcataagccaatatggcaggagatagcaaatgaaaagactgaaaattgaaggaacactgaaggaaattgagggagtgcggtcattaggagttggaagaccctggtctggcctcctgccaactcttcctggaaatcccctggagcctcagtttccatatctgtaaatggggatggcaacatgtccctagagacacaaccatacccgatagcatttgtgaacctgctctgcaaacggcaacgtgctctacacgtgcaggaggtggttttccttgcatagatgagctgtaaagggtttctgtcttttgcacaacatgcatctatcagaggcgtctgagccagactgctcggggcggcagagtggggcctgtgatgacccatgttccctttctcctctctctccagttatattcgctgttactactttgctgtgaagaccctcatcaccatcggggggctgcctgaccccaagacactctttgaaattgtcttccagctgctgaattatttcacgggcgtctttgctttctctgtgatgatcggacaggtatcggggcaccagcccagcttcccaccccacctgactgcagggccccctcccactgttgccagaaatgtcaccctctgtgcccgttgcttttggattaagcctgggaaagggcactagactgagagtcaggagcctggagcactggtccctgcgcggtgaagggggtggtggtgaactcggccctattccctctctgaggtcattatcatttgaaatgtcagttcctccgggtgcactgggctgaatggttttctgcagagaccgagggagaagcccctggtgtttctggtgtgccagggcagcatcttacattctggtcgagacatgaggtgacagtcagaggttctcaaatttatatttgaagggccccgccccgaggaacagcacactggcttcctatttcctccagcatggagtcagacaacatggccgccgtcaccgaggaactgtattgtaccagaatcagcccagcccaaggagctttcccccatggtgtggtcccagggacctgaggccaccaaggggctggcagtctccctcccttcctcttccccacatccatgctggaggcagaacttcccgtcagtaaaactttctctgtgtgaggacatctgcctacccccctcccaacgccctgccaggagcacatgcccgtggtctgtgtgaagtgacacatcccaaatccatggaatagcgcccacccccaatgacccagtggcttccttgacctcccataacccttcccccagatgagagatgtggtaggggccgccaccgccggacagacctactaccgcagctgcatggacagcacggtgaagtacatgaatttctacaagatccccaagtccgtgcagaaccgcgtcaagacctggtacgagtacacctggcactcgcaaggcatgctgggtaagatggtcacgccctggcagccaccagctcccagtcaactcctgtcgcctggtgcccggtgccatgccttcggggcgcctccctcgtcctctgtgtctctgaggtcccgagtactggggcctgtcttggctgtgtccccaacattggtgtgagaggtgcccagtggggcccctgaagtgcctctagcagggctgtcatgagatccctggagacggggggcttgtcttctgtgtgcctgcccccctcactttacccaccttgaaatgcatccccatccaagagcgaagtgtagtttgtttgtgtgtttgtttatttatttatttatttgacatggagtctcgttctgtcacccaggctggagtgcagtggagcaatcttggctcactgcaacctccatctcccgggttcaagcgattctcctacctcagcctcccaaatagctgggattacaggcatgtgccaccatgcctggctcatttttatattattagtagagacgaggtttcaccatgttggccaggctggtctcggactcctgacctcaggtgattagccagcctcgggctcccaaagtgctgggattacaggtgtgaggccgaagtgcagtttaaattgaaaaaaaaaaaaaaaaaaggaagaaggactttctgtcccttcctccctcccttcctctctctccctccttccctctctctctcctctctcctcgctttctctcagggcattgcacaccccatgatgggtgcagcaggcttagccctggatctcctggggcagctctagagctccacagccaggttggggtcctgagtttatccctcgagctacaagactacgggcatgtcactgccatttgctcatctataaagtcgatattatagtagggcacctcttgggttgcttaggggatttagtaaaatagttttgcctgtaatcccagcactttgggaggctgaggcgggaggatcacttgagcccaggagttcaagaccagcctggccaacatggtgaaaccccatctctacaaaaagtcaaaaaatttagctgggcatgttggtgcgtccctgtgagtcccagctactcaggaggctgaggctggaggatcgcttgagcctgaggaagttgaggctgcagtgagttgtgattgtgccactgcactgcactctagcctgagtgacagaacaagaccctgtctcagaaaagtaaaaataagtacctgtgcggtggctcatgcctgtaatcccagcactttgggaggctgaggcaggtggattgcttgagcccaggagttttcagaccaacttgggcaacatagtgagaccttgtctctaaaagaaaaaaattttttttagcttttcagggttcaaagtattttaaaaattttattttaataaaaactaaaactaagataatctttataaaacattctattaaaaagtgcctggcttggctgggtgcggtggctcactcctgtaatcccagcactttgggaggctcaggtgggtggatcaaatgaggtcaggagtttgagaccagcctggccaacatggtgaaaccccgtttctactaaaaatacaaaaaattagcccgcgtggtggtgggcacctgtagtcccagcaactcgggaagctgaggcaggaggatcacttgtactagggaggtggaggttgcagtgaaccaaaatcatgccactgcactccagcctgggtgacagagcgagactgtctaaaacaacaacaacaacaacaacaaaaacataaataacaacaacaaaaaaaacaggtgcctggctcatagaagtgctccagagactttagttcttgctgatgttgtccttccagggaagtgggaacacaggtgaccaataattgcaacagcgcaggggctactaacatagtagctgagtggaggatgtcaagggaaggcagggaaggcttcctggaggaggtgatattagtgctgggttctgaagaatgagtaggagtttgggaaatgcacaggggtgctcctggcagaggaaacggtattggcaaatgcctggaggtgagagagggtgcactacaaatccagagtggttccatgcggcagggcaatggtgtgccctggtgagccagtaggtgggcacttggccggtatgtatgtctggggtggggcccggccttgcctctgacccttgccaggccttgttcacagatgagtcagagctgatggtgcagcttccagacaagatgcggctggacctcgccatcgacgtgaactacaacatcgttagcaaagtcgcactctttcaggtacaccttttggtgccctcacgctcagggctgtgggaggctccaagcccaatcttctctaaaaagttcctttcccttcctcaccgggacagggctgtgaccggcagatgatctttgacatgctgaagaggcttcgctctgttgtctacctgcccaacgactatgtgtgcaagaaggtgagctggcctggcagccaccacgggatctggggttcaccatccccctggctttcaaggaactgagctggaggggtgcctgccagcccagggcagagcgagattgttggggagggagaagagcgtctgcggcttcatgctgcagtgacctgaccagacccaagagcaggagcggattaggaggctttgccgactctatgcagtcaacacacatgtgcctcgggctttgcaaagcattttctcagctccattgacacaggaccatgggggccaggacaaagaccccccccccaactccaccttacagaaagggaaactgtggagcctgaagagaggcagggccttgactgtgtagctggaactgcttctggggtctccatcttcccatcaggaaaatggggcaggagaagggatgggcttaggtcagaggttgcaaactggtggcctttggataagatccagcacacaggtattctgtgggtttttttttttctaatttttaaaaaatgttgaattggtccccaacctttaaaaatttggagattttgtataaaaattcagatttctggctgaaaacagaaaatctgccagcgctgggtccactttcccaaatggcaagaggcagctggggtggaggaaaggttgccccaaagggggacatcgtgtcccttcctgatgccacagcccccaccactccccactgccccaccctagaaccccctccctgctcagcttcaccctctgatcccagaaaacatctggagttgaatcctggggcctgacaatgtctagagccctttctgctccctgtccttggggttcaaggtgagaccaaggtcacttggtgagtgacgggaggggtcaggaacccaggtttcagtcctcttgcacagagccgttaataagttaataataaaccgttaataagcatacggggggaaacattacccaagcaggctctgcaagacttgggaacccccgtccccaagaaagtccctgtctccaggttatatgctgtgcagcagtgaaatttctggaagcagagagccggggtgaagaggggaaaagtatgcttcagagacctgagaatttaaagctgcaaccttaggggcaaagaggggtttgggagcaatagagtggcctgcctgacactggagccccttcctggctgtgcagccttgggcaagtggcttgccctctctgagtcctgctcatcttatggataaagtgggggatgttgatagtacctccctcatggggtggttgtgagggctgaataagatgtgcatacagagcttaacattgttcctggcacacagcagctgccagtactgttgctgttgtcttcgtgggtgatgcagagtttgctttaaatgagaaaaagtgaatctagagtctgtgattgcaaattaaattgagcacttggtgagcacgtgtgaagggcgccctctgctgtctggttttgctcggcagcgatctctctgagacaccccggggactggttactgaggtgagggtcccttcaccctttcactcttgtcaaactaaacagaaacatggaggcaaacctctctacctttttgttaagggggtcatgcatgtgtgaaatgcacaggaaatttttgtcaaataagtcaaaagtgtgacagttactgtccttggtcactccccccaccccttatttatttatttgtttgtttgtttgtttatttgagaccaagtcccactctctctcccagggtggagtgcagtggcactatctcggctcactgcaacctccgcctcctgggttcaagcatttcacctacctcagcctcccaagtagctgggattacaggcatatgccaccatgcccggctcatttttttatttttagtcaagacagggttttgccatgttggctaggctggtctcgaactcctgacctcaggtgatgtgcccgccttggcctcccaaagtactgggattacaggcatgagccactgcacccggccccctttttaattattattattattattttttttttctgtagacctcctcttccccttttaaacacatgtgactcacaggtagctggccaggacaagggccggtgaaggcatgaggattggaaggcgcatggcagactaggtgtttctaattgcagtccaaagcaagctattcattcatgcatgcattcggtttaacttgggattaaggccattgtattcattctccaggctgccgcgggacactgtgcaactccaccacaagctgggtggcttctctcctcagcttgtaggtggtcatctagttttttttgtgtctcctcacatcctctggtctctatgcctgtctttgtgtccacatttcccttttgttaggacaccagtcatattggattaggtctagaaggacctcatctttaggaattacatctgcaatgaccctattcccaaataaggtcacattctgagatgctggggatgaggatttcaatatatgaatttgggagggagtacataattcaacccataacaaccatgaactctggaaccagactgtctgggttcagatcccagctcttgggcaaagagtgatctcgactctgagggttgttgaggataagtagtacactgcataaagcaatttggggctgggcacagtggctcatgcctgtaatcccagcactttgggaggctaaggcaggcagatcacttgaggccaggagttcgagaccagcctggccaacgtggcaaaaccctgtctctactaaaaatacaaaaatttgccgggcatggtggcacatgcttgtaatcccagctactcgggaggctgaagcatgatgcctgtaatcgcagctgtttgggaggctgaagcacaagaattgcttgaacccaggaggcagaggttgcagtgagctaagatcatgccactgcactccagcctgggcgacagagcgagactccatctcaaaaaaaaaaaggcaatttgaatattatcgttattgttgttcccattcctgttgcagttagcaaattcttcccgagcccctgagatgtgccaggtgtagacatcatttgatggtgggagctgctatctgatttgccctgcctccatcagtgagtctaactggaatttgcagaattccattatacctgcacctcccaggttagctggcacttcccattccatgacatcactaactcccccactgcaaccctgtcagttatggagggcatggggtagtcactcctccaagtctacagatggggtgactgaggcctgagagggaagtgactgcccccacacgacaccccaagttgtggtggcagggctggaccccagtgcctaggttcctccttgccggacctccagcctctggatccagccctggctgcttctctggtgactttgggggatgaacagagggacttgtcacttctttgtttcagggggagatcggccgtgagatgtacatcatccaggcagggcaagtgcaggtcttgggcggccctgatgggaaatctgtgctggtgacgctgaaagctggatctgtgtttggagaaataaggtcagacgcagctggggtaaagtgaggggcctggggcaagggctgggaaagaaggcggccagcgggcagtgcgagtgtctacggcttggtagatgcagcactggcacctgctgatgtatgcggggatgggggcgggggaaggttctcatctgtgtggggccaccactgtcctccacacatgggaaatgaagatctgaatgtgaccgaaacggcagtctctgaagggcctccttcctcccttctctgccccagcttgctggctgttgggggcgggaaccggcgcacggccaacgtggtggcgcacgggtttaccaacctcttcatcctggataagaaggacctgaatgagattttggtgcattatcctgagtctcagaagttactccggaagaaagccaggtatgtaacttttctttcgtttaataaaaaattgctaaggacaatgaatttctcttacataaccacagtacctttatctttttttttttttttttgagatgacatcttgctctgtcacccagtctggagtgcagtggagtgatcatgactcactacagtctcaacctcctaggttcaagtgatcctcctgcctcagcctcccatgtagctgggactataggcacgtaccaccattcccagctaatttttaaaatttttttctagagctggggtctcactatgttgcctaggctggtatcaaactcctgggctcacatgatctgctctgacctcccaaagtgctggggttacaggtgtgagccactgcgcctggcctagtaccttcattaaaataaggaaatttcgtattgaaacaacactattatctcattcacaatccatcttcagattttgctaattctttaagagtatcctttgtaccttttcttcttttccattcctgaatcaggtctaggatcacatattgtaattaaggtgcagagtattcttagtcttccttgatctgggatagttcctcaggcttttccaacctttagtgacttggacttcttttaagcatataggccagttattttatttatttatttatttatttatttatttatttatttatttatttattttgagacagagtcttgctctgtcgcccaggctggagtgccgtggcacaatcttggctcactgcaacctctgcctcctggattcaagcaattctcctgcctcagcctcctgagtagctgggattacaggtgcacaccaccacgcccggctaatttttgtatttttagtagagacggggtttcaccatgttggtcaggctggtctcaaactcctgacatcgtgatccacccccctcggcctcccaaagtgctgggattacaggcgtgagccattgcacccagcccatacaggccagttattttacagaatgcccctcagttggggtttgtctgatgttttctcgtgattaccattagagtgtgcatttttggcaggaagaactcagaagtgagtcgcttctgcagcaaatgtatcgagaggcgcacgatgccatttactcccaatatcgatgatttttactttgattacttggttaaggtttctgtattgtaaacctattttcccttaaacctaattcctaagtaattagtgggtagtcaccttcagactatgaggatatcctgttccctgtcaaacttttacccactgcttttagcatcctttgatggttcctccctatgatagttacaaagagattgctatgatagttgtaaaatggaaattttgtaactccactccctccttgattattagctggcagtcagctgtgtggaagagctttctcttctctcccatttgtttattcatttctcaatgtatataggcatggatttacttgattccatgaatactctgttaacaatcattattttgatgctcaaattagtccagtttggccagtgggcactttttcaaggtggctcatttgtgaccttcgtgatatccctgtcatattttagcacttccttgcttactcaaggagcagtaagccacaaccagatgccctggttcatcttgtacttcccttgcagtatcctggaaatggccatttctccaaggagccttgattccttttactgggggatggtttttagaaaccacgatctgagtcctaggagcagtcattgctactggagtgctactaggcctctgcagcagacagaaccaagaaacacacccacatacacaccaagatgtataagtacaaatatatatatatatataaaaaatacatatataatatattatgtatatataaaatacatacacacacatatacatgtatatgccaacttaaatttttctgtctattctactgattatctataaaacaatttcaatccagcaccacagaattcattctttttttttttgagacggagtttcactcttgtcacccaggctggagtgcagtggcgccatctcagctcactgcaacctctgctggaattacaggcatgtgccaccacacctggctaatttttgtattttcagcagagatggggtttcaccatgttggctagactggtctcaaactcctgacctcaggtgatctgcctgccttggcttcccagagttgctgggattacaggtgtgagccaccgtgccctgccaccacatattagaattcattctaatattctcccttttcatacttgtaaatctcttctccaacactgagcaatacagggaagttcatttcagaatttccagcccatgtcactgtaaaaacaaaaagtaaggcttctaggtagagttcagtactggatgcagttcttttgtgtttagcccgagtatatatgatggaagtgttacgttcaaagttatctggagtcgttctcttcctccactaccctttaatgtggttactttattcatttgaaatacaggtaggttcacttgtttcagtttacattccatttagggctcctgccaccctgatctttgttgactttttcttgttttcagtatgtagaacattaacatgttcctgaaggtcaacactctgcaaaatggggcactcagaaaagcgtcccaactctccctgtccccattgccccctgactgcaactcccattattacgtggctcgttgcatcaatttctgccttttctttcctctgcttacttttgcgaaaatggacaagtccacagacattttctttttttcttttttgagatgaagtctcattctgtagcctgggctggagtgcagtggttaggtcttggctcactgcaacctccacctcccgggttcaggtgattctcctgcctcagcctcctgagtagctgggattacaggcatctgccaccattcccagctaatttttgtatttttagtagagatggggctttgccacgttggccaggcttgtctcgaacttctcacctcaggtgatctgcccgcttctgcctcccaaaattctgggattacaggtgtgagccaccacacccagcccaaacattttcttatttcttcttctttcttacacaaaatatggcatgctgtagattcttgtactttgctttgtttccacatgacgacaaaacccggaaatcattgtctatcagtgcagagtcagcttcctcattcctttccacagtggcagaacattcctgtaaatggacatttagggtatttccacaattttgcaattacaaacagtggtgcaacgaataaccgtgtgcatccgtattttgcattgttggggaacaggtcattctttttagaaaagccggtttttgttttcaaacccttaagatcaggtttcaaattgagcgacaggcaacgtagtgtgtcaggaaccccacaataggtctgggaggctggcggggctcagatcccttccatgtgaggtgctggctgtgtgactttgaggaagttgtttaacttttctggtctcagttgtctcctatgtaaaataaaggtcataacccctactttgctgctgtaaattttttttgtttttttgagatggagtcttgctttgtcgccaaggctggagtgcagtggcgcaatcctggctcactgtaacctctgcctcctgggttcaaacaattcgattctcctgcctcagccaccccaatagctgggactactgcaggcacatgccaccacacccggctaatttttgtattttaagtagagacggggtttcaccatgttgaccaggctggtctgggacttctgacctcaggcgatctgcccgccttggcctcccaaagtgctgggattacaggtgtgagccactgtgcctggcctgctgctgtgaaaattaaatagtgtgcaggaatgtctccggtggggtgcctgtcatacaagagagctcagtgcatgttaataaggatcacttcaggccgggcgcaatgctgcatgattgtaatcccagcactttaggaggctgaggcgggaggatcatttcagcccaaatatttaaggttacagtgagttatgatcgtgccactgcactccagcctgggtgacagagcaagaccctgtctctcagataaataagcaattgttcctctgtagccatcaaattcaccctataatttttcagttgggtaaaacctttttaatccacatatctgggttttcctccttgtcttgtatcacacattcttattttccccttcattctatacaatgacaccataaataaactgcacagagagctgtcataatagagggaagaaactcaccagcatccattcctacagcacagtgatgtatcgagtacacagtgctgagttctggggacacaggagggaccaaacaaaactcacattctagtcagggaaccggcaatggaaagatgagcgatgatgtgatgcgtctggctacgaggaaacacaaagccacgggaggagcgggaagtgacggagagctgtctgagataagctggttggggaagctgctctgagcaggtggcatttcaacgagacctgcacaaagcaaaggagtgagctgggggactgatggctgggtacagcattctgggaagagggaacagcatgtgcagaggccctggggaggagcaggcttagtgtgtgggtggcacaacagcaagaaaattagcatagcttggtatgggatcagaggagtctaggggaagagattgggtcagacctcagaggaagatgggagccatggagagttttacacagaggagtgacttgaagtgccttaggttttcacaggagccctttggcagcttcgaggtaaaaggatgtagtgttgatgtccaagcatcatgcacacaagacactgaggtcccctggggaaggaagctgcccccaaactcaccttacctggttgctctcaagggacccactggacccttccaaaacccagtctatctgaatttctcccagaaaatctccccacgttccccaccacatcagtggtgcgtgccagtgcctcctctccccagggacagggaggtagagtggacccttgtgattcatggactccatatttgcaaattcgcctcctcactgaaatggacttgcaacgccaagatcaatactaacaggcttttgtggtcattcaaggacatgcccagagcagcaaaatacttgagtcaccccaagtgcacgctccccgctgaagtccctgttctgtcttgtggttttagctcttgtactgcgaagaggtgtctttttatggtccatttaatgctactcttttttttttttttttttgcatttttgtgctttttgttggcgattgcactgtttaaaatggccccccagcatagtgctgaagtgccgtctcatgttcctaagcacaagaagtctgcaatgtgccttacacagaaaatatgtgttagataagcttcattcaggcatgaattacagtgctgttggctgtgcgttcaatgttaataaaacaataatctatatttaataagatgtctttagccggcacagtggctcatgcctgtaatcccagcactttgggaggctgaggtgggtggatcacctgaggtcaggagttcaggatcagcctggccaacatggtgaaaccccatctctactaaaaatacaaaaattagccaggcgtggtcatgggcacctatcatcccagctacccgggaggctgaggcaggagaatggcttgaccctgggaggcagaggttgcagtgagccaagatcacaccactgtaatgcagcctgggcaacaaagtgagactctgtctcaaaataataataataataatgtctttaaaaagaaacacacataagacaagtttattattattaattttagagacagggtcgtgctctttcacccaggctggagtgcagtgacacgatcatagctcactgcagcctcgaactcctgggctcaagaaatctcccgccttggcctcccagtgttctgggactgtgtgtgaaccaccacgcctggccaagttcatgtattatggttgatgaatgttgtgatgggagatttgtaggaatctagccttgtatttcccctaggaacaatgtttccatttttgctaattcagtgtccgcagagatcttataggacataattactacaaatcatgagattcaactgcttatgactgaaaactggtaccaggtctccccaccctctcttcttgcccccacccccaccaggaggagcaaagctcaggaaagccatgcttttagctgttacccatcctgctgggtgggttaggcaagagtttggcaaatcagatgggaccccaaaggcacctcccaagagctgtgcagaggcccccattcctgacagtgcctgtgcacctgtgtccacactgagaaggctgaggtgtgggtgggaggcagccaggcgaaggaatggggctaacaggcctcacagcaacatgggggggcgtgggaatgggggtctcagccatgagtcatcagagtggttgtttgctggccaggccagcttgaccagagaggcaggggattgtgtatgagctctgctcatcaggggagatacactgtctgagaaccatagtcccggggacatctgagttggtgagggccacgtgtgggattctgtccaagctccctgctttgcagatgggggacctgggtccccaaagaagtgaagtgctgagatctccggcttgaccactccaaaaaagaggatgaagaggtcttatgtgggtcacttgctccaggctgattgctcaatctcagttacagggaagcatacatcatcagaaaatgaggacaaatttccctaatctggaaatgccccagaagctagctcaatgtttccaaacagagacagctagtagcaatcagcaaaggtcctatacatagttattttgttagaaagaaaaagatagttcattttcacagcaccctcagccttcctgtgggctgtcacatcatgaattatggactcaaataacatgggggacagtgccgagctggcgcgtgtcagaggcgtctggtgaattatcatgtttgtgttctcctgggggatctccagctagaaatgcaaatcttgggcaattaatatcaacatgcacaatttaaacccattgcctctgattagataagcagccagtaatggcctcatttttaaacaaacaagttttgctggagccttgatgaatgaatttgccaattcattgtctaggcccgctggttgcaggcagaattcatttgttcttgagacaaactgctcaccgcatgtttgtagtgtgaaaaattgccggtaaaaagctagggctctctttgatggaaaatctacccttatctagagaaacagggtggtacatgccattagatgtgggtggcaattctgcttctgccacttcctggtaaccttgggcacgtcactccccctgctctgagcctcaatttccccaactgtcagaggcacaataatctcagccctttccatgtcacaggggtatttgtcagtgcccaggaagataatgatgcaatgtcgttttgtaatcattaatatctggggcactggggtcagaagtgtgggtttgaattctagctttgccgcttcttagctgtgtggccttgggaaagttactcaccccctctgaacttctataccctcatttggaaatgaggatgaataataagacctacttatggggattgttgtgagacttaaatgagagagtatgtattagcataacagtattaccacaaatttagctgtttaaagtcacacatttgcgatctcagtttctgtgggttagaagtccggacatggcttagctaggtcctctgcaagattgtcatcaagatgtcttccagagcaggctctcatctcaagtctggatgggggaaggacccacttccaggatcacatggttgttggtgtaattcagttccttggggttgtaggactggggccccagctcccactagcaattggccagtggctggcctcaggtccttgccatgtgggccttctccaacacagctggctgctccctacatcaaagtcatcaagggaggccaggcactgtggctcgtgcctgtaatcccagcactttgcgaggccatggcaggaggattgctcgagcccaggagttcaagaccagcctgagcaacatagggagaccccgtctctattacttaaaataaaaatcaaataaaaaataaataaagtcagcaagggagagtccccttgcaagacagagatcacaatcctgtgtgacatattctaccagtgatagcccttgttgtattcgattgtttaaaagcaagacacgtaccccacccatcctcaagggaaggggaccacacagaggcgtgaacaccaggaagggggtaataggagccactgaagggtgcctgcaaaggatggagcagagggcctggcatatacagacactcagtaaatgctgataattgtgatggtgacgagggggaggtgacagtgaagcagaaggagaaggaaagagctttggttccttttccacctgggcatcttattcccaattccctatgtgaaagtgtccttcaggatttcctaactcttctgctggttaaaaaaaagaaagaggccaggcgcggtgcctcacacctgtaatttcaacactttgggaggccaaggcgggtagatcgcttgagcccaggagtttgagaccagcctgggcaacatggcgaaaccctgtctctacaaaaagataaaaaattgtggtggtgcatacctgtagttccagctactcaggtgggaggattgcttgagccatggaggtcaaggctgcagtaagccatgatcacgccactacactcctgcctgggcgacagagccagaccctgtgagaaagagagagagagagagacagagacagagacagagagagagaggaagagaagaggagagaggagagaagacagaagagagaggagagagagagagacagaaaggaaggaaagagaagaatttcgtagctgtgtgacctcagacaagttattcaacctctctgagcatcattttcctcatctctaaggtacaacagacagtaagacccacctcattacagttgttctgatccttcaatgagatgcaatgcataaagtacttaacacgacgcttggcccagaaaaaactctctacaatcaccagccaaaatcaccaccactacacagctccagcttaaaggaggctgcagaagcgagtctttcttttcccccagagtgcgtctgtgatgtcaatggatgctgctttcttccaggcgcatgctgagaagcaacaataagcccaaggaggagaagagcgtgctgatccttccaccccgggcgggcaccccaaagctcttcaacgctgccctcgctatgacaggaaagatgggtggcaagggggcaaaaggcggcaaacttgctcacctccgggcccggctcaaagaactggccgcgctggaggcggctgcaaagcagcaagagttggtggaacaggtaatgtggttgggaacccagccaccacgttcatttcaatatgtgtcagggagaaggccaaggggtctccaagagtgggccacacatttagttttagggtcttccccctcctttttctatcagtcagggctcatttggttaccagtgacagagtgcaagctcaaattagcttgagaaaaacgggaattaggggtcacgtaatcgaaaagttcaggcaagcctggatccaaaagcccgaaagatgccaacaggacgagttttcccatcgtgtcatctctgctttattcagtgatggttttatctccagacaggttctcaagagttctatctaggatgacatcctcctggcatagcaactccaacagaaagaaagcacctctttcccagggattctagcaaaagttccaggactcactgtcattggacagaattgggtcacatgccaattcttgagccattcggtgtggccagggcactatggtgctctaaagaggcctgggtcacatacccgcccctggactgagagtaggctgggagcaggatctctaaaaggcagtcttgatactgttgcagaggttagaggagagggtatgagaagcaaatgtccggccccagaagacagtgtgtcctcatatttaatactgtgtctgtgacaatttaagatatttgggtcaggcatggtagctcacacttgtaatcccagcactttgaaaggccaaggcaggaggatctcttcaggccaggatttcaagaccagcctgggcaacatagcgagaacttgtctctacaaattttttctttttttctttttaattagccaggcttagtggcacatgcctgtggtcctagctacttgggaggctgagttgggagcatcacttgagcccaggaagtcgagactgcagtgagctatgattgcaccattgcactccagcctgggtgacagagtgagaccctgtctcaaaaaatgaaaaataaaaatttgaaagtgaaaacctctcacacaggcaaaatgccaaatgtccccacccccataaacctatgggggacattaaaattagttctgggacttttttctgtgaccaaagccaagaataccaagtggaatgattacattaattatgtctgttcacggctgtcctttaggaagtctgctggggatctggagagggactggggttaggcagactgggcttaacagtctacacagcagagttcaaaggagcccagtgaactcagtctcaatccagcctggtgtcagagtccaggagacccatccagatgttgtttgacagtagaagtctggtgagtgacatcaaagccatttggggtaccaagacattctccagatacagccaccaatggccccagactgaggaaagatgtgattgcctggctcacaaactgtcaaggtcaaggtggagctggcaagtgggggtcttcagtgctggctgctgtgagggctgactagacaggaactccaagggtgctcccagtacaccaagagcttcagctggggtgggcttgtggctcctaagtggtagctcttcagcaagggggctttaagatgggaattaaatttgcatgagtgttccattaaaaggcacttcccttccaaatcagaacaaccagggcagaatggcagagtacagggagctcttaactagacattcagagacacaaatccaaatcccagctctgtcacccactagctccatgacccaggaagcccctcaagctttccgagacttggattactgagggttgcctcatgaggtcataaagatcaggcaggattaccttggaggccttttagaaaagcatgttgaacacagcaaagcacttttctaacttcccatgagctgctgattccagccatagcaccatgcttcaggaagttccacgatgctcaccatctaagcatcctgccctggaaatgtgttgtcaagagtttagggtgggctgggcacaggtggctcacccctgtcatcccagcactttgggaggccaaggtgggcagatcacttgaggtcaggagtttaagaccagcctaaccaacatgtaaaaccccatctctactaaagatacaaaaccttagccaggcatgatggcacacacctgtaatcccagctactcgggaggctgaggcagaagaatcgcttgaacctgggaggcagaggttgcagtgagctgagatcacaccactgcactccatcccgggtggcagagcaagactccgtctaagaaagaaagaaagaaagaaagaaagaaagaaagagagagagagagagagagaggaaggaaggaaagaaggaaggaaggaaggaaaaaaggaaggaaggaaggaaagaaggaaagaaagaaagaagacaaaaagaatagagtgtagggtggacaggggagggtgggacaggggcaccaaaacatagggaaacactgagacagagggagaagcatgtcccaagagaggccttgggttcttggagcattttggctgccccctctccattcctcctttccttcaatatcctatgacttgagcaaatggcgcaggtctctctgcacaagcacattgactgctctcacttgaaactcacaaacaccacttcacatgggtcttgggcagctgaggaccatcctggcctcctctgggggctgctccctctccagtttccttccgtgcagagatggggtcaggcagagtgggaggggccacaggtatccgcaaaggcttgatttaattacccagtcccctactgatgtgaagaccatggccatcgtttgtgggaggcagcacaggctggaggctggaggtatccatcaggtccccacacatggggtcagcgcagcccaatagcaggggtacccagccccagggtatccctgaggatctcaacctttgagacttcccagaaagggggcccagccccagcagcctctcccttcatcactttttaccctgtttgcttggagtttttctcatccactccaggagtgcccacccctggtaacagatggttggttcagcctttgcagaggccttgcgggtactccctcagagtcactgcctggcttgcttcaatagctcgggggaggggccctgaacttgaaacaacagcctcatcccagcttccagccccacagcctagatctaagacatcccaagactttccacgaaatccaaccgggacttttaatctgtacacttccccataatgtattttgtttctcctaaataaccccgatgcggctccaccccacccactagatttcacccgctgtgtgttccgctgccctctttgggggtccaaaaaggctggaacagggaggtgtccaagacccttccaagacccctccgagagtctgtgcctcacgagtcaccctttctggattccaggccaagagctcgcaagacgtcaagggagaggaaggctccgccgccccagaccagcacacgcacccaaaggaggccgccaccgacccacccgcgccccggacgccccccgagcccccggggtctccaccgagctctccaccgcctgcctcccttgggaggccggagggagaggaggaggggccggccgagcccgaagagcactcggtgaggatctgcatgagcccgggcccggagccgggagagcagatcctgtcggtgaagatgccggaggaaagggaggagaaggcggagtaaggtggggtgaggcggatcccgcgcgcagttccagcaggtgtgtccccagcgcccgctgcgcccctgcgccccagcgccccaccttcccccacggctcaagagaagatgcttttccgtagtcgtgacctcagtggctgcagctctgaccgtcccgccagcacgccagccccgactcagctcctcgcggggctgggcctgagctcgacaagttgcatcaagtgttcgagtccctgagctctcactatcatttgagagccctaccttttcctgactgttcctctttttaagaacaaaatgattttccacttttaaagttcatgggtgagggataaaatgaggctccaatacatgggaagctttgctgaaaaagtaaagtgttattgaatgtgtggggtttcccctcaggaatttgtctaacacatttcaaggatagaaaatacttcactgccgggcatggtggctcatgcctataatcccagtgctttgggaagccgaagcaggaggatcactggaggccaagagttggagagcagactgggcaacatagcgagacctcatctcaaacaaaaacaaaaacaaacaaaaaaacaatagccaggcgtgatggtgtgcacctgtagtcccagctactggagaggttgaggcaggaggatggcttgagcccaggagtttctggctgcagtgagctggacacagtgagaccctgtctcaaaaaaactaaaagatagccctgcacagtggttcacatctgcaatcccagcagtttgggaagctgagatgggaggattgtttgagaccaggagttcaagaccagcctgggcaacatattgagaccccatctctacaaaacagcagcagaaacaaaagcaaacaacaacaacgtacacaaacaaaaaaacaaagaaaggagggcagcccgagctgttcagctgagaattgccatggttctgagctgagcttgggacgcggttttcctttgcgggcaatcacagtagggggctagatgcccattaaggtagttagtgcttatcttccccagactctattcaattccaatgcaatgccattatctcagaacagatagaagggaaatggacttactggccaggagctgctagcgtttctgcctctgccaggaggaacagcccggtaggagcatcctctgcctgtcatcctgagaaaccccattcgccagcagggatcagtccgttactcacttttgacactctcgctgtagagatggtggcagcaacttcaattaatcctagaaaatgaaatctcccagctgatgacagcacttacattccctaaagctttccagatcgtgtcatgttgcttttatgattcagacaaaaaaaaaaaaagaaaaaagaaaaaaaaagaaaaaagggtcattcagggaatgaatatttatcaagaggattttatttgcataccaaatggctcttgggggagtgagtgattaaaaacaaaatctagtattctagtattaggccatttgtttccacctgcaacagtgaacataaaggacctggaattccaataggtcctgcccattttatataaaattacaggaaaatgtgagctgctcagaggcctttgaaggtttgcaaatgtctgtatgtatttgtccatccactaaaaacaacattcatttccactgtggaaaaatgaaagaatgtgggagtccccaggctggtctaagcatttccaaaccccagagtcagaaacagatttgtctagttgatggcttgtcacgtgatccgggtaatcatcacattgaatatagtgatgattgaccttattattttaccctattttttt

SEQ ID NO: 47 - DNA, 7927 bp, Homo sapiens
agttctcaggctcacattcccaccacccacctctgagcccagccctccctagcatcaccacttccatcccattcctcagccaagagccaggaatcctgattccagatcccacgcttccctgcctccctcaggtgagccccagacccccaggcaccccgctggcccctgaaggagcaggtgatggtgctgtcttcgcccagcagctgtgggagcaggcgggtggggcaggatggaggggtgggtggggtgggtggagccagggcccacttcctttccccttggggccctgtccttcccagtcttgccccagcctcgggaggtggtggagtgacctggccccagtgctgcgtccttatcagccgagccggtaagagggtgagacttggtggggtaggggcctcagtgggcctgggaatgtgcctgtggcttgaaaagactctgacaggttatgatgggaagagattgggagccattgggctgcacagggtcagggaaggccaggaggggctggtcactgctggaatctaagctgctgaggctggagggagcctcaggatggggctgatgggggagctgccagcatctgttcctctgtcatttctgataacagtaaaagccagcatggaaaaaaccgttaaaccgcaggttgggcctggccgttggcagggaagtgggcagaggggaggcccggccaggtcctccggcaactcccgcgtgttctgcttctccggctgcccacctgcaggtcccagctcttgctcctgcctgtttgcctggaaatggccacgcttctccttctccttggggtgctggtggtaagcccagacgctctggggagcacaacagcagtgcagacacccacctccggagagcctttggtctctactagcgagcccctgagctcaaagatgtacaccacttcaataacaagtgaccctaaggccgacagcactggggaccagacctcagccctacctccctcaacttccatcaatgagggatcccctctttggacttccattggtgccagcactggttcccctttacctgagccaacaacctaccaggaagtttccatcaagatgtcatcagtgccccaggaaacccctcatgcaaccagtcatcctgctgttcccataacagcaaactctctaggatcccacaccgtgacaggtggaaccataacaacgaactctccagaaacctccagtaggaccagtggagcccctgttaccacggcagctagctctctggagacctccagaggcacctctggaccccctcttaccatggcaactgtctctctggagacttccaaaggcacctctggaccccctgttaccatggcaactgactctctggagacctccactgggaccactggaccccctgttaccatgacaactggctctctggagccctccagcggggccagtggaccccaggtctctagcgtaaaactatctacaatgatgtctccaacgacctccaccaacgcaagcactgtgcccttccggaacccagatgagaactcacgaggcatgctgccagtggctgtgcttgtggccctgctggcggtcatagtcctcgtggctctgctcctgctgtggcgccggcggcagaagcggcggactggggccctcgtgctgagcagaggcggcaagcgtaacggggtggtggacgcctgggctgggccagcccaggtccctgaggagggggccgtgacagtgaccgtgggagggtccgggggcgacaagggctctgggttccccgatggggaggggtctagccgtcggcccacgctcaccactttctttggcagacggaagtctcgccagggctccctggcgatggaggagctgaagtctgggtcaggccccagcctcaaaggggaggaggagccactggtggccagtgaggatggggctgtggacgccccagctcctgatgagcccgaagggggagacggggctgccccttaagtgtcggtgaatagtgaggctggaggccggaatctcagccagcctccagcaccttccctctcaccatcccactgccccctcgctcccatgtttccacccggcaccctgatcctcacccgaatctcctttttttttttcttttgagacagagtttcgctttgtcgcccaggctggagtgcaatgcacgatctcagttcactgcaacctctgcctcctaagttcaggcgattctcctgcctcagcttcccgagtaactgagattacaggcacccaccaccatgcccagctgcttttttgtatttttggtagagatggggtttcaccatgttggctaggctggtctcaaactcctgacctcaggtgatctacctgcctcagcctcccaaagtgctgagattacagacatgagcctccgcgccttgcctcctcacccacctcttcactctgaatcctcatgaggcttctcagccctggatttcctgctgccatcctcacccagcacccacaactagcgcctgggcagggcagggctggcacctctcaacgtctgtggactgaatgaataaaccctcctcatccacccctatttatctccatcaccatttccccctctttcttgttcctggaaacggctgctgagtctccatcggccaaacttatctgccctgtgatttctttgacaattctccttttcccccagaacccaccctgggttgaccagagtctgggaagaaggacaagagaacccggcaaactccctcctaggattaactttgtaaagcacccttgccctgtagctgcaagggctgtggaacctgggcagcccgcaaccacctttagctctgggccccccaggccagcctggagcatggctgggtggggccaccagcccatgctctcaggcgggcctgtgatctttcccagggcacatggactgtaggctggccctggcccacaccaccacactctccccagccatggacagaggcagccagaggcctcacggtttctcctccgagtttctggctgggtgtagttctcagaaaccccagtgcctgcgtgtgtccactcgtgggtgtggtttgtgtgcaagagctgaggatttggcgatgcttgggaggggtagttgtgggtacagacggtgtgggggtgggaagtggtgcagagactgaagagggtcaacctgggcatgggggacacagggactgctgagaacgtgcgtgtcatctttgctctgatggggtggacatagcagaaaatctaactctgtctgtagccccatacagaatgccagggtgagcacagtggctggtgcctttaatcccagcactttggaaagttgaggcaggaggatcgcttgagcccaggagttcgagtctgaagtgagctgtgattgcaccactgcacttcagcctgggcaacagagtgagcccctgtctcaaaaaagaaaagaaaaagaaagccaggcttcatggaaagatcgtatgtgtgacccaaatatgagttcttcagctcagccatggtaatcccttccttgaagtctccatttctgcagtacacatgcatgtgcgctctctctctctctctctctctcacacacacacacacacacacacacacacgcgcgcgcgcgcgcgctctcctgcgaacagaggcagggggagaggggtttgccctggtctcggggactggtctggctggcgcttccccactgcacgtttccaggtttagtttgtctgtgtctcctcttccatcccaggggctgagccccttccatcctccaagaggaaccagtgagagtgagtgaaggaggggcctggagccagggacttcccctgtggggcctgggtggagaggggagaactcaatggtgctgcctttgagaccagcccaggctacagcccaggagcacacatgggccagggcagttggtatttcccgaggacaaagaggaaattttcaaagaggaagttgttgagttagagcttgcggtggctgagagcagacaggttgacctgcaaaaaaagacaggggaggcatgtgagtgtgacagccctgctctgtggcctgggcaggagatgggggaaagggtcaggtgggggatgggctcgtgcagtgggagaggagacggagggagggagcgggaaggggcttgcttagtgggtgggaagagctgagctcggatggaaccagcttctaccagccaggctgggcacccactgggctgcatctggtggccttttctgattgctatttggactcactgcagctgcagaatgacagaggccatgtccaaaatcccttagagacactgttgtcttagagttgttaaaataagagcccccatatcaggtttagaaaatactgtcaccgaacgaacgtcgctgtcctcagctccacctccctttcctttgacagatatggttgttttctaagccaggactggttttagtcaggtcctgggcgaatcctgaaaaaaagaggtagtacgggtaaggaaggcacccaacagggctttcacaatccagaaaatatcaaaatataagtgttaaaagagaggcacaggccgggtgcggtggctcacgcctgtaatctcagcactttgggaggccaaggtgggcagatcatgaggtcaggagtttgagaccagcctggccaatatgatgaaaccccgtttctactaaaaatacaaaagttagccaggcatggtggtgtgctcctgtaatcccagctacttaggaggctgaggccagagaattgcttgaaccctggagtcagaggttgcagtgagccgggatcatgccactgtactccaggctgggtgacaaagtgagactgtctcaaaaaataaaaataaataaaataaataaaagagaggcacaaacagtgttatgaatgcaccaaggaaaatggtgcattcataactctcaggtgaagcctaccaagccatgcgtgtgtgcacatatgtgtgtacgtgtgcatgtgcgtgcgtgcatgtgcgtgcgtgcatgtgcctgtgtgtgtatgtgtgcacatgtgtgtgcgcatgtgtgtgtgtgcgcgcatgtgtgtgtgcatgcatgttctcccatgcatgtgtactgtggcaagggagactttgaggaagagattccagtggctgagcagaagggctcgcattgccctggcgaaaggttggaaggcttcacctgagagtgtgtcgtggcctttgtcatatccactgcttgattcctttctttaaaaattatttttattgttttctacatatgagaaccaccacacctggctaatttttgtattttttgtagagatggggtttcaccatgttgtcccggctggtctcaaactcccgggcacaagagatccacctgcctcagcctcccaaaatgctgggactataggcatgagccactgcacccagccactgcttcattcctggtggctgctgtgcctggcatgttgcagatcctccatgaatatgcatttgaatgaatgaatgaatgaatgaatgaatgaatggagatgacgcctcagagattctttcttttgagatgaggtctcattctgtcacccagactagagggcagtggtgcaatcacagctcaccacagcctcaacctcctgggcctcccaagtagctgcgatcacaggtgtgcaccaacatgcccagctaatttttttttttaatttttaatttgtacagacagggtcttgctgtgttgcccaggctggtctcaaactcctgggctcaagtggtcctcccacctaagcttccccaaatactgggattataggtgtgagccactgtgcccaggcttgcctcagatatttgaaggctgggaaggattttgcaaagctgggaaaaggaaaaggcattcccagcagaggggatagcaggtggaaatacataattaaaaaaaaaaaacgtggagcagatccagcgcagtggctcatgcctgtaatcccagcactttgggaggcagagcagggaggattgcttgagtctaggagttcaagaccagcctgggtaacatagaaagaccctgtctctacaaaaacacaaaaaattagccaggcgtggtggtgcatgcctgtagtaccagctacttgagaagctgaggcaggaggactgcttgaagccaggagtttgagaccagcctgggcaacatagtgagaccccgtgtctacaaaaagtaaacatttatatatatattttttaaagtggagcagttcaatatagagtcttttttgaacaaacgtgaaatagatgtcttttttttttttttgagatggagttttcactcttgttacccaggctggagtgcaatggcgtgatcttggctcaccagaacctccgcctcctgggttcaaacaattctcctgcctcagcctcccaggtagctgggattacaggcatgcaccaccaaacccggataattttgtatttttagtagagatggggtttcaccatgttggtcaagctggtcttgaactcccgacctctgctgatccgtatgcctcggcctcccaaagtgctgggattacatgcgtgagccaccgtgcccgacaatagatgtcttttaattttctggaggaaaaagcaaagcaaaagaagcagtggatattttaagactaaaaaggaaaacaaaaaaaggagatagagcaggccagacgtggtggctcaacgtctgtaatcccagcactttgggaggccgaggcaggtggatcacctgaggtcaggagttcaagaccagcctgaccaacatggtgaaaccctgtttcaaaatacaaaaaattagctgggcgtggtggcgggcacctgtaatcccagctacttgggaggctgaggcaggagaatcccttgaacccaggaggtggaggttgcagtgagccgagatcacgccattgcactccagcctgggcgacaagtaaaaaactccatctcaaaaaaaaaaaaggagatagagcaaggaacagtaagaaaatagttgggtgcagtggctatgcggtggcactataggaggctgaggcgggcagatcacctgaggtcaggagttggagaccagcctgggcaacatagacccctatctctacaaaaaatttgaaatatgaaaaattagccaggtgtagtggtgtgcgcctgtggtaccagctactcaagaggcgaaggcagggaagattgcttgagcccaggagtttgaggctatagtgagctgtgatcatgccactgcactccagcctgggcaatagtgtgagactctgtctcaaaagaaagaacatggccaggcgtggtggctcacacctgtaatcccagcactttgggaggccgaggcagtcagatcatgaggccagtttgaaaccagcctggccaacatggtgaaaccctgtctctactaaaaatacaaaaattagccaggcgtggtggcatgcccccgtaatcccagctacttgggggtctgaggcagaagaattgcttgaaaccgggaggcagaggttgcagtgagccgagatcgtgtcattgcactctagtctgggcgacagagcaagactccgtcttggaaaaaaatttaaaaaaagaaaatataaaatatggtataagattaaatatattagttatgaaaataattgtaaatggcttattgaacttatagtcagtaaaaatcatgtttttgaaaattatgtaatgactttggaaaataccagcaatataatgttaagtggggaaaaaagcaagttactcctctgtaatacatatgattttagttttgtaataaaaattcccaaccatatatgcacttatagggaaacaaaggacccatcgcaaatgttttccatgctgatctccaaagtggtgagtttatgtgtgatttttattttgtttatgctcttctgtattttccgaatttcatacaataaatatctgttacttttacaatatgaaaaaa

SEQ ID NO: 48 - DNA, 9829 bp, Homo sapiens
ccccatctctactaaaaaaaaaaaaaaaaaaaggatttgaagtcctggccggagcaattaggcaagggataaaaaggcacctaaggcccttttgcaataagaagccagatggataaaggaagtgctggtcaccctggaggtgtactggtttggggaaggtccccggcccccacagccctctggggagcctcaccctggctctccccactcacctcagccctcaggcagcccctccacagggcccctctcctgcctggacagctctgctggtctccccgtcccctggagaagaacaaggccatgggtcggcccctgctgctgcccctgctgctcctgctgcagccgccagcatttctgcagcctggtgagtacccaggaccgcccaggtatggtctctgcccaaaccacaggaggggccaacccaagacaaaggcagaacatctggggcaggggccaggctcccacctccagcaaacaagggcgggtcccataggggtgggtgccgccatctcttccccctccaccctcccccatgcctgaagagtgggagacccaggccagaggtcagtccagccacctgtcacacgactgcctgtgggtgaaggtgtgggagggtctggggtcaccctctttgtgtcctgaggtggtttcaaggtctctcccccactcactccctccttcctctaggtggctccacaggatctggtccaagctacctttatggggtcactcaaccaaaacacctctcagcctccatgggtggctctgtggaaatccccttctccttctattacccctgggagttagccatagttcccaacgtgagaatatcctggagacggggccacttccacgggcagtccttctacagcacaaggccgccttccattcacaaggattatgtgaaccggctctttctgaactggacagagggtcaggagagcggcttcctcaggatctcaaacctgcggaaggaggaccagtctgtgtatttctgccgagtcgagctggacacccggagatcagggaggcagcagttgcagtccatcaaggggaccaaactcaccatcacccagggtgagtccagctgccctgacacctgccttgcccaccgcagtgagggttttggtgaccactgatgtcttcacatttaaacccagtggtctggattgagagctgttagcatttcaccttgctaccccttccatgtctgggcttctgagagcagcttgctcatcctgaatgtccccaatctagaaagcagcacaccatgcctttcatccagacgccccacacccccagaagagggtctgctcattcctcatctcttccagctgtcacaaccaccaccacctggaggcccagcagcacaaccaccatagccggcctcagggtcacagaaagcaaagggcactcagaatcatggcacctaagtctggacactgccatcagggttgcattggctgtcgctgtgctcaaaactgtcattttgggactgctgtgcctcctcctcctgtggtggaggagaaggaaaggtaagtgcccagaacgcactgtctcctcaagcttcccagctgggggtttctctgagcccacctgcagctaagggacttcagaaatatgcagaccctgctggctcccctcaagcccaccaaggccgactctggcctgtgctggggcgtctgcatctcgggggcctcctgcagtggggtggtgcagggtcacatgtgagaacccccagcctgggcgcggtggctcatgcctgtaatcccagcactttgggagcccaaggcaggtggatcacaaggccaagagatcaagaccatcctggccaacatggtgacaccccatgtctactaaaaatacaaaaattagctgggcatggtggcacacgcttatagtcccagctactcaggaggctgaggcaggagaatcgcttgaacccgggaggcagaggttgcagtgagtcaaggtcgtgccactgcactccagcctggtgacagaacaagactctgtctcaaacaaacaaacaaacaaacaaaaaaagcccccagccctctccacacagctggatccccccaacttctctctcagtcatcaatcatccacgctcccctgaaggttcctggggaggggagggcctgccctgggaaaagaacagagagaggagaagggaccagaattgggctgagctcagcaggcactggctgactgccctcctgccacggcctggcttgaaactggagaagcaaagtatataaagcataggctctgctctcagggaactgggggtgtggagttgtcagttgcctcaaggactaattgcttcattgagaaagaactatggtattgctaaacaagggtgggaggagagagaggtaatcagggaggacttcccacaggaggtggcatctgcagatgtctcaaaaaagaaaagaattagcctggcaagaggtgaggattgtgtagaggtcactcactttccttgtgggtggaggaaaccattccaggagctgtaggaagcttggtgctggtgaaggaggcaggagaggagagaagaggagatgaccttagaaatcacatccaagagcctctgatcccagaggcagcgtgaggcagcaaagggtgacctcagttccccatgagagacctcagtctatggaggaatggccagaggtgggccaggctgggtcagtgcagtgcaggagtgaggtggagagagggaaagggccagatcctagaaaagattaagtaataaaaaccaatgagattgttagattgatgtaggggcaagggagcaggaagaagcacccgtttccacttgggtgcatggggctatgatgaaaccaccaactacagtagacaatagaggaggagactatgtttggaggggagcgatgcctcgtttagttcggaatttgtttttttgttttgttttgttttttgtttttgagacagagttttgttctgtcgcccaggctggagtgcagtggcacaatctcggctcactgcaagctccccctcctgggttcaagccattctcctgcctcagcctcctgagtagctgggactacaggcgcccgccaccacacctggctaattttttgtagttttagtagagacggggtttcactctgttagccaggatggtctcgatctcctgacctcgtgatccgcctgcctcggccttccaaagtgctgggattacaggcttgagccaccgcacccggccagtttggaatctgttatacgggagatccatgtgtggcatctcagcagagttgtccattggaaacttggatgtacacatttccagttcaaaagagaggacaaggctccaggcagcaatgagttctacctcaatatcctccaaacctgacagtaagttaccatcaagaaagtcttcaggccaggcacggtggctaatgcctataatcccagcaccttgggaggccaaggcggctggatcacctgaggtcaggcgttcaagaccagcctggccaaaatggtgaaaccccatctcaattaaaaacacaaaaaattagccaggcatggtggccgacacctgtagtccaagctactcaggaagctgaggcaggagaattgcttgaacccaggaggtggaggctgcagtgagccgagatggtgacactgcactccagcctggctgatagagcgagactccatctataaaaagtaaaaaagaaagtcttcagtgaaaggagattcgccctatcagctatgaaagcacagaggggaggaacatggagtaggggctgcctgcagtcagatcctgccctcacaaccttgccagggaaacaggctcgtgggtacaaaggttgtgtgcctcaacttcctcatggaagcacgtgagattattttataaccatagagtggagacagtcagtatgaccaccaaacccaggagccatatattaaaatactgataaatttaactatataaaaaaatttttgccgggtgcggtggctcacacctgtgattctagcagaaaatcagatcaggagatcacagaaggtcaaggaactactgagagagcaggaatggagagcaggggggtcagcaggaagcttggagaatctgcaaaatagtagattacaaaggatcaaaagtcagtgaggttcaacaagaggtagggtgggataatgaccaaagacagagggaacacttccaggttcattctgtgaggtcagcaacaccatgacctaaaagccagataaagaccctgcaagaaaaacaatacacaaaatacagatgaaaaggctggtgaatattgatgggaaaatcttcaacaaaattctagcaaaccaactttcacagcatgttaaaaggactgtacgccatgaccaagttggagatagccctggaatgcatgtatcacccaaaacaggaaaattaatgtagtgcaccccattagcagaatgaaggacaaaacccacatgatcatctcaactgatacagaaaaaacattggacaagattgaacacctttccttttttttttttgagatggagcctcgctctgttgcccagcctggagtgcagtggtgccatcttggctcactgcaacttctgcctcccgggttcaagcgattcttccacctcatcctttcgaggagctaggattacaggtgtgcaccactatgcccggctaatttttgtatttttggaagaaacgtggttttactatattggccaggctggtctcgaactcccgacctcaagtgatccgcccaccttggcctcccaaagtgctggcattgcaggctgagccacggtgcccagcctgaacaccctttcctggtaaaacactccaaaaccaggaaaagaaggaatgtacagcaacaaaataaaggccagtcatgcaaggcccatggctgaaagtctttcagtcattttaggtgaaagactgaaatctttgcctccaagatcaggaataagagaaggatgcccgatctcactacttctattcaacacaggatttgaagtcaggctggtcacagtggctcacacctgtaatcccagcacttttggaagtcgaggcaggtggattacatgaggctatgagtttgagaccaccctggccaacatggcaaaaccccatctctacttaaaaaaaaaaaaaaaaaaaaaagatttgaagtcctagccagagcaattaggcaattaggcaagggataaaaaggcatctaatttgaaaaggaacaagcaaaatgatctctgtttgcaggtgacaagatctcatatgtagaaaatcctaagtattgcacaaaattacctgttgaatgaatgaattcagcaaagttccaggaaaccaatttaacatgcaagcaaaaatgtattacatttctgtgcactaaacataaacaatctgaaaagaaaattaagaaaacaattccatttacaataatgtcaaaaaataaagtaagatctttaggaataaacctaaccagggaggtgaaagacttgtacactgaaactacaaaacattgctgaacaaatgaaagaagacacaaataggtggatgacattcttgttcgtggagtggaaagattaatattgtcaaggtgtccatgccaccaacaacaatctccagatccaatgcaaatcctatgaaaaccccaatggcattgtttttgctcaaacaaaaaattcatcctgaaattcaaatggaatctgaaagcactaccacaaaccaaaataatctttagaaacgtgaacagagaggacacgcattccctgatttcaaaatgtattaaaaactatggtaatcaaaacgatgtggtactgaaataaagacataaataggccaggtgcagtggctcagcctgtaatcccagcactttgggaggctgagctgggtggatcacctgagattaggagttcgagaccagcctgaccaacatggagaaaccccatctctactaaaaatacaaaattagccaggcgtggtggcgcatgtctgtaatcccagctaatcgggaggctgaggcaggagaatcacttgaacccgggaggcagaggttgcagtcagccaagatcacgccattgcattccagcctgggcaacaagagtgaaactccatctcaaaaaaaaaaaaaaagacataaatagagcagtggaatagaatacagagcccacaaataaaccctcacatagatagtcaaatgatcctcaacaagggtgccaagatgaccactcgacgaagaatagtttcttcaacaaatggtgttgagaaagctgggtactcacatgcaaaacataaaggtgcatctctgccaaaaaattaactcaaaatggattaaagacttcaatgtaagacccaaaactgtccagtgtctagaagaaaatacaggagaaaacatagggtgatgagacaagatggtgggtccttgcaccatcatccccagacccatggtttttattccacaggggaaggatggtttgtattctacaggtgaagtatgatcacatcaaggttgtttgactccagggcaggatttatgatacgtacctgctcttacacaagaacgatagatcaactggaaatcttagaggccttcccagaactggggttaatcagaagctgccatggcagattagcttccaagatggagttgccttagcctccacaatattaaaagtagaactaccatatgatccaacaatctcacttctgggcatctatccaaccaattgaaagcagggtcaggaagaggtgtttgcacaccgatgtttgtagtagcattactcaaaataccccaaacgtagaatcaactgaaatgtccatcaaacaaaatacggtgtctgtagtccaagctactcgggaagctgaggttaggagaatgacctgagcccaggaggttgagggtgtagtgaactatgattgtgccactgcactccatcctgggtgacagtataagatcctgtctattaaaaaaaaaaagttctgaaaaaaataatattattgaatcttttttatttagttatttattttgagacaaagtcctgctttgtcacccaggctggagtgcagcagtgcaatctcagttcactgcaacctccgcctcctgggttcaagggattctcttggctcagcctcccgagtagctgggatcacaggtgtgtgccaccacacccagctacttcttgcatttttagtagagacggggtttcaccatgttggccaggctggtctcgaactcctgacctcaggggatccacccacctcggccttccaaagtgctaggattataggcgtgagccactatgcttggcctcaacctttaaagggaaggaaattcttacacatgctgtagtataaatgagccttgaggacattatgctaagtgaaataagctagtcacaaaaagataaatactgtctgattccacttacatggtatctagagtagccagattcctagaaacaggaagcagaaaggtggttgtcaggggcacagaggagatgagaatggagagttaatatttaaagaacatagaatttcagttttactggcccagtgtggtggctcacgcctgtgaggaacatgccttggaaggctgaggtaggtggatcacttgaggcctggagttcgagcccagcctggccaacatggcgaaaccctgtctctactaaaaatacaaaaaataagctggtgtggcgggggcacctgtaatcccatctgctcgggaacctaaggcaggagaatcactggaacccaggagatggaggttgcagtgagctgagatcacgtcactgtatagcagcctgggtgacacagcaagactctgtctcaaaaaaagaacttttgggtttcagtttcgcaagatgaaaatgttctggagatctgtctcacaaccatgtgaatacacttaacactgccaaactgtacactaagcaatggttaggatggtaaattctaggtggtttttttttttttttttttttttagacagagtctcgctttgtcacccaggctggagtgcagtggtgcgatcttggctcactacaacctccacctcccagggtcaagcaattcttctgcatcagcctcctgagtagctgggagtacaggcacatgccaccacgcccggctaatttttgtaattttagtagagacaggttttcaccatattgttcaggctgatctcgaactcctgacctcaggtgatctgcccaccttggcctcccaatcctgggattatcaccgcgtgagccaccgcacccaccttaggtgttaggctggaaggagtgaaagttgcaatatgaaaatgatactagcagttaatatttcagagttcccagtcccaacattaaaaaacaaaaaacctgtagaagtggaaggggaggtccctggagttgaggggtgccgtgaggcctgggttcagagggtgtctctgtggacgtggagccctcccaggagggggctggatggtggaggggatgtctgtggaccaggagcccagtgcttgggaaacactgcaaggatgccagggggacaagaggggcagggcacagtgggagaggcagcagaggattcagggtgagaccagccagaggggaggggaggcctagaggtggcaacagaacttgaacagccacaaacatgagtcccaagcatgaggctcccaaggctggagggcagacacagccgccacccagaaggaaaccacaggcgcggtctccctgaggacctggagggagaggtgggggtgcctatgtcaagggaaggggagggaaggaagagatgggtgggcgagggctcagcgatagagggagccaggttggggctgagcagagagctcaagagcgaaggaagccaacagagggtagcaaggttttgcgggggcggtttcaggagatgacgtggtggacaacagggagaacaggtcgggggggagcctcagggtgccagctgagtcccaggcccttcctgatgggtttgggcagagctgatctgctgctctggtccctctaaggagggcctcagcctagggcgcagcagagaaggtgggatggagactgctatcacctggatgccaccctgactcactgttggtccccctacacgtcagcagcggactaaagccacaaccccagccagctgagtgctgggcctccccaagggagtggggagtacaggtgcgggcaggggacgggtttggaaatcagggactgtgctgctaagaaccccacaagcccagcctgccacaaattctcctgagtttttgccacctcccacttaaatctgatctctgaagcaactgcctcgcctgcctcactaataatcctggccctgcatctaaaaacacttcccctcctgcaggtagcagggcgccaagcagtgacttctgaccaacagagtgtggggagaagggatgtgtattagccccggaggacgtgatgtgagacccgcttgtgagtcctccacactcgttccccattggcaagatacatggagagcaccctgaggacctttaaaaggcaaagccgcaaggcagaaggaggctgggtccctgaatcaccgactggaggagagttacctacaagagccttcatccaggagcatccacactgcaatgatataggaatgaggtctgaactccactgaattaaaccactggcatttgggggctgtttattatagcagtgcaaagagttcctttatcctccccaaggatggaaaaatacaatttattttgcttaccatacaccccttttctcctcgtccacattttccaatctgtatggtggctgtcttctatggcagaaggttttggggaataaatagcgtgaaatgctgctgaca

SEQ ID NO: 49 - DNA, 110013 bp, Homo sapiens
tccgcaggacaggtctgttccggacccagcactcagactgctcgcctccaccggggggcgtcaggcctcgctggggattcagtggctgagaccccgagactcggagccggggcgcgttacctgtgctcgatacctgggcgcggtcacctacccagaggtgcagggcccccagggcggtcggcctgccgcccaccacgtaggctctgcagggaaacagagttccacaggcgtcgttgccctccgccttcagccctccgcgggttcgatcccggccacccaggtgaagcgcttgcttccctaaaagaatatatggttttcttggcgggggcgggggtgggggggaatggggaaggcgtcttctattttgtcagcgatgacatcctctagcgcgtggcttaactttcaattgtgccgggtaggttcttagttcggctggagtgggtctgcaccccggttctccccttagctgtggtaatagaggcctcggaacacgtccccttgactttggagaggacgttgtaattcctaagagctctttacaaattttctagtttagtttatatagtataggatgtataggagaaggcatcccggggcagaatttttgtctctagttcactgatgtatcccaagcgcccagaacagagcacagcgcagtcagcgctcaacagatgtttcttgaatgaatgaatgaatgaatgcccttgcaggcaaacttcagctcattgtctaatttttctgtcctaccaggacgtgagtgttatttgaagtaagcactctgtaggtacaggatggaaatattttcatttacagtagtttaattctgtggctttacttaagggtgtcgaattcagcctttcccccactctgtcctttgccttgcaattggaatgcgccgccaccaggtggaagtgccgcctaaggtacaaatatgaccctgcgccacgatagatcgaccgtctccttggcccaaatgttacactcacaaccactgcgccaggaaagtgtaagtatcttcactttttaaaatgggaaatgtaagtgacggagcttggatttacatccagtctacattttaccaggctacatttcatttaagatcctaattcaaaccacgaaatgtacatatatacatatagtgttggagggcgggtgtatcttttgcttcctcaaatttgcatacagttcccatgaaagctgtctgtttcatcggccttttagagcctgtacccatttaaccttacctagaaacactctagtgcccttagaacatcttagagccacatttaagcaaagcctctgaacataaacttaagcaagtttgatcacaaacccattggaggcaggtaattggagttcaccggtatgagaaattaacctagttgaaaggttgtcactagtgataatggccaaaaaatactatgtgccaatcatagggcttggtttattaattttcacaacctacctgagcaattggcataataatcttcatattccaggaaaagaaattcaggttttaagagcttgagagacatacccgaggtaaatctttggccaagaattccccccaaatattttcttactctgaatcttctttatcttgccttctttatcaaccagctccccaaatcttagtctcactctgtcaatgtctctgccaaataaaaagtatcaagtctgtaacagtaaatatctaagataagcctggatcattactgtgccagaaagcctacaactaactataaaatacagacaaacagaaacatgttaaaaaggacggcggaccaagctcgaaggtcctcccgctgtccaaatttgggagagtttgcataacaaaaagaataatgctgaaatattatgacatgtatattaaaaattcatgaatccgtaatgacactcaagaataaatcagtgtagaaagagtgaagagagttttctgtacaaaagaatgccagataataaaagtcataggaataatagaatagggaaaatcaccattctgcatctaccaatgtaaccattggtacaggaagggatcgtcaatagatgctaaaatcagtagagaaagtttgttgaggatcagggatatagtcacatagtctctaagtatcacctcacatattactgacaaaatacaaatggataagtgaaacttttcaatggagaaatctggtggatatcatcatcaagtggtcaaacttatcatcacccaaaatgagacaatctgacattatttgtgcttcttggttgtgatataaacaatattatctatggagtattcctaacataaatatttaacctgaatctaaagaattatgaggaaatcaggtatatccaaaaagtgatatattctacaaaacaactgacctaaactcttcaaaaatgtaagttttatgaaagatgaacccccaaatagttaataaactgtcctaaattaaaggagactaaagaaatatacagttattatcaatgcatgatcctcgctaggttttggatcaggaaaaaaaatttacaaagaatgttattgtgacagagaaacttgaactgtatactaaataatattatatcaatgttatacttcttggatacaataatagtgtcatggtcatataggaaataatccttattcttaagatatatatattaaaatatttaggaaccaaatatcactatgcctataacaaactcccaaatgtttcagcaaaaacagggagctctaatattgagggagggaacaagacaaatttagcaaatgtggcaaaatgttaacaattagagaatctaagtgaggattttagttgaactactccttcaactttattctgaaatgtttcaacatcaaaactttggagaataacttcagtggttttcaaccatgaaagtttattttgcttatgttggctgtcagtgatggcagctaccagccaattgcggctctgcaactttattccagaatccaggccatagaagcagcccctacttggtcttgtgcttcttgtggcagagggaaaagaatgcagttaaccaccttgtgcactggctcttaagagcttctgttcagactcacctgtgtctcagccacacagtcccctggccccagcaagtcccctggtcaagaccaatgtcaatcaagtaggatgcctcctgcagggagccagtaaatgaggttatatacttcacattcaaggaggaatgcaaatcactggaatcaagattcaataacaacgccaggtttcatggctcactcttgtaatcccagcactgtagagtggctgaagtgagcagctcctttgagctcaggagatggagaccagtctggataacatggcaaaaccctgtctctacaaaacaaatacaaaaaatcagctgggtgtggtggtacttgggaggctgaggtgggagaatcacctgagcccaggaagtcgaggctgtagtgagctgtgattgcaccactgcactctggcctaaatgacagagtgagatcctgttccaaaagaaaaaaaaaaaaatccagtaacacagtaattttcccaagatcgcaaagattatctggggcttaaactcagatctggctgtctccaaaccctatactttctttgttctcaaattcatacgctttttaaatccaaatatttgattttacattttcaaatcattatacatttacttgttgggaaattttgtcttttaatgtaaaggtgcctaaggaaaagtttcactctcagttcttttcttgattcacaagttcttaccaaaaccccacacaggataccactgttgagagttcttgatgcctctatcagctaccccattattatgcctctatcagtatccccataagatagaggaacataacctctatcttatgttcctcctactgacccaacatgcaagataccaaacatatggttctgtgcctcacaaagctgtacttttaatcagtttgtgttagtccagatactctgaagaacagataccaagacagaggtaagtatgcaaggaaatcgttaggagaaatgtttgtaagggaaaaggggaaggtggccaggtaaggctgactccatgtgaagaagagaaggaaggaaaattgaatgaacgcattcttgaccaccagtgcagtctaataaagtttcagcaagatcattaggtaaatccccaaagccaaagtgggcatgcctcagtgtccccactgtgctcagtctttggctgggagcagcccctgggaagcaggaagcatgtttgcctcaaagcaaacatgttatttcagagttcagcagctggggccctgggtcagttacactgcctgtaattgaaggtctaggaagcatacaaataagctgtattttgggaatcaaataattgcagaagcatttgacatgcattttacgtgtctacataataaaaacacatttgtatcaattatcgcacatcaggggtcaacaccctctacttccacctgaggacaaattgctgtgaaataacaagagatgaataggcaggtgtaacacatggatttttttttctcttggtatgtgatgtcatgaggctaaatggtacctttatttctttatatatatatatacgtatatatatacgtatatatactttaagttctagggtacatgtgcacaacatgcaggtttgttacatcggtatacatgtgccatattggtttgctgtgcccatcaacttgtcatttacattaggtatttctcctaacgctatccctcccccagccccctacaccctaacaggccccagtgtgtgatgttcccctccctgtgtccatgtgttctcattgttcaactccgacttatgagtgagaacacagtgtttagctttctgtccttgtgatattttgttgagaatgatggtttccagcttcatccatgtccctgcaaaggacatgaactcatccttttttatggctgcttagtattccatggtgtatatgtgccacattttctttatccagtctattattgatggacatttgggttggttccaagtctttgctatagcgaatagtcctgcaataaacatacatgtgcaagtgtctttatagtagcatgatttataatcctttgggtatatacccagtaatggcattgctgggtcaaatggtatttaaagttgtagatccttgaggaatcgccacactgtcttccacaatggctgaactaatttacactcccttcaacactataaaagtgttcctatttctccacatcctctccagcatctgttgtttcctgactttttaatgatcgccattctaattggcttgagatagtatctcatagtggttttgatttgcatttctctgatgaccagtgatgatgagcattttttcatatgtctgttggctgcataaatgtcttcttttgagaagtatctgttcatatcctttgtccactttttgatggggtttgttcttgtaaatttgtttaagttctttgtagattctggatcttagccttttgtcagatgggtagattgtgaaaatttccgccgttctgtaggttgcctgttcactctgatgatagtttcttttgctgtgcagaagctctttagtttaattagatcccatttgtcaattttggcttttgttgccattgcttttggtgttttagtcatgaagtccttgcccatgcctatgtcctgaatggtattgcctaggttttcttctagggtttttatggttttaggtcttacatttaagtcgttaatccatcttgagttaatttatgtataaggtgtaaggaaggaatccagtttcagctttctacatccagttttcccagcaccatttattaaatagggaatcatttccccattgcttgtttttgtcaggtttgtcaaagatgagatggttgtagatgtgtggtgttattctgaggcctccattctgttccattggtctacatatctgttttggtagtggtacttttatttcaacattattccttatcaactctgttgtgagctgagggggcaatagagtgtgtgtgtgtgtgtgtgtgtgtgtgtgtgcgagcgcacataggggtggagggggtgagagggttctggaaaaatgaaaggcagatgaatacaaagatatatacataatctactccttcagctatcatttatcatttctcctcaaaccatctctttcttatcagaaatttcctaatagtaaggggagaaccaaggatacagatcacagatagactttcttgtacaaaatatttttgtttcattcacagaaaatataatatatgtacatatatgtatatatatgaattgtgttaatttttatgtttccaaccctcattaataagtactaaataatgtttatttaaaatgttgatgatacggtaagtgttgaaaattataaatatcacaacttgaagagatagtacagatcataatttcactcccttcttttaataggtagagaagatgaatcacagaaaggctagtatttgtctcaaggtcatataaatgctagtatagcatctggggtcactggaaacgccagagaatgcagaaaatgccaggtctcctgaaattggcatgtggtccttaaaatgctctgaatcggccgggagcggtggcttaacgcctgtaatcccagcactttgggaggccgagacgggcggatcatgaggtcaggagatcgagaccatcctggctaacacggtgaaatcctatctctactaaaaatacaaaaaaaaaaaaatagccgggcgtggtggcgggcgcctgtagtcccagttactccgggaggctgaggcaggagaatggtgtgaacccgggaggcggagcttgcagtgagccgagatcgcgccactgcactccagcctgggcgacagagtgagactctgtctcaaaaaaaaaaaaaaaacaaaaacaaaaaacaaacaaacaaaaaaaaacaaagaaaaaaagaaaaaagaaaagaaaaagaaaaaagaacactctaaatcatcccaccctgcagcagtcacaccaaatccttcatttcatagctttgtgaacactgcaagaattcggctcctattcttagaaagtcaaagaagtgctaatccctcaaacacatgttaatatggattttctttgatgaaaaggaacaaatacattcttcaaaagtaaacttctccctggtccctcatcctatttcagagcaagaaagcctattagactaacagcaagctcattcagagtcttttagaggtgggggtgctcatggttccttgggagtagagttagagttgattaaggtatcctcttttggtcaaacaagatgctttccttcagaaccccttccgcttaattatatgtaatttttttcctattccttcattgttgtttgaaattcccagcctggtctgccttattccttgtctcttagctttgacacttgcctgccttccctcccctccccaccatccaatcttgacctatcctgggaagaagacacagatgggtcctgatcacccaaaagccacctgcacccactgactaactcctgaaatgtggtatagtgagggggaaaagcctaggtttgatcccagctctcgcctttgtccatactctttctctctctctctctctctctctctctctctctctgatgtacacttaggatatttaaagtattttgctgcagtgagcatctgtctatgtaatatctgtgcactggtgtaagtatttcttcagaagaggttgctagcaatggaactgcttggtcaaggttacatgcatatgacattttgatagagactgccaagtgtccatcaaagccgttaccacacaagacacagcagaaatatgtttcttttagatagcacttgtgaatattatcctggtgataaaaggcgacaccttcatgcatctttgcgtttgtgactaaagtccagggtcacaccctctaatcttccaccttttttgtttcatattcaagaccttgtcaaacctagcctggcacttatctattggggtcatcacagaaaatgcaaacccagagcccgtaatttcaacttcttgtcaatctctcatccaaagggctggattttatctctaaatcctgttattaccttttccaccacacaattgcatatctttaattagaatgagtttatccagctggacctttcttagtactttcctcttgattccctgtctcctaattgtttttacattttttttgttgttttacattccacaaacaatgtagtctccctatcaaaattcaaactaagaatatttagggagtaaagcatgaaagtcttccttcttaatctttttgtactatctatatgtctatagctatatctcaaatattattttgtaatccattatttaatatctaactgttccatactgatggtatttggattgctcaaataaatccccaaatagaagtggtaaggcaatgaaatataaggacaagaagaataaagaaaaaataactccctgaacaattctctctgtgacaactgtgggagtattttgataactgttggcaacaggacactgcatgtgatgtggggaaggaaaccttggcattcaaacaagcaaatggtttggcgacagtttattaaatttctgccatgcttgcaaatgccagtagcaatttctcagactgcagaattgctacacgtgtcaggtttgagactgtttcacaatcgtcatcaaataattcatccttcaaaattaaaaattatatgaactctttgagtaatcgtcacttctaaaacaaatgttttactggagtttatggatttcacttgcgcattttgaacacttctgtgccatagaatgaagataagcaaagcatccaggtaacactatatgtaatttagtcttaccgggagatttctatcagactattaaatcttcttcagacaaaaatagtccccgtttcttcttacatttatagctacaaacgcccaccttttaaaagacttcagcattacactttaaggagatagaataagaagagcaaactaaacccaaagctagtggaagaaaggaagttacatagattcaagcacaaaccaatgaaatagagactagagaaacaacacagaaaatccaaacaaaaagttgatttttttgagaagtttaacaaaattgacaaccctttagctattgacaaaagagaaaatataaattattaaaaatcaggaatgaaagaggccacatcactaccaatcttacagaaataaaaggattataaggaaaactatgaacaactatatgccaacaaattagatagcttagatgaaataggcaaattcctagaaagatgcaattaccaaaaatgtagtgggagaaatagaaaatctgaataggcctacacgaaataaagagctcaaattagtcatttcaaaatgttccatcagtaaaagacgggtccagatggctttactgatgagatctgcaaaacattcaaaggagaattaataccaattctttacaaactctttcaaaaggtagaagggagaacactttctaactcactttatgatgccagaattagaattaccctgatgccaaaaccaaagaaatcacaagaaaacagaacaaagtaaaactacagaccagtagcccttaggaatatagaagcaaaaattcttcaacaaaattctagcaaacttaacccagcaacatataaaaatgttttaacatatcaatataatcaatgtataaaataccatataacacaataaggaacaaaaactacatgatcatctaaatagatacaaaaaagtattttacaacatccaacactctttcatgattaaaaaaagctcaataaattatgaatagaagggaaattgctcaacctaataaacattcaacaaactaggaagaggcatgaaaagcagtaagatgcccaacctcattaacctcagggaaatgtacataaaagtaaaatgagatactactttatacccactagaatggctataattaaagaggccaatattcacaagtattagtgaggaggtagatatactggaggcctcacacgctgcctgtgggaatgtaaagtagtacagctgatttagaaaacaggctggcatttcctcaaaatgttgaacatggagttatcatgtaacctagcaattcaatttctacataaataccaagagagtacaggtagagtggctcacacctgtagttccagcactttgggaggctgaggcaggaggatcacttgagcccagaagtttgagaccagcctgggcaacatggtgagactccatctcttaaaaaagaaaaaaagaaaccaagagaaatgaaaatgtatatccatactaaaaatggtacatgcatattcatagcagtgttattcacagtagccaaaaagtggaaaccaaccaactgtccatcaactgatggatgggaaacaaaatgtggtatatccatacaatggactattactcacaaaaaggaatgaagtacgatatatgctacaacatggatgaatctagaaaatattatgttaaatgaaagaagtctatcacaaaaaatcatgcgttttataatttcatttccattaaatgtacagaatagggaaagctacagagacagaaagtagatatgtaattgattaggactggagaagtaggatgggaaatggggagtgactgctaaggggaactaggtttctttaggagggactaaaatgttctaaaactagatgcagtgatggttgcacatccctgtaaatatattaaacaatatcgaatttacactttaaatgggtgaattgtatggtatgtgaattatatctcaataaagctgttaagaaaatttctgacctgtctggctggccttctgagaggatgcctaattcctagtccgttaatcatgacgcttgcctcttcccatcaatcttgacatgcctggggagaagacacagctgggttctgaccaccaaaaactagctgaatgcaaccatcatgaactgcctctgagtgtctaatataacataggctgcagagccaagctgcctacatgcaaatccctgctctccacttcttggccttgtaactttaggcaagttcatttccacttcatgcttccaattaatcatatgaaaaactgcattaataataatacctgcttcatagcatttggggatgactaaagcacttaatgcgtagatggcatttagcacactatcaggtcgttcaataaagcaggttattgctactgcaactagcctcttcataccctggaggctgattctagcccagatttttgggtgactttttactctacttcacatgggaatggcagaagtcaccttcactagactctctaatgcagcaacaggcactagacttctttgctatgccatgaattggcagcacagccatttgggcatgggaagcaagttagcacataaccacagttaaatgcaattatatgtgttttttaattttacaattttctgaatcaagtgtgtatcaactaaagggacagttattacctcattcttagaaaaacaactgtattatggtttactagagaaacaaaccaatagatcatatggatttagatgatataaatgtaataaatctgtaatagagagatttattataaggaattggctcatgcaagtatagagtctgagaagtcctataatctgcagttggcaagctggagacacagcaaaggagttggtatagctccagtctcaatctgaagactgacagccaggggactgatggtgtaagtccctgtctgagggaagaaaaccaatgtctgtgctcaagcagtcaggcagacagagtgacttgtcccttcctccgattttgttctagtcatgacctcaatggattggatggtgcccacccacactggggaaagcaatctgttttactcagtcaactgattcaaatattcatctcttccagaaacagcctcacagacacacccagaaataatgtctaatcagatatctgggaacccgtgacccagtcaaattgacacataaaattaactatcacaggtctaccccttgtcaacttggcattcatacacttctccttaacccatacttaatcttcaaataaaaacattaacaagattataattccacctaacatgattcaactgttttgtgtacaattgaaaatgcactaactccttccacagaagagatgacgtccttgagtggtgcttattcttcttgatatcccaaaaattaaatactaagatgagaagtaacagtacttaagtactaggaagtcaagtcattattcttatattacatgataagggaatgagaggaaagcaaacaatgatatttgatatgtacatgtacacatacacatatagatatggatatgtatgtgtatatatacaacaaaatatttacaataaaataaggaggaaatactcatgataaccatggtcctcatttctgtaatggtcacatagccatagttggtatttataactaccttcctccactaccccatctatattttcttgccttcagcaatcacctcagctggttctttgccttgtagagtgactcaaaacttcattcctaaagggactaggccagtagttgtcctgcacgggttggattattatagttttctttttttataatttttattttttcgtagagatggggtctagctatgtggcccaggctggtcttgaactcctggcctccagtgatcctcccaccttggcctcctaaagtgctgggattacagacatgagtcactgctcctggcctgttgttgcagttttccgttggctgtaatcacaaggcatggtaatactaagagacactctgagggatctcctttattccagagatgctctttcttaccttcattgtaagtagtccaatttccccttggtagtcagaaccagtcaccctggccagcatggtagttctcttctttgccctttggttcagagtatgggagcccaaagtggccaagtggcaatcttaacttccaattcaatggaattgttgtgtctcctggtggaagcattcctccctctggaactaagacctttaggccagtaggccacgtggttgcaggaacaggaagcaaacattttgctactgggttactaaggataatagtgagaggtgccaattctatttccaccccttgattcttgaactcatgaatcttaactatgggagaagcagcacaatatattggacaccaattcagaggatatacagccttctaggaagccttgcccaagccctgcaaggtattattacctattgtcactgatgctgtaactgagtcttcaaaaggcactgttctatttagccagctacttcaggatagtagggtacgtggtaagaccagcagggtccatatacctgggcccattgccgcatgtctcttgctatgaagtgagttccttcatcagaagcaatgctgtatggaacaccatgatggtgcataaggcattctataaatctatggatagtagttttggcagaagcattgcaagcattgaaggcaagtctgtgtctagactaagtattccggtaagaaaaaatggtcctccttccacgatagaagcagtccaatgtaatcaatctgcaccaggtagctggctgatcaccctagggaatggtagacttagtgttgatctcagctgcaggcagattaagcagtcagtggtggccgtaaccaggttggccttggtgactggaaatctatgtttctgagcccctgcatgacttccatccctgccaccatggccactttattcatgagccttttgagtgataacatgggtggcagggaaaagaggccaacctgatatccacagaataggtcattctatccccttggttattaaaatcctcttcttctgaagtcaccctctggtgagcgttcacatgaaacacacatatcttcacaatttttgcccattcagagaggtctgtccatatgcctctttttcaaatgacctggtcaccaattttctaatcacattgcttccaagtctgtaaccatccagccaaaccattggccacagaccatgaatcagtacataatcccatgtctggccatttctcttcccaagtaaagtgaacaaccagtgcactgttcaaagctatgcctactggggttactgggatgatttcttttcaccattgtccttcagggatggcccagagagggagaggggctgtggtgctggagcgctctttttttttttttttttttttttttttttttgagatagtgtcttgctttagcacacagggtggagtgcagtggagcaatcctacctcactgcatcctcgaccttctgagttcaagcaatcctcccacctcagcctcccgagtagctgggactacaggtgtgtgccatcatgcctagctaattttttatttttgtagagatggggtcttgctatgttgcccaggctggtctccaacttctgggctcaagcaatcctcacatcttggcctcccaaagtgctgggcccctgccatttttaggtggtgcttgcatatcatgcagaatcctttgtaaaccaggcctgagttttctcttcctttgtcaactgatcatgggggaactctcaatgagaccacaggtgcaggctgggagagagaaggcaatgtaccaggagtggggaccacgcacatttggaccacttcttcacgtaacttacttgtaccttcaaatcctgcataggactgatcatgtgtataccacttccatttaacaactgagtgctgctctgcacacccagcattattgctttgtgcgtcagataacactcagcttataatgggcagctcaggtcacagggtaacaatggcccatggttaagcattcagtctctactaagggccaatagcaggccaaaagctgtttctcaaaaggaaattagttatctgcgaaggatgacagagctttgcttaaaatcctaagggccttccctttgattcacctttaagggtctgaaaaggctccaaagagcatctctatctgcctctgacacttcaagtaccattgaatctgctggatcatagggtctacatggcagagaagcttgcatggagcctggacctgctgcagagccttttctcattctaggccccactcagaaccagcagctttctggggtggtgggggtgggtcctgaggagaatcagcatcgtcttacctggcaacagcctcggtggggatggtgggggggcattctagtttgctctggaagtgtagatttaatgccctcagaaggggatataaagaaatgcatttagagggcagtgaacattataaacattgaaaaaaaaagcagggagtgtgtttgcaattccagttttcaacttttcacttacttacaatctgattgctgtttgtgcaatttgggtgaatttccctgttggtagaaatcatctctgataaccatggattttattctcatccctttcctctgcaatctaaaatattttgacaccagaaggccctgaaggtacaagtaagttgcatgaaaatcaacccagtgtgctcttgcatgaataaaaaatttccatcattctgtcaatgagaacttgagaatctaggtggtgatatataacacatggcccaaatgttgataactgattatttaatttacaaacaggctggctggctgatttttacttgccccagtttcatgacaccccgtaatagtttagagcagtggttctcaagcttttttcattatatcccccacccaagtaacgtttttagaccttttcctaatctcccccgtgacattttaatgcagttgatcaatgatatatctgtttatgtactgtatatgtatctgtgttttaaagattaaaagagtaagctttttcttcaaccctcaacagaataattttctttcccttgggaaaatattgcccctgcttgagaatgcatggcccaaaataggtatccagatttgatgcagtaagaaaatgtaggatgaacaatcttcctcaaacgtggctcttctttgcagcttgttattttcagtagcagaaaaggaggtagctattttattacatttgaatattgccttgctgttccgtgtggtccacgatcaccagcacctgggagattgctggaaatgcaggatcccagcctcaccttgtcctgctgaatccaaatctgcattttaacaagactctctgttgattccgatgcatgttgaagcctgagaagcactggttgagagttcagtcccctgctcagttggaaaacattaagtgtaacttagtgtgaatagaaaaaaataggcataggccctaaaaccaatgtttaagtctccccatccctttctctcaagtcctcactaataccccaagtttctttcttaaaagtcatcagtattacttttccaacttagacctgagtgtattttgtttgtgtgtgtgagaaaggttaattttatttacttctcctaagcaagcaagggaaacggcccgtggagtttcaccctgctagctcctctgcttctttccttgtgctcttctattctaaaaagcagggaccttagattcagttggacagagcaagataaaaacaagaaagaacacaaatttctgtttttctccccaataaattggactttcaactctcagtcaagacctctttaaagttaaacttattttaatagtgatcatttctcttggatcaagtgaataagtggacccaggaacacaataaagagattttctctatttttgctattttgaagagccagcaagttagtgcagggaagagggtatagaattaactcaatatacttgggcccttatttatgaagatgaggttaacttattaatttttttatgtatgtgaaattttgaaatatgtgtgaaacatctcaaccatacagaaaaagcagaaaaaatagtgtaacaaattctagatactcacacctagtactatggtctgaatatttgtgtttccccaaaattcagatgttggaacctaatccccaatgtgctggtaccaggagatgggaccttagggaggtgattaggtcatgagggtagatccctcatgaatgggattagagctcgtataaaagagccagagggcaccctctccccttccacggtgtaaggactcggtgagaggcattatccgtgaatcagaaaatgggccctagccagacactgcatctgctggcaaccctttgatcttggacttcccaacctctagaactgtgagaaatacattcctgttgtttataagccacccagtttatggtatttccttatagcaacctgaacaaactacagcacataggttagcaatttgccacattttgctgcttctttatttttctgaagtattttaatataaattatggatagtatgacatttcacttctaattctacagtgcgtatgttttttttaagtaacttttttataaaagatgagttttaattaactaaaactgttgagtttaaaactacagggatttccagtagcaaaaagcttccattattcttcctattgctttttctcctaatagcaaaggtcaagaaaagaacttgaacctgctagaattgttccaagtaccagctgaggctttattctttggtgtttcaaaaaaagccttgacagtagaaagctaaattctctttcatcataaaccattgataaactgtggtcaagttgggccaaaagccaaatccttcctcactgaaaaaaatgctgtggaaagatttcgctaaataacagtagctctttcttaactaagaatctcagttaatattttggtgcttttaaatgcagaaagagggaagggagggtagaaaaaagtgataaaaggagaatcagaagagagaaaagaaacagatgatcttatgaatccccaatttatatcccccaattaaggcatctctttcttctgtctccctatatccctttctattctaacattattgacccactacaataaaattaagtatactttaggctgggcatggtggtttacacctgtaatcccaacactttgggaggccgaggcgggtggatcacttgaggtcaggagtttgagaccagcctgggcaacatggtgaaaccccatctctactaaaaatacaaaaaaattagccagacatggtggtgcacgcctgtaatcccagctactcaagaggctgaggcacgagaatcgcttgaacgtgggaggcggaggctgcagtgagccaagatcacgccactgcactccagcctaggccacagagcaagactctgtctcaaaataataataataattattacactttaaacagagacagggagaaaatgtgttccagttcagtggccgggggcagtaaagaaaaaaatagctgtagtagctgagtccaggtcgcttaccattttgacatctttccagccctagtatatggttttgctattaggagaattgcttaatctggctgggtgcggtgactcacgcctgtaatcccagcactttgggaggccaaggtgggcagatcacttaaggccaggaattcgagactagtctggccaacatggtgaaatgccgtctttactaaaaatacaaaaattagccgggtgtggtggcacatgtctgtaatcccagctactcaggaggctgaggcagaagaatcacttgaatcaggaggtggaggttgcagtgagccaagactgtgccactgcactgcagcctgggagacagagggagactccatctcaaaaaaaaaaagaattgcttaatccagccgggtgcaggtgcagtgacgcatgcctgtaatagcagcactttgggaagccaaggcgggcagatcacttaaggccaggaatttgagactagtctggccaacatagtgaaactctgtctctactaaaagtacaaaaatttgtcaggcatggtggtgcacgcctgtaatcccagctactcaggaggctgaggcatgagaatggcttgaacctgggaggtggaggttgcagtgagctaagatcctgccactgcactccagcctgggagacggaatgagattctgtccccccaaaaaattttttttaattgcttaatctttgtttctgaatttgcagactcaaacataagagcagtgtagttttctatttgaaaatgcctttaagatcacatatctcagtcccattttctgtatacaaagaaccaaagttccagaggtgttaggtggcttctcagagactgggtctgagggaaaagctttttgcttctggaatggccagtatatctctacctttgatttttagtgctccaggatgttgagtccctatcctaggaaggaatgacaaggatggtcacttccgccacaggccctcaccctgcatcctgcttgttaaacatcatccaccccaaggggcattttcaaagcctctgctgttccttgccattgtgtgccctggctccaagccaacagacaagcatttgaacttctgtctctgtgatgacgtctagcttcagggaatcaacagcctggccttctttataatgctaagcttcaaggaagaaaatatcttgcaaaactggtcccattcccaggagcactcccatctataaggtgcatggccagccttatcattctgtgaaacaaggaatcattttaaaggctgtgatacaagaaaatatctccttctttgacttctcctgagaaacagaaatcttggctagtggggtagacagaatgttgtcacttaacagaatatcagttatgaaactaaacattaatctgctgctgttccagtaagctacttttcagtagggcctaaaagagcattccagaaagactaaaatcatccacctggcttaaagggggcagatccaagaacacagcggaatttctaaatctttggaagtgaaaatgcatcattctgtttcttgtacatccaattttcattgtagcaagggagatcaagtttatccatggtctctgacatcttctcaaagatttctaaagacgaaagaatgcagctgatgctgttattttaggtatagaattccgtcatcattaagaatttgattaacaaaaatatatataaatgtttacagctattcattagagaaaaaatgcgttcaggatacatagtaaacaccaaataaatcataagcagcctgttgttgctacgtacactcttatttatctgtcttaagttggagtacctaataaattctgtacttcaaaagaatgtcctaaggtctagatccaaaaaaagggcaacaatggatttaatcttttttttttctgtaccccaggacaaattcacaaaaatgcaaaggattattctgaagttgtgtttttccttgttggcacagtgggagaaatattctcttggcgaataggcaaagtaatagaatcagctactaataactcaagtattactgttgccaatttggccccatgaatgaaacactttaaaaactgcctgacttttttactaagtaccctgaagaaataattagacaagggtataaatgtataagaatgtgcatcacagctttaaaatgtttaaaaaaatcaaagtgacctaaaagtaaataaaatgcagtttgttcaacaagttattatatccctacggccaacacaatggtgccgtcagggctgatgttgcagtagattggttaacttggaaagatggttgtaagaatgaaggtaacgtggctgagctgtagagtaaagccttcagatacagatagacctggaatcatgtccttgttctgctgttggccaactggatgatctggaaatttatctcactctgaccttcatttctttcatgtgaagaatcaaagttgataatgaaaatagaacacttggcactgagactggcatattgagatactgaagcttaaaagtaccatcggcttaacaaatatgctgttgttttaaaaacttatgtacgttatataatcatactcctgtcaaatgacatatggatttatatattcatccagtagccaaatatttattgagcatttattaacagacaagcactttgttaggcaaaaagactatataataacaataagccaaaaatgacacagactttgccttcaaagagtcctgctcatgactgattgtgatcaattaagtgtgaaaccccagctataatgcaagagaggaaggggataatgagagcttgcaagagtggggttggattcagttgggaagggcagggaagtttcctaaagaaatggcagctaagcagaggcagaaggatgagtaggctttgactagatgagatggatataaatgaggagcagtgcacataacagttaggcacattgagtctagagtcagccaggtgtgcttccaaagcttgctccagcactgtcttagttagttcaggctgctataacagaataccatagattgagtggcttaaacaacaaacatttatttcccacaggtgtgggggctgggaagtccaagattatacaatagatagaataccatagattgagtggcttaaacaacaaacatttatttctcacagttgtgggagctgggaagtccaaaattaatgtattggcaaatttggtgcctctgaggatctgttctctggttgatagatggccatcttctcattgtatccttttttttttttccttgagacaagtcttgctctgttggccaggctggaatgcagtggcatgctcacagctcactgcagcctcaaccttccaggctcgagacatcctcccaccccagcctccctaatagctgtaactacaggcacgcaccaccatgcctgactaatttcttgtggagagggcatgtcaccatgttgcccaagctggtttccaactcctgggctcaagcaatctgccttcctcggcctcccaaagtattggtgttacaggcatgagccactatgcctggcatataagcagagagaggaagcaaactctgtgtctcttctcataagggcactaatcccattgataagtgctctgccatcatgacctaatcaccttccaaaggccccacatcctactaccatcactttgggggttaggatttcaacacatcaattttggggggacacataacaactacccacaagctgtcacaactctgggcctgttgctcaacttctctgtcccagtgacctcacctgtaaaatggaaataatagttttccttattcaatatgattatgaggattaaattcttaaaagacactatgaaaaaagcttagcctagtgcctaatgcatagcaactgttcagtaaatgttagataatactaaagaaataaaagaatgaagaaccaaatcaactgcatagcagaagcagcatatgccaaggctctgtgggagctcaatgagaaaaaaagatgaagccctgttgtttgttctgcttttattctaaacactgctggaaaccattgaggatttaagcaggggcactctgtgggctccatcctcttcctctcaacctttctgctacagccacaccttctgactctctttctgtagtacttgtgacaaggcctttgcccgtgatgtccccttttcacagactcttctttctacctgccttctcctacctccttcagactccagccttcagattcccctgtgaagtcttccctgacctccctgatagcacgttcttttttaatagcaccctcagtgatcgctttgcctgatttatgtctctctctcccacctacatcttcacaagatgagacactgtctgttattgcgtgcagttgtgtcccagccactagcatagtgactggcctattgtaggctcttatttcccactggataatggaagatggaaagaatagaaaagaaagagggaggaggaaaagtagaggaaaataaggtggggtggggaggcattgaggccagctcaatttcagacattgattttgagtggtacatctaggtagccgtttctgaaaacaggtgtggaggtcaagagaggtagactaaggagtccttagaacatgggaactcacttaagccagtgaatgaagaagagcagagtctttggatacaaggcttgaggtcactaactatcaatatggacaagttacgaagtcactgaatcctctttaagagccacacagagacagaacttgatcccagccacacagacccccgatagcatgcttcccatatccccaggctggtcacttggagcaccctgaatattgatgatacataaatgagacactcctaatggtttggcttctgaagtttattaggtacttactgatatccatcagttatagatagggttgttgaaatacgcgtaatcatacctttcccccagctcccgctaaggtgttgcagagatctaaagagaaaatgcacatgaaaatactttccaaatatcaagtgtcaaacatgtgaagatgacattgtcattacagagatcaagtgacaatattaaggatggtttttttctttctagaagggagaaatacattgcattagagtccatctttttagacacttttgtggttgcctcagtctattcaaggttttttgtttttgtttttgttttaatttgtaccactcaatctgttttaagaaaataccttcgactgggtaatgtatagcaaaaacttattgttcacacatctggaagcgaggaattccaagatcaaggcactgactgaatcaatatctgctgagggctcactctctgcttcaaaaatggcaccttatggctgtgtgctcacatagctgaagggcaaagtaggtccatcaagcctctttttctttttcttttttcttttttttttttttgagacagagtctaactctgtcacccaggctggagtgcggtggcgcgatcttggctcactgcaacctccacctcccaaattcaagcaattcttatgcctcagcctcccaagtagctgggactacaggcatacaccaccacacctagataatttttctatttttagtacagacagggtttttgccatgttggccaggctggtcgcgaactcctggcctcaggtgacccgcccgctttggcctcacaaagtgccaggattacaggtgtgagccacggcacctggccaagcctcttttataagagcattaatcctacacatgaggacttcaccttcatgacctaatcatctcccaaaggtcctacctcttaatatccttacctcaggggttagggttcaacatatgaattttgaggggacacagtcatgcacaccatagcagtggttaggagcattggtcttgaactcagaaacatctggtttaaatctggctcaattattcctagttgcctggtcctgagttagggaattttctaagcctttgtttccgcatctgtaagatggaaataatagtacctcctcacgaaactgcttgatgttgcctataaagtgttttgcacaatgccatccaaatgggccttaataaatgttaacaattaatatcatcatcctatttttatttatttatttttaagactgggtcttgctctattacccagactggagtgcagtggcacaatcttggctcactgcaacctctgctttgcgggttcaagcaattctcctgcctcagcctcctgagtagctgggattacaggcacacaccaccacgctcagctaacttttgtatgtttagtagagatggggtttcaccatattggccaagctggtctcaaactcctgacctcaagtgatccacctgcctcagcctcccaaagtgctaggattacatgtgtgagccactgtgcctggctatcatcattgtctttaagagtgctctggagagcagggaccaaaggaaagaattactgaatctatctcaattcctttcagcatcctctcatctggattatattacccaaggtacaagatgttgcattagactgcataactccctgcaacagaatggagagttcctacccttcccacttgctgtttaattaaggacatatattaagcatagctgtcctaagcagggactctcgcgggaaataaagtataacttaagtcatgttatatgcagaaagacaaatcttttccctgcccatgttttggagactgcacaggaaagacctaatgtgtttattccaggcatggctcttttcttatcttggagaatgatcttgaataagccatttcaccattatgggcctcattttccttaactgtgaaatgaataagggagaaatggtggggagtgaagttggaaagtatctgtacattctccccaaaggttttcattgttaggatttcacgcttgtagactaatggatgcctgtccatcctttgtttgatcctggcaagtgtttgttaaatgttattttctcccccaagaaaattccattaaaaatcattttcatatcacctaatttcttataaaattgctaattaacattcagtaaagcaccaactactgagttgataataaatatgttttataaaagaaagaagcacctgtaatcccagcactttgggaggcctagttgggcgaatcacttgaggtcaggagttcgagaccagcctggccaacatggagaaaccccatctctattaaaaatacaaaaattagccgagcatggtggtgcacgcctataatcccagctactccagaggctgagacaggagaatcgcttgaacccgggaggcggaggttgcagtgagccgagatcgtgccactgcactccagcctgggcaacagagcgagactctatctcgaaaaaaaaaagaaaaaaaaaagcactataaaagaaagaaccactaataagtgctttttactgattttaattggcaggcaaaactaatctaatgatgtaatttagaagcagacaatcctgaaagagaatgttcctgcttatagtaattaaaaccaggtgaggctagtgagttgttaatgtttcttgaaggtacgttttgagtactgtattgttataaaatacctgaaggaaggtgtcactttgggagagtaaggtaagctacatgctggagacaccgtgggcttccctgaataggtttatttggctagaaaagagggtgggaggggcacagcatgaatgtgcttgtgggctcatcaggacacaatgttgaagtcaggcttatttcaaaaagtgatctgggccgggcacggtggctcacacctgtaatctcagcactttgggaggctgaggtaggtggatcacttgaggtcaggagttccagaccagcctggccaacatggtgaaaccccgtccctactaaaaatacaaaaattagctgggcgctgtgggggcgcctgtaatctcagctactcaggaggctgaggcaggagaatcacttgaacctgggaggcgaaggttgcagtgagctgagatcgtgccactgcacttcagcctgggtgacagagggggaccctgtctcaaaaaaaaaaaaaaagtgatctgagaagataatggtgaggaataaaagaagttaggtaattgggaacccgttaaaaaccttacattctatccataagagcttaaacttacatgagagacacttgggaatgtatgtggttctggaaataggagtatatttttctctaaatttcagagtgtgggcacactttccagcaccttctccacacccatggggaaaaataaaccatccaacacagaaataccaaatctgagatgtgagaagtcactccatttaaacccagccctttccttcattgcttgttttaggaaatgtgcctcgacaccctagtgttactttgaattcagaattagaatgggtggaaagaattaaaaatggtaagctgtcccaaaacaccaagtcctcatttatatttacctgacaaaactgcttatagagtcagagtgaaagtgattgtgacaggtgggggcaggcactatgctcaaggagaagagaacagaacttagaggaactctgacagtatttcctccccattcctcccaaattgccccatgctccctggtgcagtgattcctacaggcagaaccacaacgaaaccagttcccaaacacttgttaatgaagcagtattaactgccgccatttctttcaccatccttttgctgatgttttttaagttaggaatttattatttgtttttatgtaaaaaaacacactgtcctttgaccaaaactttagtcagggccctctgagtccttttcttgactagatccaaccttaggcttccctctctgtctttgtagaatccagtttgagcaagaatcctgctaagtcagtttattgaaaattccccccacccagtatctgaccttcgatatcttgtcaccctggcctgccttcagcaagaaccctaacaaatcagtttagctagaaaccccttatccttgatgtttcttcttagtacttttttgtccactgacacccccccaaaccctgctactgagttagaagtccacttgtccttgttgttggaattgagtccaatttttctcccccactgctgcagtagttcccatacctatctccatggcctcccctttgaataaagtctgccttaccatctttaacaagcgtcatgaatagtttttttcttggaatgttcctgaaaccaccattgcaaaattataactgagacagtgaaagagacctgacctaaccaactccatcttctaacctccaagctgatcttgtttattcctgggcgtaggctgaactaactttgggaggaacttagttcattgtttatagtttgacacaaagatggtgacaacgttttcccaaaacaaacccccttcttgcctggggactagactgcctttgtaggactaacaaattagccacgagattagaaattatggtttaagagtcattcaggcggaggctgtaagatcctgaccctccataaactgctcctaaaatcagtgtttgagatatttcgcagaccctgcacttgatggatcagctggtgccaccccgacggagaaactggctcatctgatcttgtggcccccacccggaactgactcagcacagaggacagtttcaacttcctatgatttcatctccaacccaaccaatcagcactctcgacccactggtctttccctcacctaccaagaattatccttaaacactctgatccctgaatgcagagagactgatatgagtaatgataaaactccatcttccacacagccagctctgcgtgaatgactctttcaccattacaattgccctgtcttgataaatcagctctatctgggcatcgggcaaggtgaacccattgggtggttatattcctaacacaaagaaatgataaatgcttgaggacgtggatattccaattaccctgcttgctacactgtatgcttgtatcaaatcatcacctgtaccccataaatatataaaactattatgtacccataataattaaaaaaatttttaaatatttttaatatatcttatgcattagttgctttactaagtataaaactcaagtctgcaaattttttctacatgttttttggaggcttgctttctctattatccatgtgggcaataccctcatagacactaaatacaagagacaattctcaaccctctttttagccttggactgtacaaacacctccacctttagctcctgattctctcccagttccttttgtactttttgactgctctttcttgtgttctttctctgggttctttctcttcctacctcttactgcagttatttccttagatttatccataaacattcacttctttgtctgattgatctcattcactgctcctgccttctagaaagttcctcaaacaataatccatagattcgttgcatcagaattaatcaaggtacttgttaataatacagcttcctggggctgctgagattaaaacttctgaaactcagaattttaacataattttaaggaaagaatcataatgaaggagctccaaaggattctggggagaagatagtccagtgatcactgttctagaagatgctgctaatatttatatttatttctttagtcaatcctgagggtttcctgttctctagagcactcattctaacagtctactggtcaccccagctatatttctctctctcaactcatcccaaacctgcaggaattatgtatgccctctatgtttcttattcctttaatgacactatttataacctccacatacagccacctatgctagaaatctgatacctacatgttctctcctttctcacccctacatctagctgataacataatcctgttgaccatgtttgtgaaatatcatctgaatccacccggtttttcatttatcacacggtgaccatttacttcacaacttggtctctttctcaggatattgtaatagtttagacttgactaacaccctgattctcttttctgtaatccatcctgcacatttcaatatgagtcatcattctagagcagcactctcttgtagaacttcctgcaatgatggaaatacattttccaatatggtagcccctaccctcatgtgactattgagaaattcatatgtgatcagtgtcagtggagaactgcattttacatataattgaattcaaatttatatagccagccaggcatggtggctcacacctgtaattccagcactttgggaggccaaggcgtgtggatcatctgaggtcagaagttcgagaccagcctggcaaacatggcgaaaccccatctctacaaaaaatacaaaaattagcctgcatggtggcacatgcctgtagtcccatctactggactgaggaggctgaggcaggagaatcacttgaacctgggaggcggaggttgcagtgagctgagattgcaccactgtactccagcctgtgtgacaaagtgagactctgtctcaaattaaaaacaaaacaaaaaaaatgtatatagccacttagatctataggctaccatattggacaccacagttctaaaatatgagtcttttcttatctcattgctttcaaaaagctcattagctgtaggatgaggtctagacagtagcgtgaatgctcttcgtactctaacctccccttcagtttctaccaccaccaccacctacctcactatcccgatcccacatacactttagtactgtagaaccttgctttttctaaataaaccataatttttcaatctcctagctctggatcctgctgtttcctctatgtagaatgcctctcctttatgtccttcccttcagaatttgacccatttttcaaggtttaataaagaaagccctggccccactcccaacaaaaggaacagccccttatcatggaccttggacaagccatttagtgtctctccgcccagttttctcatctgcaaagtgggaatgataacatttcctcttttatggagttgttgggggattagatattgcgttattcagactccatcactgagaaagcatgcaataaaaatagctgttattattttctgtcctcctgtaacatttaccatgtggtatcaggcatctttcctgataagactctgtctcccctcaagactgtgagcttgttagcaagaaagcctctatcttgttcatggttgtccttcagcatccagcacattgttgccatttgtcaaatgccttggctgggtggcaaataaataacttagtcagttactcacataggattgcatagaatttttttaagtatgacatttttgtgtatatttttagggaggagtaaaagacatatagctgtagcaagaattagaaaaaagaagatgccaacaacttttctttttaagcatcaaatccttctcattactgcccagaaaaactggcataagctgttgttaaatctgtgccccttctcctcggttgactggagtacgagttttaacattttgccattttgactttcctttctgggtcccctgggtcctctcctcccaccccctccctgggtactaagttttcatcactgtcaccacggcaacagcaaggatgcctcattcctcacagttctgcacagctaaactctggtcgcctttgtccactgagctagctgaattctttttaaatacaccactaaatcaactatctgctgtacagaacttcatccattattcaacctttaaaaaaaaacaaaaacaaaaacaaacaaaaaaacaaaagaaaaaaactgatgtatactaatttcttctcctgggaatggcctttttccagacctgccaatactcttgaatacaccatacatttttggtccctaggaacaaatataaaaattgccagtgtacgtgcgtccaatgtaagtgtggtgcaattttaaagcacgcaacagagcattcataatgggtttcccttttaaaagcacagtagaccaaaaataaacctgacaaagggcagctgtagagttttaacacgtggaaaactccacaagcagcagttatgtaacttgaaagaaacatgataaatatttcacaccattagatgaacttccaactctgacactgaaaaaaaagcaaagaacaagaacgcgagacaaatgcacctcaaatctccaaggagcaaaaagcttaaactgagaagggaccaaggctgtactaaaatctgagacctgacttccagcacgagtcttgattgcttttttttttctcgagttcgaggcggagcccgcgaaccccatctcctcagagcgccaccccctcagcttcgcccgttgggcagaattttccaaatatctccacccctaggctgaaaagccagaaagaagttttgagccaacgaggggaagaaaggagttggggcaaaacaggaggcgtttccctacccgcatacatccccgtccccgagacacccaatccccccacccccagcctgcccgcgcctcccgcccccagctcctcgccctggggacagctggcagccccgcgcggaccagacacaaagccgatcaatcccggaggcgtgggggcggagggacgacccgccggggctttcccgggcgctgctctcctcctgctgccccctcgctaggacccggcggacgcctcgtctggttttcacgccctctagcccctacccccacacccccaaaacagaacagacccccatccctgggctggaggacccgcctcttggcagccagctgagaaggcgccccggggagggggaaactgacatcccatctagagccgtccctcctcttcctcccctcccgactctctgctcctttcccgccccagaagttcaagggcccccggcctcctgcgctcctgccgccgggaccctcgacctcctcagagcagccggctgccgccccgggaagatggcgaggaggagccgccaccgcctcctcctgctgctgctgcgctacctggtggtcgccctgggctgtaagttgctcgggttcctctacccttcctgcctggaccagcctgcccccaccctccagccccccacggggcgctggctgacagtgtctgggcggctctgggccgaggtcgccgcggggcgtctgaccttgcgcccaggcgagcgggaaacccagggtgcccgcgagcggacgctgggagcaagggagcgcgaggtcgtgggtttcttgtgaattgcgtctgattttgtcagttctagatacagaaaattaagggttcccactagcaggttctcatctgtttgcaaagttggggtaagttttcagacagagggacgtgattcgaatgcaaaactcactacccactggtaagatgctaagaccccaagaaagatggcatcactgggaggcgggcgccggccacactttgagtccccggggagggggcagcgtccgcgtggtctgggctctgtagcgtcccagctgagccggcgatatgcagcgcacttgtggggcggaggtggagggaattcgtggctgctgagccagaattacttttatcctctccacctgcacatctacattcacttagagaagtctggtctggggactctagccagctgctctgtcctcaggggacatccaacgggacgattgttagaaagattcagaagccacatgatccagtagctggggagacgtcccaaagccaatttcaccggatgattttaaacaggattttcacggattctggactcatgagatttgaaatcctgggaacgttgccgttattttgttttcttcgcgttaactttttaggaaaatggaggaaattacaatagactaagcaatgcagttctacttttgctttttcttttttctctcaccttttttgttttgcttttttcccttccttccttcctcccttcctttctctttcttctttctttctctctctctttctttctgtctctctttctttcttttgtaaaatgagttattgttgctattcacgttctggtaaagtaacacttataatacttaacctgcgggacgagtgtctaataccacaatacaatgatattttctcacgccctcgctgcccaagtgatcatcgcacagctcaagtgatgtgagccacgtccctttgtggaggaggaaggtgcacattgtctcaggcaagggacatgtactgaccaatattatataaagtcaaaccagaaagccaaagtttcacaatgaaacccttgtgcaattctgaaatatcaattggtatcatatggaacacacagaagaaaaaaaatgcactcatgctaaaaggcaacagagaggtaggctggagaaatcgttaacagaacaactgagaaagttatgtattctgctgaaattctaaatttcaaatagaaaagagtgtgccttttagtgtagaattgtcactaattaaaaacagaaaatcgttctgctgtgctattcctattgaatcaccaacatagaaacaatacaccccaagtctgaaattgtagtggagaaacaaccaagaggcgaacaaaagcataaatgaatggggctgagtgacctcttcaagctttaggtaaatataacacattgtctctgctaaacttgattcctataggggatgtatttggaagtgttgtggggacttttctatattgttcctgggatactaaaagatctggcattgcaagagtgttttctttgtatgtgggtgtttttttttttatgtttaaaacaattttagaacagtttggatttaaataaaaattccaacgctagtatagagagttctcatatactccacacccagtttcccacattgttaatatcttacattagtatggtacactttattcaaatttccttcattcttacctaatgccttttctattccaggatgccatccaggctaccatattacatttagttgtcctgattccttaggttcttcttggttgtaacagtttcttaggcttcccttgctttctcttactataatgggtttgaggagttctggtcaagtatctggtagaatgactgcgaattgctgtttctctgatatttttctcataactagactggggttataggttttttggaggaagatcagaaagtggtaaggggcctaggtaaagtgacattttcatcacattatctccagggaacataccgtacacatgacttattgctgttgatgtgaacctaggtcacctgtaatcatactcctaatgtagtgcataccagttttctccacagattacctacccttttttcttcatttccatactagatttttttggaaggaagtcactacatgcaacccacacttcttcaggaaggagagttatgctccatctccttgaaggcggagtatcttcataaattatttggagctcttctgcatgggagatgggtctctcccttcccttcatttatttatttaatcatttatttttctatcagtatgggctcataaatatttgttttatactttgggttataatccaatactattttatttattaaagacttagtggatttcttatgctgttattacatattcatctttttaatattcttcccagatgtaactgtgccattcttttggccactcctatcatttataatatcatgcttactcccttctttcctttttatcctgctgtttatcagcattctttatatctttcttagtagtctggaggattgcttttttgttgttgttcttgttatttaaacgatgatgtcagtatccctgttgatatatggatatttttgtgtgtgtttagttgaattacatttttctttcccactccattaggaaaggaatttcttgatgtttgctcaccactatatgtccagtgctgagcaaagttcctggttaatagtaggtataaatatatgcctgttgattctatggtgccttagtccattcaggctgctgtaacaaaataccataaacggagtagcttataaacaacgtttatttctcacagctctggaggctgagaagttcacaatcaagataccagcaaattcagtgtcaggcaagggcccacttcctggttcatagatggagccttctcagggtgacctcccatggcggaagaagcaaggcagctctgaggtctctttgtaagcgcactgttgtcatgaccagatcacggtccaaagccttcaactcctaataccatcacattggtgattagatttcaacatatgaatgtggggggacataaaccacagcagatggaatggggatgaggtagggtaggtaaaagaagtgtatagattgaactgattgcaatataaatcatgaagctctaacttcatgttaagtaggtggagtgttagatttctctgaggcatcatttaagctgatatgtcaaaaaataataggaatgagtattccgtgtttggtggggtgttgtcatgccttttggggtctctcagagccaaggagctgatcatgaatcagttcctgattccacctaaccagtagcagctggtcctcagatctggactggaacctgatccaggcgcttagcctgagtctaatctctcatcaactgataaagattgtggtaggggagagaggtctgaatcttttgtaaaatcacaaggttctgcctttttgccagaactgacccaaaacagcactccagggaaccggtactaggaaaattctgccctctgtatctattgttaagaagcaactgccataatcaatttgctggagagaagtggttccgtgctggcacagtctcaattatctgatgaacagaaacgctaaaatgggcttgtaggtggatttaacaaccatttcaagactatgaaagaaattatattagaaagaatgaagtcaaaaacaaaaacttcagcctgagcacagtgagttccctatgactgaaaacactcatttatcctcccacatgagcagtttaatgagaggagcccacaggagcttacggatgttcaccacccatggtttccattgcattggtttcctcctgtgggccttcctcatagagaagatgtattggaatatagaggtaagagctgctagctttattgaagtcagaccaccaggaagctataaaggccattcttaaaataatattttttcatcccatagcaatatagtagtaacactgctgagtcaatactccagtatacccctcttgctagactgatgttttgaggaagatggtggtgaagatggaaaaggggaatcagaacctgggtcaggtgcctcctttggcaaaagcagcaaaataaaacttaaaaccagggattgttttcttggacggtgttactgttaacaaggctagaactcagaaaaaataacccaactgtattacttttctatttctgtgaaacacatgaccaaaaacaaaacaatacaaattgattgtcttaaacttctagaggtcagaagtctgaaacaggtctcactggcctaaaatcaaggtatcagcatgaagcattccttctggaggttctagggcagaatctgtttccatggcttttccagcttctggaggcgccccactcacggccctgtcctgccaggctgccacctgtccccactcacggccctgcgacaccaggctgccacctctcttgttctctctcttctgcttccttcttccactcatcaggacccttgtcattaccttgggcttacctgagtaactctggataatttatccatttcaaagtcagctggttagcaactttcatccatctacaactgcaattcctatttaccatgtaaagtaagatatttataggttctggggagtaggatgtggacatctttgtggggctattattctgtttctcacagcagccaaaatgaggttatgcacagcgacagtgttttcagtgctgtagccaagaatattctagattccatgaagccaccataacttttacctttaaagtataactcatagtgatataaagctggttggttttttggttttgtttgtttgtttgtttgtttgttttatttgagatggaatcttgctctgtcacccaagctggaatgcagtggcgcaatctcagctcaccacaacctccacctcctggtttcaagcaattctcctgcctcagcctcctgagtagctgggattataggctcccaccaccacgcccacctaacttttgtatttttagtagagactgggtttcgtcatgttggccaggctggtcttgatctcctgacctcagatgatctgcctgccttggcttcccaaagtgctgggattacaggcgtgagccaccgcgcctggcctaaagctatattttttattagttgtatttcaaattgcatagtatggtggtaaagaacatgcactccaatgcagcactctgtgctcttaccagctgtgtgatcttatacaggttaacacctgtattatgtcagtttactcatcagtgttggtgataatcccaataagagtgcttacctcatagaggtttagggagaattacatgtataacacacttagtaaactgaagaagccattgaagccttttgacattgaatatcagtttgatttgcattttaaagagaatgcattggatggagtatggtgaatggaaggattggggtggggggagtcaaactggggagaccagttagaagttattggagtagtccaggcaattgcttgtgtaagtacttattttatatagtttattgataaatatactcacataattacacatacacatataaccactgacaattgctttttacagttgtcacctaatgatgcgatgtgttctgagaaatgtgtcgttaggtgattttgttattgtgtgatcatagagtgtacttacagaaacctagatggtagagcctgctgcacaccaaggctatatggtgtagcctattgctcctaggctacaaacctatacagcatgttactgtactggatactgtaggcaacggtaaacagttgtaagtatttgtgtacctaaacatatctaaacatggaaaaggtacagtaaaaacagcacaaaagataaatggtacacctgtgtagaaacatatcatgagtggagcttgcaggactagaagttgctctgagtgagtcagtgagtgagtggtgagtgaatgtgaaggcctgggacattactgtatactactgtagactttatcaacactgtacacttaggctacactaaatttataaaacaataaagttcttgtgttacagcagtacgggcgttatagcatcactagatgataagaatttttcagctccattataatctgtgggaccactgatatggttcattgttgaccaaaatgtcattatgcagtgcatgactgcatttgaaatgtagttaattaaatctgatcaggaatttaagaaaaatggctctttggtttttaaggaaaaaattttttaatcatgtgtgctgtgttttcaactttctgttcagttcccaacctataaacatgaaacagtagctcttttggttactatgtataccttctttcaatgttattctctctcccacacgtaagtttattttcagtatttgtttccagtgtttccagagtttccctgagttgtcacccttagaatggtcattttacttgatttgatattcagaagagtggccttctaagttccaaagtgtgtgagtgtatgcatgcatcgggtgtggggggaaagagagagagagagaaggagagagagagagagagggaggatggatggatgtgtgctcagataaatgcctgctgacagcaacacaaaaccctactctatgaatcttcaggccagtgaatgggtaggaaatgctctccagtttgaattgttcctacattttatgagcagagaagcaaatcctgtgaaagtatttcaagagctgccctcttagctgtccattgtcttggctcagaaagtcctaaggaagaatccttgtaaacttaacagacaggaattttggtttttactggagagctctgcttttctttatcgcatgtcatcagcatcaaatttttatttgttttgttgggttttctgttttgttgtagttgtcaaaattttctactgggataatttaggacgggcttgtctttatatttgtaaggagtaaaaatgcataacctggtctgtcttctttatgctaggtttgtccaatttgcttgctttcattttgtcaatgcagtcacctgctgtttttactcttcgctttcttcacattgtgaaacttcctaaatacatactatggacaaaaccaaagataaaaatgaatgaattgttaaacacattttcttatatgtctaactaaaaataatatatgcttagggtaaattcaaacagagcagtaagtttacaaaacaagaaataagtctcctttccagccttcctgactcctttgcttctcagatagaccatccttaagtttcctgcaaatggtttcaggaaattagaaaagaaatagttccagtatatataagcatactcttataatttctttagaaataaagatcacaatttattatgcttactgctgtataccttccagaaaatcaaatcatattatatatagtgttgtgcaccttgctccaaaaagttatttatgttagtaattaaggtacaacctaaagctcagtctacaagcaggacagaagataacatcttatagaggcctttaaaattgttgcaccaaaatgcagtgggagctattttctaactagaaccaccaaaaataatggaacaaaatgattagtaaaacaaagggaaataaacttccaaaccagtaaccaaatatggaaagggaaaaattccaagcaagatccagttaaaaagtccaaaggagaacgtgtgtgcacccagagaggacagagacactagcaccagctaagattcacagacaagtgcaaaggggtgctatttttaaaggagaccaaagaggaaataatgaccacaaataaaaagggaacatgtcaaacttctgggcaagtgctaaatttgaaaagagagaatggtgtttatgttttttaaaaaatgcactagagggctgggcgctgtgactcacgcctgtaatcccagcactttgggaggccaagacgggtggatcacctgaggtcaggagtttgaaaccagcctagccaacgtggtgaaaccctgtatctactaaaagtacaaaaagtagctgggcatggtggcatgcacctgtagtcccagctactcaggaggctgaggcatgagaatcacttgaacgtgggaggcggaggttgcaatgagctgagattgtgccactgcactccagcctgggcaacacagcaagattctgtctcaaaaaaaaaaattcactagatgcattttcaaataggaatggattttgatcagaagcagaactgacacaatggaataaacaataactcaagtatgcatttgtccaataactgaaacatgcagccatctatgtcataaaacattaaaattgtacctaagcatattggagacatgagattattgtactgtccatatagtgcttttggatccagaacaagtcaggttcttttgtgccgtgtgtttgtgtgtgtgtgtgtgtgtgtgtgtgtaaacgagtgaacatctatgccattttatctagatacagtacttcttcccaacctccattcatctctgttgttgttgctattgttcctcatatggccaaatgcaatttctccctgaaggtctaactccaaaattccttgcgccttctcttaattctttccaactcatcaattcctcaaagctgatgtctactgtatattatactctggtgcttttggtatattctttattctcttatggcacttactgagctgtactgttacaatttttccatgtatatctctctgtattgtgagcttgctggaggcagagacaacacatctttaggtcgttggtacctagagtactgcctggcacatttaatacttgattaagtagaattacataagctggaatttaatgtttatttgttttgtagcttcataaaattatataactttttagcaataaaaacctcaagacatatgtaaaattaatagtctcaaatgaatgcataatattactgctcctaaaactccctcctcctctttttaacagtggcctccctaagatataaggaaatataaagactggtctgccttataggattttaagaaattttccagatttcctgatgcctccttatatcctaaaagcacataagttcctcttgaattagtaagcattgattaaaaactcagatgagtcaaacaatacacccctcaaaagttgcttaatctagactagaacaaagcacgtattagtgtgttctcacgctgctgtaaaggactgcccaagactgggtaatttacaaaggaaagaggtttaattgactctcagtttcgcatggctggggaggcctcaggaaacttacaatcatggcagaaggggaagcaaacacattcttctttacttgatggccggaagcagaagtgccgagcaaaagcggggaaagccctttataaaatcatcagatctcataagagctcattcactatcatgagaaaagaaagcatggaggtaaccacttccatgattcaattacctgccaccgtgtctctcccacaacatgtggggattatgggaactacaattcaagatgagatttgggtggcgacacaaccaaaccgtattagcatgttagttgtaaaagttctactctctggagcagggaatctccagactttcccctcatggcctaatctctttgttactcaattgatataatagcaatctatatcccataatgagcaaaagtttattaagagagatgagacaatagagactgttttagtctatttctgttgctgtaacagaacacctgagactgggtaatttataaacaaaagaggtttacttggctcccagttctggagcctgggaagttcaacattgggcagctacctctggcaaggccctcatgctacattaaagcatagtgaatggcatcacatgtggaaacacctgcaggagcagcaagcaagtatgtgcaaaagagacaaaacacaagtgatggcctcattttttaacaacctgctcttgcagttactaatctagtcccatgagaacaagaactcatttgcttctgtgagaattaacccagtcctatgagaatgggactaatatcttcgtgagggtggcagagtcttcatgacccaaacacctcttaaaggtcctaccacctctcaacaccattatactgggaactcaatttcctatacatgaattctgaggaacacatttaaaccattgtagagcctgataaagtgatcttcatttccaaatcaaagatgattttcctaggtgttcttgtccagtatttttataggttggtgcaaaagtaactgcagttttagccgttacttttaatgattttgtgggatcttgacacttgctcattagcacttaaaaaattacccctggatccaggtgagtcattgtctctgccaagaatctcattcagcattaggcaaatgccaaaatcagatacatgtaagaatctcagctccattgtgctactgccacccaggacagctatctaaagatgctggcatgttcaaaaaacactgaatcagtgatcttcaaacttttttatattacatatcctacttcatttcttaaaagaggatatgtcctgacgtgtgttttaataaattgtaatatgtatttctgtatcaacatattaatcataaaacatataatacatagaataaatatcaaatgaatgagacaatggagaattaataatacactaacggggcagaaatgaagtggttatagccctatattatagtgttctataaagcctctataagtaaaataatgtgagattggtacatgaatagacagacaagccaatggaagagtatataaagtccggaaattatgccaacttcatttagaaatcacgtgtatgtgtgtatgtgtgtgtaaaatggtagcatttgaaaccatggagaatgcttaatcaatattgttacaactgggaaccatttgagggaaaaatggatcagaacctgatattctccatgagaattaatttcaaatggatcagagatctaaatgtaaataggtaaataaataaataaaaccatacctccccccgccaaaaaaaaaaaaaaaaaaaaaacaaagtatggatctgttcttctgtaaactggactataaatcaaatgagtgtctgcatggaaaaaataaaacaccctaaacaaatccaaagataaatgactaattgggaaaggatatttgtaagttacatctctgacagagtattatcactgatataaaaggaacccctaaaaattaaaatacaaatatcaaaattttataaatggcacacaaaaaacccagagttcccagaagaaaaatttaaatggttcttcaaatatgaagcttttctcagtataacttaaaatgcaaattagattgtcccaaagatagcacttcttcccttagcaaaatcacataaactcatccacatactctgttattgaagttgtatggaaataggcattctacatactgctgatggagctgtgagatgatacaactgctatggagcagcaatatgtagaaaaattctacatctagcctttgacccatcatattcagcaatatgtagaaaaattctatatttgccctttgacccatcaaccccgttactgggaacctgtgttaaagctgtagttgcaaaaacaggacatgctttatgcatggtgttatttcttttttatgcattgtattatttatttcacaactattataaaaatgattgaaaacaaatgcccatttataggggattggctaaataaataacacaatggtaggcactgtagcgatataaaggaatgatggtgatctctctgtactgtcatctccaaaatatagtaagtgaaaaaagtaagatgcagaacaatctagtgcaacatgctacattttgtgtatgacagaaacactggcaggttaaactgttaactaatgaaactattaacaataggtagaacaggaatggaacagacttctcttactatgtatagcttattacatagatttcattttgaaattttaaatgttttatttcaaaagataaaattcactaaaatagccttccctaaaaatggaaaacaaatggaaataaatgaacttactgagctgggcatggtggtttacacttgtaatccccatactttgggaggcccaggcaggaagattgcttaagaccaggagttcaagaccagcctaggccatataggaaggccacgcctctacaaaaaagaaaaataaataaaaattagctgggcatggtggcatgcctgtagtctcagctactcacgaggctgaggtgggaggtttgcttggtcctgggagatcgaggctgtggtgagctgtgattgtgctactgcactctagcgtgggtgacagagaaagatgctgtctctaaaagaaaaaaaaagaaataaggaaatgaacctactgtatatcaaattagtgatataaccacataaaggaaataattatttcaatctgaacctaaaaacataatattccaccaaacagtagaatatatcttaaggacaaaaatagctacaaatatgttttaaactttagtactttaaaataatgattttgttattttgacactatgttatattataggaaatacaaatcagtaattatactaatgtaaatagaaattaagatttttagtgtagaaaaaagagatatatgtataaagtttttaaaaattaagtacaggtcctataatgttctatctgatttggaaatgttctatttgaattgagtttgaactcacaatgctttcctcttttcaaagctgcttttcctatctgtctactaaaaaggcccagaagacatcacagcctgtatcaatcagctttgaagaagtaacagataaccttaaaaacctcagtagtttgccaccatatgcattatatatttggcttgtattccattttggtggctccagatcagctgctgagtcttttctctacaatcttctttttccaggactcaagctgaagcaattgaccctgtttggaacagactgtccttgtggcctagggaaaagcaaaggacaaagcttagctctgtccttaacagctctaaaagcttctacttaacatgatatgtgcccattggtcaaagcacatcacgtggccaaacgtggaactgggatggagaattgtgttctgcctgctgggaggccctagaaatcatacaataataaatgagaagggagttaggagttgaggataataatataaactattctacaaccccttgaaaatgagcatacttagcatatagactataatccctaaataccattccacactaacaatgactaggaaactttggagggacacctgactccagttttaaggttaggcaatttaagatgagcctgggacggtttgttgccctggtgtattagtctgttttcacactgctataaggaactgccagaaactgggtaatttatgaagaaaagaggtttaattgactcacagttcagtgtggctggggaggcctcagaaaacttaaaatcatggtagaaggcaaaggggaagcaaggcaccttcttcacaaagtggtggcaagaaggacaatgccaagtgaagggggaagagctctttataaaaccatcagatcttgtgagaactcactatcatgagaacagcatgagagaaactgccaccatgattgttacctctatctcgtctctccctttacacgtggggatgatggggattatggggattacaattcaagatgagatttgggtagggacacaaagcctaaccatatcacttagaaagcaaggtagctatcaaagactaatgagattgtgcccaaaggacaaaggaattaacctaaaaagtctttctttagccaaactggaggcaagatgagagtcaaaagagaaaacatatactgaatgcaattgatttaaatgtgttgaatttatttcaaaatgcattaattataaagatacaaaaaagaaaatcaataaaatgtttaaaagtcatcacactttggtcaccattagaattaactaggtcagttactccttaccctgatatttggcaatcaaaataaatacttatctttattctgctttcttttaggcatgtatgtgtaaccacatagccttaacttagaaggaaaagttcttctttatagaattcaagctaatgaatgtcaaagaaaatagataatgaaaaaataatagaatctaatcatcatttgcagcatgtaattgacttagggtatgattattaatggctaaaatcattagacaaaatgttgattggagctttacaatggaaggatcagtctgttatcacctgaaacactgattaatcttagcatcattgaaagtaggacaaccagggcaggtgctgtggctcacgcctgtaatcccagcactttgggaggctgagatgggtggattacttgaggtcaggagttgagaccagcctggccaacatggtgaaaccccctctctactaaaaatacaaaaattcgccaggtgtggtggctcgtgcctgtaatctcaactacttgggaggctgagacacaagaatcgcttgaacctgggaggcagaggttgcagtgagccaagactgtaccactgcactctagcctgggcaacagagtgagactttctctcaaaaaaaaaaaaaaaaaaaaaattggaagcacatagcactccctgtgtaatattcttgcccatccctccaaaaaaagaaaatgaccttcacttgaatgaagcctctcagcaagcgaactttcattacagaaggatagatgcacaaattaaatgacaccacaaggtagcacgtgcatgaactcagaaagtgggtttttctgcagaataactgaccaggtttctgcaacaagtcagtggcatgaaaggtaaaaacaaagggggagagaggaaagagcaggtcggtgctagatgaaacacatgcatctaaaggcctaagaagcaaatgtgatgctgacatgtagtgtgtatccagattcaaataagacatcagggaaatgtggctagatattaaattataacaaggaattatttttgttagttgttcaaatggtgttatagttatatgtctttaatctttagtggtgcttgctaaagtaataaagacaattatttgatatatatgatttgctttaatattcttcaataaagtaaatgtagtaaacatgataaaatctttataactttaatctggatgatgactatatggtgtttattgtttattgtctctatttttgtatatatttgaaaattttcttaataaaaaactatttaaatccataaaatagaaaaaagatagtaacatgataaatatactgaaattctatttttttttttttttttttttgtccttgaagccctctggtcttttttgtatgctccacttttcaccctataggtttaaagagaaaataaatagaacaaagtgaatttacttgaaatatttgaaacatcagctctttttttttttttttgagacggagtctcactctgtcacacaggctggagtgcagtggcgccatctcagctcagtgcaatctctgcttcccgggctcaagcgattctcctccctcagcctcccgagtagctgggattctaggcgtctgccactacgcccagctaattttttttttttttttttttttttttttagtagagacggggtttcaccctgttggccaggctggtctcgaactcttgacctcaggtgatccgcctgccttggcctcccaaattgctgggattacaggtgtgagccaccgtgcccagtcgaaacaccagctctcttaaatcctgtgccttaaccagggtagtcagtataagaaatgcaaattatgtttgaatagtcccttttaaaaagctatttatttagtctatttcccactaatagttttttttttttaatgccttttaaaaaaagagaaaagaaaaccaattcaaccctgtcatcagctagaactgcaagatcctgggttatacagcaaagtctgttagtaaatccactgcataggagctacattttttttttaatgatgtagcgtggacctttcagtgaatttcttttgaaagggactttaatattttattccctaaaatgttaaaatactcatcagatgaatgcatgccacattcatagactgatggcaagaaaaagtgaatataaaaaaagagttgattaaattcctaaaaatttaaaatgtttgtcttgcatttgtttagtggagactggttccatcaaggtcctcttgtccacccccaggctccttctaaacaagtaaagagaatacctgcagatatcttacatttgacacatcaactcaagcacatttcaaaattggccgtagtttctaaaatattcatttaatgttaaagttcttgtcattaataacttagtatcaagcttcctgtgagttcttcatatgatttaatttctcatagttcctttagccttgaagaccccaaatctataaggattctctagagaagatgccggttatgggaaaagaatggaagaagtagaggcatttagcagccacaatagaatagcctggggcctgtgtcagcagcatatgcacactgtcattgtagccatttgtgtcagaagctatttctgtgctggacaacactttctccaaatacactatgaatttatgagcaagggaatgtagatgttaatggaggaagaagtttcacttcacctcccactcctttgcgtcttaattttagagtggaagcaagattgcatcacagccctccatgggatatatattcagagtcctaataatttgaacaatcacatattatttgcttgtacaattatatatatgttcaactatttatatttggccacaagttaccaaaatttgctgagtaatgatgagaccaatcaagaccagcctttttcattatgtgggctagaatgtttaaggagatttatttctaattattagaaaatgaaaggacaaaacattttgggagtgggctattgcaacacttcttttatagagcagttatcccacttatatgaatattgaatacaaatgtttcttttcagagaacaatggacttagatctattttttttttcttttttgggatgggatctctctctgtcacccaggctagcgtgcagtggtgcaataatagcctgtgctaatttatttatttttttgtagagatgagttctcactatgttgtccaggttggtcttgaactcctgggctcaagtgatgcttctgcctccaactcccaaagtgctgggattacaggcgtaagccactgcaaccaacctgactttcatcttttacctaaaagagtattagtcacatcttctcttacaaggtgactcatggcaggttcaaaaggacagggttggtggacagaatcaccttcactttttaaactcattaattttatgaattatatttgtaatatgtatttgccagtggtacattattgaattcataagttaaatatccatgtgaaatgtctctactagatgttcaaaggacctccttatatctaaccacaaacgtcaaattttgttcacaaagaagcaaaaagtataatataaataaaatggaactagagttccaatgggctagattgagtcagttctgcccttagtaatcatatggttttagaaaagctaccttattgtatgagtcttttttccctcatttgttaaatgaaagggtttgatttaatgattatttgtattgtttataattgaacattttatgtttttaaatgggaaaatgtaccatattttagcctgttataataaaattatgttatatgtagctaagaacatgttttaaaattctaaactgcctcctttagaattctcattggttagaacagagcctgttttggaaggaagcaagaaaataggctccaaaaatgctggatattcataaagttgactgtatagcatgttataaactttttgtttgatgcagtaggcaacaggaagttgttgaaggttttgaagagtggaataatatatcaaaaaataatattggagataaacaataattttgccccttacatatagactagacttgggaagaaagggtaactgtaaggcaggccttaggtaatgagatccaggattaaactggaggctgtcaaaatcgtttaggaaaagtagaatccagaagacattgaaaatagaaattgataaaatgcagtgattgattaaatataggggacatcaaagaaatcaaaacagtaactccaaggttgtaaacttgtagaaccagagaaatcatggtatttaattgagaaggaattatttatatatatatatttcaggaagcaataaaatagccaactaaatgtgtctctaaagaccattggagagtggatgatcatgatctgtacctatcccctgtatttaagtggtaaaatggaaagagaaatgtataaccactctgggaaaaacatggagaagattagtaggaggcaaaaaactgaactctggaaaacatacttgtgaaagaatataaaagagcagagacaatgacaaaacaagtgcccagagtaataatggacaaccaacagaaccagtgtcatggaagctggggaggaattttgcaatgtcaattgttatctagaggtcaggaagaatgaagggaaaagatcagggtgaattgttgggtaacctgaggggattaaaaagtaaagaaaaaacaaaattagcatttgaatggaactttacaattgacaaaacactttcagaggaattattttacttaattctcatgttaacattactgtgagacccacaggactatttttattcacagtgtcataaatgagaaacacgggagcttagagtacttttaggacttattccaaggcaggacttagagttacttactcaaaatcccacattctttgctatctggaagacaaggataaaaagaacatgctggaaagtaccaaccaatagtatattttcagtgtccctgtctctcaccacatataaatgccttccatattcacaactcaaatcaaattcaaagcaatattaacctgaagggtaagccataagcctgtaataaatatttcatgttctgaaaatattatttaactaaatgggagaaatatccaaaaatgaacacattccatattggaaggggtttattatccaatttagtcatcctaacaacatcacagcagatcatttaaaatgaaaatagaaaacatcctcataattttctagcctttttttttttttgctgtaagttcatattaaaagaataacattaatattgtcttaagcaaagataagtattattatacgtcatgcatttcctaaatttcaattatgtgttatttttaaaattgctatgtgtgtctgatgataggacacaaggctgtgtttttccttccttttaaaataaataaataactcttttagctgatttctttggtgccattttgtaatttcttttgtctttcactacttcccaactttagtttccataggaacaggatcaatcggaaagcatttgggattctttcaaaatgttgagtccaagatttctaattagggttcaggcacttatagtttaattaatatgagactttttctgtgttttatttttgaaggtggaaaaaactgggttatgatttcataatatgtttgccttttcaaagatttttattagagatttggatcaaagagctttaagatcatttaaaaatgtgttaatacatgcctgaaaaaattaaatatattatgcatactattcttgacagataagaagacttaaaacaataattatcccagttaaatgcatcaaaattagttgaattatccttagctgaaaattgattctttgaaatataacataaacctagtgtcttctcctatacctcttttatagtttgttgttgttgtttttctgagatggaatctcactctgtcacccagagtgcagtggtgcggatctcggctcactgcaacctctgcgtcctgggttcaagcaactctcctgcctcagccttctgagtagctgggactacaggccacccccgaccatgctcagctaatttttttgtatttttagtagagacggggtttcactatgttggccaggctggtctcaaactcctgacctcaagtgatccgcccacctcagcctcccaaagcctgggattacaggcctgagccactgcacccagcccctcttatagttttattgtgagaacaagtatggtcaatggaaaataatgtagatgatagattttacttttaaaaaattaccattatggtcacattacgttagctgtataagacaaaaacatcctcagtttataaaaaaagcattcaactttctattaacagagagtgtgctcaaggaattaaatcaggaattatcaacaggaaggggattacttcccccagggggtactgtgaaattttatgggacctattccattgtcacaatgatgagtggttgctatatatttgctgagcagggaccaggcctcttaaacagcttgctgtgtgccagacagtcctgcaaaataaagaattttcctgagtccctcatttttcataactctccaaagtcctgctgcatgttcatataagtgaaaacttcataattatctgagcttatactgtaacttacactgttttacctataaacacaaatattcttttggacagtcttatcatataactaaatatacaaatttgtattctaatgctcacaataaccatatatatatatatatatatatattttttttttttttttttttttttttttttgagacagagtctcaccctgttgcccaggctggagtgtgatggcacagtctcagctcactgcaacctccacctcctgggttcaagtgattctcctgcctcagcctcctgagtagctgggattatagaaacttgccaccacgcccagctaatttttgtacttttagtagagacaggagtttcaccatgttggccagcctggaacccctgaccttaggtgatccgcccacctcggcctcccagaatgctgggattacaggcgtgagccactgcgtctggccaataaccctattcttatattcctgtactatttggaatggtttctgattttacttaaatcccatttaacattataagtgtacaccaggcatggtggctaatgcctgtaataccagcactttgggaggtggagacagaggatctcttgaggccaagagtttgagactagctggactgggcaacatggcaagattccatctctatgagagtaaacatttaagaaaatttgctaggcatggtggtgcatgcctatagtcctagctacttggaaggctgaagcaggaggatcccttgagcccagaggttcagtgttacagtgagctataatcatgccaccgcacaccagcctgggtgacagagcaagacattatctctaaaaaaagaaaaataaataaaaataagtgtagacttcattgtgtcttctagtgtactcacgtataagcatttatgaattaaaatatgtatttttttatttctctttaacattaaagggacattacattatttcccaaattttacatatatataaattttatgtatataaattatatgtttgtatatgtaatgtttattatctataaatttcatttcaggataataaaggaggcatcaaaatttattataaaatgagggtctgatagtgttaagaaccaataaattaaaataaatgaatgcaaattacatgtatttcatcactgcactaaattcttaggtttgtggtggttgaaaacaaaattatatactctatttttagggaaacagtttttccctttccaagattcatttttagctaacatgagcaaaaaatttaaatgggagaaaaatgttaaaaaataattgcagaacatgctgcagaataaccgtggatatgtatagatgtgggtgtgtttcattaaaatctatttaagtattttttttcctttatatgtagttaaggtaaggatagtttttgagttattcggtgtcaaaattacttttggatttttgtgcaaacaggctataaacctgtaacattatcaaaaatgtcaacatatagataaaacttaatacttttttttattttatttatatattttgagaagatgtctcactcctgtcaccccagctggagtgcagtgatacaataaaattcactgcagcctcaacctccttggctcaagccatccctcccacctcagcctcccgagtagctgagactataggctcatgccaccatgcctggctagtttttgtttttgttgtgtagagacagggtcttgctatgttgcccaagccactcttgaagccctgggctcaaacagtcctccagcctcagcctcccagagtgctaggattacaggcgtgagcactgtgaccggccttatttttatattttatttttttgagacatggtcccactctgtcacccaggctagagtgcagtgacgtgatcatagctcactgtagcctcaacctcctgggcttaagtgatcctcctgtctcagcctcttgagtatctgggataggaggtgtgagccaccgcacctggctatacttagtttttaatttaactggtattgtctgttggtctcatagcctaagtattgcaatacattaaacaatagacagttaatactatatttaagtatattttatattatatgtaaatatagcttatactattcttaaaatacagtacaagaagtttatacatttgatttgaagacaaaatatgtccacttttgtttataacagacatttaattacttcctattgtgggttaagtatgatgtagacacaatcttgtatcaaatagttccaacatcatgctcctaacactatccaatgggaggatcagacatgtaaaacatcctaattttttaaaagtcttataaaaagtactatgtcagatagagaaggtttgactctgtatgggaggacagaaggggccagcgaaagctttacttttcttgacagttaagtcaggtgttaaataacatagaagttcatcattcggcaggggagtgttggagagaggggattccaggcagagggcttggagaatgcagagagccagagtgtctgggaactccaccatgggtgccttgaacatagggtttgtaaggggcagtagtcaaaggaaggctggaaagatgggagcctgttccgaaaggccatttgaaggaacctggaattcatcttgaaggtaacaggaggcctctgaaggaagctaaatatcagatagtattttaaggctctaacccatgtaagagtaaggaggatgaactgcaaacttgtccacatctatattcatccttgtcaatttccctcctgaatcaaaggaagagggttgctatggtttgaatatttgttcccttcaagactcatgttgaaacataatccctaatgtagcagtattaagaggtagggcctttaagaagtgatcgattcatgaggactctgccttcatgaatggattaacccattcatagattaacaatttaaggaattaatgagttatcataggagcgggactggtggctttataaggaaaggaagagagaactgagctagcactcttgcacactgagcccgctcaccctgtgatgccctgtaccacctagggactcttcagagagtccccaccagcaagaagaccctcatcagatgtgacccctctaccttggacttctcagccttcataactgtaagaaataaattccttttctttataaattaccccatttcaggtattccattatcagcaacagaaaacagatgaagataaggggtctctcctacccaaagctaatttcacacctgtgtgcatgatcctatttttccagtctcttgtattctttgttgcagcaattaatctcctctctctgtcatgtatcttcaacttatcttcattactagttctcttaccacaggctataaatatgctcaaatctctacaacttaatgtaggaaagaaccccactatgattctccaaggaaacttcttgaaacagtgacatatatttattatgtcaattttcttactgaccattcagctcactgcacattgcctgtttcccatgccattgaaattactatcattgtatcgccaataatttactagttcctaagtccatggcttgctttatttatttattttttattttacttatttattttttttttgagacagagtctttctctgtttcccaggcgggagtgcagtggcgtgatctcggctcaccacaacctccacttcctgagttcaagtgattgtcctgcctcagcctcccgagtagctggggctataggcgcacgccatcatgcccagctaatttttgtattttttgtagagatggggtttcactgtgttggccaggctggtctcgacctcctggccttgtgatctgcccacctcggcctcccaaagtgctgggattacaggcgtcagccactgcgcccagcccatggcttgctttttaagtcaaaaccttacttgacctttctagaacatcgaacattgttgacactccctctttgaaagtctgccattccgtgatttccatgacatcattctgtcctagtttctcttatttctccaattgcctcttctcaatctcttacatggtttcctcttggactttttctctcttattctactccagtgtttcctgctctaaattatattcctccctagagagtcacagtgctccttagcatgttagaggctccaataagtccttttatacaatggagaactttgtttaacttgttaacccagtctttctcaacccagtgtttctttatcaccatggaatctgtatccctttgtgaaacactaaatgtcaatggccagtctgagggagaagatgcaggaaaagaacgtgaaagaagagaatagtgtcacaatagccacaaaatgtgacaaatcataaaatgctacttaatttcatcaacatagattgaagagaaaagttctatgggttgtctagagtgttgcctagggctttaacaggaaaacttcctagaggtggtgagacttaagaggggtcttgagggttggagaaaattgtaatagggaggagacagcactcccacccatgcctgtacctcctctctgagtgagggctgtacaagggataagaaaggctacatgaacatctcctttgtccttgacatgcctctgaagatggtattaaggtttaaaggcaagtgcttgattatgtaaggttgttttagatcagcattctcagaacaaaatagactatggaacactttttaaaagactgtattgccagacctccaaaggaactcctaaggtacaatgctcactagttttaagtaggcactcaaattaatttaccactataattcattatgatgcttgtattagggttgtccagacaagtagaaccaacaagacatgtgtgtatgtgtgtgcatgtatgtacatatatgtatataaagagacttgttttaaggaattggttcatgtgattatggaggcaagcaagctacagacccaggaattgccaaggctgcagttcaagtccaaaggctatctgctggcagaattccctcctgcttgagagaagtcagtcttttgttcaatttaggccttcaattgaccggatgagacccaccaacattacggagggcaacatgctttaccgatttaaatgttaatctcacgccacacacagtggctcacgtctgtaatcccagcactttgggaggccgaggcgggtggattacttgaggtcaggagttcgagagcagcttggcaaacatggcaaaatcccatctctactaaaatgcaaaaatgagccaggcgtggtggtgcatgcctgtggttccagctactcgggaggctgaggcaggagaatcgcttgaacccaggaggctgaggttgcagtttgctgagattgcgccattgcactccagcccgggtgatagagtgagacaccatctcaaaaataataataataataaaatgttaatctcatccaacaacaccctcacagaaacatccagaatgtttgaccacatatctgagcatcattgcctagccaagttgacaggtaaaattaactatcacaatgctattttcaattgtatatcaacattttaaaaaagcaaataattttaaaaaattgctcaccttgtgttattaaatttagaatgctttattaagcttattttgattttatagtaatagagatttttaaaaattacattgttacggcttttattattattattattattattatttgagaaggagtcttgctcagtcacccatgctggagtgcaatggcgcgatctctgctcactgcaacctctgcctcccgggttcaagctattctcctgcctcagcctcctgagtcgctgggattacaggcacccgccaccacacccggctaagttttgtatttttagtagagacagggtttcgccatgttggccaggctatttttttatttttttgagacaaggtcttgctctgtctcccaggctggaatgcagtggcgagatcacagctcactgcagccttgacctcttgggctcgagtgatcctcccacctcatcctcctgaggagctgggacaacaggagcacataccatgcccagctaacttgtttattttttgtaaagataggatctcactgtgttgcccagactggtctcaaactcctcaagtgatcctcccacctccatctctcaaatgctgggattacaggcatgagccattgcacctggtagttgtggcttttaaaatctccttttaagttactatctagaaaaatattttaggaattgactctatcattttaagcatcaaatatattcatgtaattttttgttgcagcataatgtgaaaattgtttctgcacagtaatgtcttttgtgtcagaattggctacttcaaaatcttttgttctttaatcccgggcagttatctcttaattaaaaaaattaaagtggtatattcattatatcatagtctccccttatccacagttttcctttttgcaattttacccgtggccaaccacagtcgaaaaatactaaatgaaaagttcaagaaataaacaattcacctgggatgggaatcatccctttgtctggtgtattcatgctgtagaagctacccacctgttagtcactgatattgcctgttcctgtcatccaatcagtgacatcgttgtggctgaatgattcgggatcacttgaagcagatgattctccttctgatgtattgtcagaaggtcaatagtagcctaatgctacctcacgatgcctgttacccacctcattttatctcatcacgtcggcattttatctcttacattattacaagaagggtgaatacagtagaataagatattttgagagagacgtcattcacataattcttattcagcatattgttataattgttctattattcttgttattaatcttgtactgtgcctaacttataaattaaactttatcataagtatgtttgtatagggaaaaacagagtgtatatagggtttggtactatccatggcttcagacatccactgggggtcttggaacgtatctctcatgaattaggggggactagtgtgttccattccatcttctccataattcacttcacttccattcattcagcaaatatttactgagtaccatatggcaagcattgttcttcgcccttgggattattaacaaaaattagtagccaaaataaagggccccaccttcagtacataaacacatatataatgcattagaagataataatgctattttcaattgtatatcgtttgaaaatatgaaaaaagaaaaagaaaagcaggatcaaaggaatcaggaatgtcgaaggggaaaggtgagctgaaggtgagctgaaatatttaatagagagatcagaggagattttattaaggaggtgtcctttgagcaaagacttgaagaagtgagggagttaatagacatctaaaggaagagtctttcagatggaggaaacagccagagtctggcctgattgaggatgaacaaggaagccagtgtccctggagcagagggagggaagagtcaagaaaaggaggttcgaaagcaatgggccactttgcataggaccttctatgccaatgaaagaacttccccttctactctggggaaatgaagaaccagtccaaggttttgagcagaagagtgccatgatctgacttagcattttaaagggtcactctagtggatgtgttgagattagattccagaaaggcaggacagaagcaggacagtcaggaggctattgtagcaatccaagaaagagatgttagtgctcagaccacagtagtagctatgggaggagtgagaagtggtcagattcggaatgcattttgaaggtaaagtcagtaggttttgctaatgaataggaatgggctgtgatacgtgggatcactaaagataaatgccagatttttctcaaccagagcaatggaataattgagttgccatcatctgaggtggagaaggtggaacaggtttagaaagaaagatgatatttggatgtagagtttgaaatgtctcataaactttcaggtgataggcatttggatctgaagttcagcaaagatgtccagaatggaaatatgtatttgggagtgtttagcatgtcagagtgtttaatgccaggaatctggatcacatcattaaagaaggaaatacagatagagaagtagatttgaccaaggatgggagccatgagaagaaaaactaggaaagtgtgttgtcctggacgttaagtgtagaaagcgtgttaagaagaagggtgtgatggattgtgtcaattgaggtagttatggaaggcatcatcataaattatgttttacagaggacgagacacagccaaagaggttttaactatccaaaacatatcatagcaaggacaaaaaaggaggaagaatttaaacccagggcttttccactgtaatgaaatagtcattacctttaaaaaggtaggggaggccaggtgtggtggcttacacctataatcccagcattttgggaggctgaagcaagcagatcacttgagcccacaagtttgagaccagcttgggcaacacggtgaaaccccatttctacaaaaaatagaaaaattagccagacatgttggctaacagctgtggtccagctactcggaaggctgaggtgggggatcacctgagcccggggaggttgaggctgcagtgacccatgattgcgcgcctgcactccagcctgggcaacagagtgaaaccctgtctcaaaaaaaagaaaaaaaagaaaaaaagaaaaaaaaagaagatgggggaaaagtataaccctaacaattcatttttcatagaacatcctcatacgcgattattgtagaatcatttgtgaaatgttctatctgcgtcaccacattggataaaaagcaatgtgaagtgaggggagagggatgagaagcaagtatttatagagaatctactgtgtgccaagaggtaggctaagcaattatgtacatgattttatttcatctttacaaccagctagggaaggcattactagcttcattttacttaaactgaggctgtagcttatccaaggtgacgtggctagtaattcacagcactgggtttcaaatactgggttatgacttcctaaagacagaatgattctgtttccatctataatgaagactaagacttaagttgcatttctctaatagactactcttttcttaccttgctagactctaatgttgtcttttatttaattttagatgatacttactcaaaaagccaagctgctgaaaataatagtggtagaatacaatttagttctttatcccaatgggggtaaagtcagttctgataccaccttattaagactaagtgctaagattatgtgctaaggctgactctaaataatttcaaaacttttggtagattctgtcataaatccagttctcttcatgctatgacaaacatcaaacagccatttcacttgagttatattacgacaattagacttttgcctaccatatctggacacaaatacctttgttcttctttccaatactcaatttgaaagagtttcaaaaatttgaccttggctgcgcatggtggctcatgcttataatcccagcactttgggaggccgaggtaggtaggtcccttgagcccagagtttcgagaccagcctgggcaacgtaaagagaccctgtctctacaaaaaacacaaaaattagccaggcatggtggtatgtgcccacagtcccagctactcaggattgctgaggtgcagtgatcgctggagccccgggagatcaaggctgcagtgaactatgatcacgccactgcactccagcctgggtggcagagcaagaccctgtgtcaaaatttaaaaaaaaaaaaattgacctttatccaatagcacaaaaactcatttcctgaccattctaggaagcagctccaaaggtcccactgattttaatgtgtgcagatattcactaaattatttattttattggtctagttcactgatcctaaaaaagtgcgtgttggtgttagctcacagttggatgtgtaggactagttttgaactaaaaaagtcagagaactgtttttaccaaaagaaaagggaaattgtggttcctggatttacaggacccaagaaatcagggtagctaattcttaggaatcttgcctgacaattgtgaatatgacagttaagcaatgccaaaccattgtttccatgttctgcacttcaaaataaatggttcttgttttttggcttcctgaggactaatcaaaggaagcatgaagcaacaatggctgggaagtttcccttggttttcaaatttcttctgtaagcacttgtggtaatagaatttaattaataacacttgtatgtaatgtaagggccaagattttatgagtcatcttccagcaggaaagttgaaaaataaaattcacacagctctcatattttaagaaatgaagtttgatagaaagtgtgcatgctaaatcattggccatataaaatctctagtattttaaaggctgaatatcagatcatggtccgtggagaccatttctttctcccagctttgtgggtggtaaaatcgagaaagcttagtaaactcattaataagtagaagcccaaaattatgtggagtgggatattagttccctgtgtaagaaaaataatacaaaaaaatgcttattcttgcaaattttacaaaatgtgcatgcattgctaagccttccccacccaccctcacttgggccttggtaagtactcttgtaagggttggtcccaaaacttaagccttattaaactcatggtcaacctgtatccctttatgtgcctatttattatatacaacctattttagaaaaagattatctttttctttattttttttttctttgagacagagtcttgctctgtcacccaggctggagtgcagtggcacaatctcagcccactgcaacctccacctcccaggttcaagtgagtctcctgcctcagcctcctgagttgctaggactacaggcgtgcaccaccacacctggctaattttttgtatttttttagtagagatggggtttcaccatgttggccaggctggtctcgaactcctgacctcaagcaatctgctggccttggcctctcaaagtgctgggattacaggcatgagccactgcgcccagcagaaaaggattctctttgtttgagaaatgctaagataacctcatttgcagattatacatttaacagattggtgatattagagaatccttttgatctctttttatgctaatctctgccaaacacattaaactgttagtgattgtggaaattcactcagtaaagcagagaagtaaaactacaaagatataaaggaagtttgaaacaataccaaacatctacgtagcgtgggaggtggagagagtttagtagatggtagtgatgtatcttgtcacatacattgtttaagcagctatttttctttttctttctttctttttttttttgttgaggtggggtcttgctgtgttgcccaagcttgtctcaaactcctgggctcaagcaatactcccaaatcagcctcccaagtaactgggattacaggtgcatgccaccacatccaggtggtttagtaagtaacaaatacctgtggaataattatttctctatccctgacccaaacagcccctgagaaatctgggtgtgtatcagctgttagggtgttttgtgcagagatgcacagattctcacagaatttcagaaccagagttcaaatccaggttcagagactcagttttaaccacttgcccagagctgatcaaactctggagaaatgatttacaatacctaatcttaaaaatgatttatttgacaagtaaatgagtaagtatatttctagtgagaaatagaactgccaaatgctggcagtggttctgtacttttaatctttaaaagctgtatctaggtctaggagttaggtaactacaatttcagattaaagagcaatgaataatcctaatttatatagctctcaaagtctgatgcaccatctctgctgtagaggtgcgcctatacacaacgcagaccatgtctcattagtaaggagggcacccaggcttgttgttctttctctctttgccattacgccaagtgtctgttttgatgtctgacatctttcatattcttctactatccactaatgaagtgttagggccatcgttttgttttctggtaacttactcttaaggagaagcaattagaacacagaatggccaataaccatggcttccactgagtatgtggctcttattagcatccattttggaaggggtatttccttattttgtcttgatagtctactagatttgaattgactgttgccgtctatctaaaatctatagttaatgtcacaggtaaatgaattgtgtttggctgagattgtcacttggggaaaatcaaagactacagaatcctaaaatggcttcttcatgtctgatgaggagtgcctggtgagacattcagccactgatggttttcctgtaccactggctaccattacacaattgaacatgtgcaggacaattttttttgaaatttttgggaatttattttacttcgagaagttaatttaattacttcatctctttctaatatcactgaaaaattttaatctagttgtttgtgcaatggaatgccctggaagttttcctgaacttagtaatgcatgtaacttatatgaaaataactttatcctcaattctgaatcatcagtagtccctcttatacttaagttgtcgaagaaccagaaaagggagagggcataaaacttttgtgcataaatatacacggtttattcaaattagttcattcaccataaacgtttactcattaacactgtctctgttaagatggaaatttgtagtatactctctgaataatatctttacaaccctaaaggttgaaaatggctatgaagccattacagtgtgtctggcggtcttatgtctggagctactttctcataatgccttgtactgatttgagggcagggagagaggaaaggggactgtggagcagactaagcagatggacatcttggcttccctgctttctaaaacactgtgacctccagcaacttatttaactactctcaattgtcatatctcttgatatggtttggctgtgtccccacccaaatctcatcttgaattgtagctcctgtaattcccacatgctgtgggagggacctggtgggagataagtgaatcatgagggcagtttcccccatactgttttcattgtagtgaataagtctcacgcgatctgatggttttataaggggtttccccttttgcttggctctcattctctcttgactgccgccatgtaagatgtgccttttgccttccaccataattgtgaggcctccccagccacatggaactgtgagtccattaaacctctttcctttataagttacgcagtcttggccaggtgcagtggctcacgcctataatccaagcactttgggaggcctaggtaggtggatcacctgaagtcaggagttcgagaccagcctggccaacatcatgaaaccccatctctactaaaaaatacaaacattagccaggtgtggtggcacgtgcctgtgatcccagctactcaggaggctggggcatgagaatcacttgaacctgggaggtggaggttgcagtgagctgagatcgtgctactacactctaccctcggtgacagagcgagactctgcctcaaaaaataaaataaaataaaaaataaaaaataaataaattgcccagtctcagcagtgtgagaacagactaatatatctgtcaaatgaggattttagtgcagtggagtcatttcttacttagaagttaggttcttaaggggagaatttattcatagtgaaaattatccttaaattcctaagatgatcataaactgaccaggacatcagccaccagtaactctaaagtcaagtgtgtcttttctttctccttgcattttggtgtggcttccctttctctgaaaataggataccaatgtctcattaagaggaagggccagattgtctagttcgagagactgtaaagacatgtgtctgcctctttttctttctcccctactctctaaatctagtatggttagacgataatgagatagatgaccataatatctagctccaaattagttcctacctcattgggttactttctattaatatacatatttatccataataaatactgggtggcattattttatttgtcaatgccaaccctgtgcaactttttatatttgttagtatatgtgctaatctgttctcccactgctataaataaataaatacctgaaactgtgtaatttataaagacaagaggttgaactggctcacggttctgcaggctgtacaggaagcatagtggcttctgcttctggggaggcctcaggaagcttccaatcatggaggaaggcgaagggggcacaggcgtctcacatggtgtgacaggcatctcacatggtgtgagctagagcaagagagaaagtggggaggtgctacacactttttggccaggcgcggtggcttacacctgtaatcctagcactttgagaaactgaggtgggcagatcacttgagaccagcagtttgagaccaccctggccaacatggtgaaaccccatctccactattagtacaaaaattcacaggacatggtggctcatgcttgtagtcccagctactcgggaggccgaagcacgaaaaccagttgagcccgggaagcagaggttgcagtgagccaagatggcgccattgcactctagccttggtgacagagggaaactctgtctcagaaaaagaaagagagagaggagagagagagaaagagagagagagaggaaggaggggaaggaaggaaggaaggagggaaggaaggaaggaaggaaggaaagaaggaaggaaggagggagggagggagggaaggagggaaagaagggaggaagggaggaagggctacacacttttaaacaaccagatctcaggagagctcgctcactatcatgacaacagttccaaggggattgtgttaagccattcatgagaaactgctcccatgatcccatcaccccccaccagcccgacttccagcattaggaattacaactgaacatgagatttgggtgggacacagatctaaaccatatcagtataataattgtctttcagtaactatcaaaaccacatggccataaatttttatttttatgaaacttatgatataactgatatccatactttttataatttgcttttatacatgataatgtgatactatacatttaaaacaaacaaaaaacttcaggccgggtgcagtggctcacgtctgtaatcctaccactttgagaggccaaggtgggcagatcacttgaggtcaggagtttgagaccagcctggccaacatggtgaaaccccgtctctactaaaaatacaaaaattagccaggtgtggtggcacatgcctgtagtcccagctacttgggaggctgaggcaggagaatcacttgaacccaggaggtagaggttgcagtaagccaagatcacgccactgcactccagcctgggtgacacagagagactcgtctcaaaaaaaaaaaaaaaaagaaaaagaaaaaaaaaaaacaacttatgtaacacttctccagtttttcctagtcatgttttcaattaaaagtgttaatttaaataacacctttatagtaattttaaaattgtcataatataaagtatatattcttagtcaaaccagactatcttagatgagtaatagagaatacaaaaacttttgtttttaaagttgggaggaaaagaaacacaaaaggtttcatttgactgggaattatttgacttggagttgttagcagttatgaaaataatcatctcttcaccttattttatgaacttctgccagtgcttttggaacatgttcataactgttaaagatgttctgaggctaactttaagacaattgttgacctcaaccagcaggcctacatgaccattttcttttgtttattttcctatttaatttgttctggaaaagtgaagaaaaaataaaaatcacttcaagaatgcagccaacaggggctatacctaacatctgctagtgatatgctgatataaaatccaacattttgtttttataaaaagagttattaggtacaagttttgtaaaaaggaactctaagactagaaaggctaaaacaaggtagaaatcttataaatttttttaatttaaagattcagagctttctgttcaaataagttccacataagtgaccatacattttaaatatttttacttaatttgttggtaaaccctgaagtaaatagaattagaggaagaaaggtagctagaaggagaagatacttaaaatcacaaaaataggtacaatgtatgtttggatgacggctacactaaaagcccagacttcaccactacacaatatacccatgtaacaaaattgcacttgtgccccttaaatttatacacacaaaaagaaaaaaaaaaggaaataaatattcagctactaagaaatactaccgataattaatttattaaagctaattccctttataattttttgcctacataattttgccaattcaactaatcctcttttttaacatctgtgatacatcgtttttctgttcaaatattaatatacacataaaaaatgtacaagggaattaacaaaattcctgaagctaacagctgttatttttcacagaaattttatagtaatttttgacaatttaagaaatgtttcttaaaggaaattttaacaagtagaaaactgtaattgagaaagagaaaatgattttctttctcaatgattcctgaaacccagttcctaaatcttataatctcagagtgtactaaagtttgcctgaaatgaaggaaggccagaacctactgaagaaaataaacattctcagtaggcagtgtgatgtttgaaaagttcaaaggtatgatgatacagagggaacaaagattatctttccctattttgccccgaggttttcctcgactggttttcagggaatttgagtcttcattgttttctctaaaaagtgtaataaaatatttcagaaatcacaagaattgtcagtcataagtagagtttctccgagggcattaattcacacagtgttaaaggagacaaacagactttttcaaagtatactttgaaagtttcacagaacaatggtttggcattggaatcactggcaaaaatgttcagagattttgtcatcaaaaataggagtaggccaggcgcggtggcactttggcaggccgaggcaggtggatcacttgaggtcaggagtttgagaacagccatggtgaaaccctgtctctactaaaaatacaaaaattagccgggtgtggtgacgcatgcctgtaatcccagctactcaggaggctgaggcatgagaatcatttgaactcaggaggtggaggttgcagtgagccgagattgcaccattgcactccagcctgggcaatagagcgagactcagtctcaaaaatttaaaaaataaaaaataaataaaagtaggagtaaagcaacaaggtaggtcccgtcttccctacctcactgaagaggattctggcttggtctcctgtctcattccttcctctgctctctgaagattcagactctatctttggagtctataacatgtgggaagcagaagagaagctaggaaataaaggaatgcaggagaagaaagggatatgggggaagagaaaagaaagaacagctgctatgtgatcaaagtgtgtggaaaaggatatttaaaaagattgcatggacccctttcatggttcttgaaatatacaagcaaaagagttcttttgaaatgactccctggtggacttgacacctctctaagattgagccacatgggtcactgctttctacagacatatttacagctgtcaatagaaaggatcagttcagtcctgtactcttcacatagacaccacgtttgccagtttccctattgaatatgtttgccatttagagctattgaacctgcatatcactggttttcctgttatactagaaatctagtaatttgtgtcccacagacttttgcaaattaaaaaaatatatattttgagtcactgtgttgcccagtctggagtgcagtggtgcgatcatagctcactgcagcttcaaacgcctgtgctcaagtgatcctcctgcctcagcctcccaagtagctgggactacaggcaggtgctaccacacccagataatttttaaaaattttttgtagagatgggggatgttactatgttgcccaggctggtcttaaactcctggcctcaagtgatcctccttccttggcctctcaaagtagttctgcaaattttaacttcacaattagatttgctgtccaggcttttaagggaaaaaagaaattctccagaatagcgtgtgctccttaagagtgataaaatctagcacaatggaagactaatttacatgttgatatatagagatgaataaatcaaagaagagttgtcatgtcatatgaaagatttctctctcctttccaggagtataatcaattctctttcatagttacacaattctgattttatacaaacttttcaaaatcctagaattcatggttctttgccattctttatagtctattggtttattcctgttcctggttgttcaaactggtctaagtctagagcaatggttctcaaccaggagtgatttctttacacccatctctcaggggacatttactatttagggacatttttagttgtcatcacttgggggcatggtgataccggcatctagtgggtagaagccagggatactgcaaaacatcctacagtgcacaggacagccccctacaacaaagaatgattgagtgccagatatcactagtgtcaagatgaagaaaccctcacctagacctcccctctggggttacgttggtgtcctactttcctagatcagcctcttagcttccaccttccttttgtgcttcagagccagtcttttgccttcattctaaccaccaatttctcaaactctcctgtcttcattagaccaatgaaactttccacctggaatctttgttaatctgcaatccttgctagtgttcagcttgcggggatcacggtgtgggcctagtatagcacagtaattaactatgtgggcttcaggtactgactgagtccaaagccaaatgccaccgcttacttcttctatgatcatggccatgtttcttactctctttgtgcctcagttttcccaccctcaaaaatgtgagtacaaatggtaccctgccacagagaattgtaagagtcaaatgagttaatacttgtaaagcgccaagtgcttaataaatgttagctattattatcctttctcaagggtccatcaaggtccttgtcctctaagttacttccttctctgtactctaagtctggaaagcaggtgtaatttactcatgatggtttctcttaaatgtttgcctaaattgtgaatgttttccattaatctaatggctaggacttttgatgtggaaaggcagaacataccctatttttctctctcaggtttggctgtccatatctcttccctgagcactttgtggcataaaggtgagagatgggaaagagatggaaggaaaaatacttcagaacattttcatggatgactcacaattcttagtctgcagatggaagctgatgaatgaagggatgagaggatgggtgcatcatgggcagcacctaagtttctggtgtgagtggccacatggaatgtgatgctttacatagagatgggatttgtaaaaataagacaaagtttgggggcaagctgatcagttttgcctatgagtttgtggtaattgtgggaaatggaaatacagatgtccagcagaaagctgggcttacaaatttaatttcaagagacagattggagctggagatgtggagttatgactttttagcaaataaatgctagttgggtcaatgagagtacaaaatactccataaaaaggaggtagtttagtcagaaaagcagtttctggatggatggatggatggatggatgacgatcgatggatggatggatggatgggcagaacaaggaggaggaagaagaactcacaaagcagacagaatgaagcaccaggatcagaacagaaggatgaagactaggagagaatcaagttacagaatacaagggagtcaacagagtcacatgtcatagagaggtcaggtaagatacagactgaaaagtgtccgttagatatgccaacagataggtcattttcgtcttggtgaaaacagggtcagtagaccacaggaagacagagaacagatggtagcatgagtggagaaatagcatttcaagtaaactatagaaatatatagtcgagaaataaccttctttagattttcatgataggcttaattcattcttacatcatgtataattttttgggtgaataacgaaggacagcagttggattgttttgcctaaattgtctacttgagatgaccaatgtatttgttctcactctgctaataaagacatacccgagactgggtacttcataaaggaaagaggtttaattgactcacagttcagcatggctggggaggcctcaggaaacttacaatcgtggcagaaggggaagcaaatacatcctttttcacatggcagcagcaaggagaagtgcagagtgaaggtggggaaaagccccttataaaaccatcagatctcgtgagaactcactcactgtcacgagaacagcatggttcaattacctcccaccaggttcctcccacaacacatggggattatggaaactacagttcaagatgagatttgagtggggacacagccaaaccatatcaaccaacaataatgctttgcattattctgagtttgaaacaattaataccaatccaatattgtatacttacaatactttccccaaagaattgcttgcctggccgggcacagtggctcacgcctgtaatcccagcactttgggaggctgaggtgggtggatcaggaggtcaggagatccagaccatcctggccaacatggtgaaaccctgtctgtactaaaaatacaaaaaattagccgggcgtcgtggcgggcgcctgtagtcccagctactcccaaggctgaggcaggagaatggcgtgaacccgggaggcggagctggtagtgagctgagattgtgccactgcactccagcctgggtgacagagcgagactccgtctcaaaaaaaagaaaaaaagaattgcttgccttcaggaactcttccttagtatcagtttgatccgacctcatttactggacttttctcattagtatacaataaggaatgggctcatttattcaacaaacatttattgtgtcttgctttatgccaggcactgttctgagtgtttgcgttaatttcagagactataacaggcgacagacttgcacttgtagcatttatattttagatatgtatacttataggaaagtatttaaattatttttaaacgtggtcattacactggagtatagaatgacatccataaagaaagtgatgtagatcaaagacggaattagaaagttatattgatactttctgatactttcttctttagtactaataatgcctaccacaccaggttattttgaatattgaattttacagcataaaagcaagtatgtgaaggtgaaatgggagagttccctgatccccctcgcaggacgtgcgacaggggtgtggctcacctgttctgtagccaccgctgcttgaatccctgaggggaggggcagcatgcagacagacagctgcaggagcccatgtgggtgtgtgttacaatgtgcccttttagccttgccatccacagatggcctgagtgttaaccagctaaacggaccctctgccttttcgcatgggccgagggccagtgtgacagctttctgtatcctgagctcttgcccagcatcccagaaaaatcgggtcacacacggggttgaaggatgaatgcagggttttattgagtggtggaggtagctttcagcaggatggatggggagctggaagaagggatggagtgggaagatggtcttttcctggagtttggccatccagaggccgaatacttctctgaccacccccagtcgaactcctctcggtgttcagacgtctctcctcatctatctttctttgccctgttgttccgccatttgtctgcttgtctcctcatctcctcgcctgctcatctgcttctagaacctgggatttggggtttatataggtacaggacaggggcatggtgggacaaaaggcaacttttggggcatgaaaacaggaatgcctgtcccctttgagggtcacgggtctccaggcctgagggtggggcctttgccagggaactgccttcttctacccagtacttcctgtctcctatctgtatcaaaggtgcctttttaaatgaaaatttctgtgttagtttaagggagtgataataagcaacagcagcgtcatgtaactattagatcacagtagtggtagccaccacagtcagttacttcagtctatagaccggctctcaaaaatcattgaaatgttttggggaaaaaaataaagatgttctgcttgaatttttcatcataatttcatatacagcttatatacatttattatatatatatacaaatttcatcaaaagtatgtaaaatgactcatttctatatgacatgggtattgtcaaggataaattcataaagctatttatacttttaaataagcctaaagagaattagcttttatttgtggggcaataccgtgtgacactagattgcatattaagctgaattaaggatgtaagttatttttcaatgatcgggctggcaggagtgtgttgtctggggtggggtccaaatagatgcatggattctactttggaaaatgcttaaaggccaaagctacaatctagaaaataaacatgtatagtttcatttgctttttcctattttgatcctttaaaactatgtgttatgaattgggtaaacttgtcaccaaactttaggacagttttcttgactattgcatcccattcagacatttgaaaatgaacttttgtataattttaattatcctatctgttttaatctttcagatcataaggcctatgggttttctgccccaaaagaccaacaagtagtcacagcagtagagtaccaaggtacagtatcttactgattttcacaggctgtattgtttaaataactcacgagagtgactcgtgtgatgttattttctatttgttgggattctctgccttaccttctactaattcctctgcctgaaatgctgcttcatgctgactccacctcaagaacatttactccacctcctcagtggaaattttcgatattcaataaaagaccggatgtgcaaagaaggtctcctataacttaaattatctgcacaaagcaaatctaatttgtgaaactgggagatggagagcttggaaagtttctagccagctagatatgatacatagaaatgaacacttcaaactccactctgtgtatttaaggtgatgttaatatagcttactttggggtaccatgttcttatctattttagcttcttaaaaatgtttataaggaggagttaatttaagagcataaagtttctgttttgcaagataaaatagttctggagattgttatatgcacaacaatatacttaatactactgaactatacagttaaaaatggtcaagatggtgaattttacgtttattttgccacagttaaaaaattgtcaaaagaaactagtaacctatatatgggctttttaataagctttcattgttgttgttgttgttttgttttgctttattttgtttgagataggatctccatctgtcacccacactggagtgcagtgtggcatgatctcggctcaccgcaacctctacctccggggtcaagtgatcctcccacctcagccacccaagattacaggcacaggccaccatgtctggctaattttttgtatttttttgtagaaacagggtttcaccacattgcccaagctggtcttgtactcctgggctcaagcagtctgcccaccttggcctcccaaactgctgggattacaagcatgaacaaccacacctgccctataagtttatttcaaatattgatcacctactacttttccaaaggatcctttatcttttatacaattaataatattgggcaatcagaagaattactatttcttaaatttaatacttgtttaggccagagcttattaacatttaagaaacagatcctaaatgtctgatctctcatcatcaggtatgtcttaggttcctggagctggagaaagataggtttgaaggaaagagacaaagattgaagtaaaggcctggagtggggggaattaaatgagttaatatttacatagtgctttcaatagtgcctaacacataatatgaattatgtgtgcttgttaagtaaaaatatgctgtagtaagaatcagtcctggctgggagtggtggctcatgcctgtaatctcaaactcctgaggccaggagtttgagataagcctggaaaacatgaagaccctgtttctacaaaaaaacaaacaaattagacagacatgtggtgcacacctgttgtcccagctactcaggaggctgaggcaggtggatggatcacttgagtgcaggagtttgaggctgcagtgagccatgaccatgccagtgcactccagcctggacaacaaagagagagaatgtctcaaaaaaaaaaaaaaaaaaaaaaaagttcatcattttaaaaaatgagtaatttaataacaaattacttaaaaaattattaggttaactaagttctcttaagttctaacattttatatgcttaagctatagaacactctggtatgagttagttttaaacggagagaggtgggaagaggaaattaacgattgagggaatttgggactatggagcacctccaggatggataaacagggctgggtgagatgccagaatggaagctggaaaggccacaagggtgagcacagagtgcgagaggggtaaatggaccaggatgtccctgagggaccaaggaagtgaagttcagttccacttctcactttcttggaggttcttaatgctgggtccaactgggtgcagtggatgtatatcctctcccatcatatctgagttaggacatcaaaattatattctttaaccttacattattttttaaaaaatgtatcaaggtgaatttcacataacctgagatttgtagtttttaagtgaacaattcagtggcatttgacacattcacagttttgtgcaaccaccacctctacctagttccaaaatgttttcatcactccaaaacaaaaccctgtacccatctgcattactttttaatgcatgttttatttttaatatagaaaatccttccataatgtattgcaagcaaatgttaatctcactccaaaataagtgttttctattttcttgtttcatctcacctctttttaattaagaatttcattttaattctattgtatatgtgtctccatcattccagttttggctcttcataaggcataaatacatttctgtttcttctacattttagtcttaggactagatgcagtaacttaattttgccgtaagtctataatattttatgatttgtgtatatgtgtatgtgtgtttcaccctatttgttcatttgttatgccttgtttctctgaggtcaagaaattatgaattaattccttctttccagcgctgctgtgctgtatcacttcccatgatagtgccaagagcagaaggagactgaaatcagggcagctctgccaggcttgtaaattacatgagcagccctctgcaaagggagtctaaacctgaaagctataaattagagtttaatagcaagcatttcttcacagaagtaatttctgctaagtcagagctattttggtagtatcaattctctttttgtgttatgtatgattttgatgatttttaacttgagccctgagaatgaaatcaaaggataattagcagtacagaatccaggaaaattaaaattcataatgattctatctatgcgattcctaaatgtgattattttgccacatgttgttgctaatgctttttataaacaaagaattctcttttcttgatctaaaggaaatagatattttggcaatgaaataatccccttaatagaaaagacttggcatattttcctgtttttaatatgccttaggttgagaaaatataatttatatctatattttttgctatctcctacagagataacattttatttcaaattggagtgatttataggtaaatttgtgatggtataaagtatatatttctacgtcaaggcaagcttgcaactataactaagagaaattcttcaagggtgaaaacaataatgaccatttacagagcacatactatatgtaaggtggtgccatgtgcatcacacatgtaaatatagtgtctctttaatcttagtgacaactttgtaagatgagtactgttctttttatcattttacagatgtggatataatgttcaaaaaaagtaattctcccaatatcacatacggagtatatggtagaggtctaactctgaagcctctgctataagctaccatgttatagcgcaataaccctaaagcctgatacagaaaattatgctggcataagtactgaattttggctgaagagagagaagagaattcatgagagttaggttgtaagttcatttacttccttatcctcagatattgaccccatgattccagtatttttattctctgcatttgtttcttatggctgccattacaaaatactacaaaccaggtgacttaaaacaatagaaatttattctctcatggttctggaggctagaagttcaaaatcaaggcattagtacccaagggcctaggcactggctctttccttgcttgggatcttctttctcaaagaaccatataatgaattctctccctcttttaaacctttggtcaaatatcaccttctaaataaggtgaactctggctactgtttttcaaaaattgtagccctgtccctagcacttgcaaaccccctgtactctgctctgctctcttttgtcttcataaccctcatcaactgctaacgtactaagtaattcactttattatgtttcttgtttatctgacttcccctgttaaattgtaagatcccaaagggcaaggatctttgtttcgttcactgatacagctcaagaacaatgcatggcagacagtaagtactcaacctattttggatgaattggataaaccatttctcgacattttacatggccagcgagagagaggctggagtgaagtcactggacttaggaaaattattgctatattttctagtataagtttcatagaggtttttccacagcgcaataaggacagaaattaggaagaattcaccaggaggggtgtgtgtgtgtgtgtgtgtgtgtgtgtatgtgtgtgtacacgcgcccacacgcacgcacacacacatgcgtatctaaatatgtaaaacaatgcaattatttaagtgtaaaattactcttaagacacagaagacatgaggaataggctaaaaatgagtgtgggtgtgtgtttaattgttggaaactcacaaaataccggaaggaaacctatctacaactcaagactccggaaggtcaccacccattctccttaatcaacagaaaagaactgtgtttcctcagacaggtcccttagcacacgtttgtctttgtagcataattgtaaacatgtctgtaaaatgatgtctctttgtaatgtaaaacctgctttaaaaactttagacattcttgaaaacaacttttggttcttttcttccttgcctttcttttctctgccctactttctattttccattaccttttattccatttttgtatgtccagcaatatgtgtggaatgaaaaaaattagaaactaaatattctgcattcttttttaacattcatttgcttaacattaaaatcaaaggtatgaaaaggattttaaaataatttctggtcaaagatactgtgcttttttaggtcaaaccatatgccttgtggggaaaaaagtatttcagaaacatggaattgacattctagagagcctggttaaaaaaatacttttaaaaatatttataactggaggtttccatttggcaacttgaggcagttcccagactggcactgggttttttgtttttttttttttctctcagacatctcgtttggacagtgaaaagaagggggttcctttggaggctccaagtattaatgacacaattgcagtaaatttcttgtaataaaagaacttagctacattgaggcagttacacttgatgctaagatttaatactttaataattatctggactgaggcaaggttatataggcagttgtttgggggtaaaaatcaatgatttattaggagaccatattggataggtattaatgtatttgtagagaaggttgacaaagaagggatctgagtgagaatatagcatgttgtggaaacttttctgagtttcccagcatgtccctggctggattcagtgcctttcttgggtactaagcatgaatcaccatctgcatagctggtattcagcaacactgggctgaaacgccattatcttagttgcctcttctaccagatggtagactccttcaagactgacactgggaataataagacacatagttaatcatagctgccatttgttaagtccttactatgtccaagcctgtgtgctttgcatatcttattgcatttgaagactcacaacaactctgtgaaatactagcccatttacagatgaaaactcaaacttgataaccagggaaataagcacagtgtcatacagttactatgtggaagagctagaaggcttccaattcatgggacctgttgatgtaatttatgaatgaatgaatgaataaaactataaaggagtaatttaaagttgtttacaattttgttacctagttaagtaaaatataaattcatggggacaattagaaaacaagtatttttattgttgttcctagaggctattttagcctgcaaaaccccaaagaagactgtttcctccagattagagtggaagaaactgggtcggagtgtctcctttgtctactatcaacagactcttcaaggtaagcagctgtaggcttgaagaggtgtgagcaagagaatgccaagtacaaccaggatcctttaattggcaaatgagatcggacatgactgattactgaaaatgtgtttttgtaagtgtgagatgaaagcaaccatgtctgagacataaaacacaatagccacaaaagcagagaacagagggaggtgaagcccactgaatccctggactcttctctctcaactcaggcataaagtatgcaaaatgcaattgctcttattggctcagtagattaaactccgttccttccttcctttctcttctttctttctttctctttatttctttctttctcttccttccttccttccttccctttcttgcctttctttcttttttcaagattttgttctcttgcccagtctggagcacagtggtatgatcatggctcactgcagcctccacctccagggctcaagttatcctcccatctcagtccccaagtaggtgggactacaggtgcacaccagtatgctcagctaatttaattttatttatttatttatttttttgtagagatgaggtgaggtctccctatgttgcccaggctggtcttgaactcctgggctcaacccatcctcctgcctcggtctccaaaagtactggaattacaggtgtgagccacttgcctggctatagataaactcctgagggaaaggaattaaaaaatggtgtggtttggaaatggaaggttgcttctcagtcataatgctgtcaccctatttccttaactccatttgaaaggtaggccaccactgagaagctcagggagttaagacttatgggtgggttatgacagcaaccattatcaagtgctttcttttcttttttttcttttgttatacatttctttctactacctactcttgccattgaatatgtgatgaacttataatttaaaatattgataatgatggatgaactgttataatgtccatttgcttcaaaataaaccagtggttaatgatacagatgaaacaagataaaccatgcattgattactattatagctggtcaatgatacattgaggtacaattcacttcactttctaatgttgtgtatgcttgaatctttccattataaatatttctaaagctggaaatacaattttacaagttaaaataaacatgttatgattttaaaatactatgtatttctttaatgttaaagaattaagtgaaaatgtttgaagtttatagaaaatttaaaatatctgctcaagttcttatctgtcaagataagactactagctgtaaggtgttaatagcacagctgtcttcacttgaattttttgtagttgccatttctggcatatgcagaaatgcaaaactattattttatgcaacactatttatttgagccattgtacctgcctaatttttacatttttttaaagagatgagatctggccatgttccaaggctggcctcaatcttctgtcctcaagcaatcttcccactcagccttccaattggctgggactacaggtgcaagccaccacaccgggtgcaaaacactattttaattctgaatatgttactatcaaaaaataaaataatgtttttaaccatcttttcttgtgccgcagtgttacgtgagccaccacacataaagttactgttccagtcaattaaaccagactccctggttttctgaagacatgaatatttttacaagggaactagaaagggaatgaggcaagcatttgagctcaattctttaaaatataacatggggctgggcacagtggctcatgtctgtaatcccagcactttgggaagccaaggcatgcggatcacttgaggccaggagttcgagaccagcctggccaacatggtgaaatcccgtctctactaaaaatacgaaaattagccagtgtggtggtgcatatctgtaatcccagatgcttgggaggctgaggcatgagaatggcttgcagtaagccaagatcacgccactgcactccagcctgggcaacagagcaagactgtctcaaaaaaaaaaaaaaaatttacatacataatgtggaagggcctcagtggccaggcctgctggcagctgctcctcacagggcccatgctagagctgacagcctgccagggagctgggcactcggagatggggtgggagcactggggtcagccagagatcaaacacgtcagtgaaggcccagagcagctcggaagataaaataacagtccactttataaaccaacagtgaaacattaacaaacaaaggaaaagttgatgactctttgctagatgttgtggttgaaaataatgtagatattgatgggtttgttgcatggcagggaaccttggcttgctctgtcacctcatttttgaaaagcacatatttgagaagttagacacaatcactgacaaggagattgacatgcttgatctggcatatggactgacagacaggtcagagttgtattgccaaatctgtttgacaaaatctatgggccatatgactgtctgagtacctgatggagtggccagtgccagacaatccactgatatgggcaagaccacctaagcagaataaatagcaatgctttcactaaattttacctattttataattatttcttaatataattaaataaaaacatacatgaatgaacttattattatgaccaactttactgttttaattcaccttgtataactactgaattttatagttctgaaaatacgcaatttttatatttgttacattagaaaaaggtcagttaaatattagaaaataattaatatgacaataccttacaaattttgccttacgtttgtttagcaacttttagcaaaatgttttcacatggccttatgtctgcttacctagaaagtaaattttttaaaaaagatattattatccctgttttatgtgagtgaaggcaaagacctaaaatggcttgttaagggccatccaactaattagaaaatatgtacacacctgcatcttgttactataaggtatatgttagactgaaactggagaaattatgactatcttacagcagcaattagatctgactgcatatggacaaaaacattaattgctcagtgaactgcttaactgacagttattaaccttacacataaagatttcaaaattttgattcagtgagaagtataaggttgaacataggcattacaacactgccaaaaaagttagccagtaaactaaaattagatatcaaaatgaaataaaatatgagaatataaaactatgcttttttgaatttttttttttttttgagactgagtttctctctgtcgcccaggttggagtgcagtgacacaatctcggctcactgcagcctccgcctcctgggttcaagcaattctcctgcctcagactccccagtagctgggattacaggcgcccgccaccacacccagctaattttttgtatttttagtagagacagggtttcaccatgttggccaggctggtcttgaactcctgacttagtgatctaccggcctcggcctcccaaagtgctgggattacaggcgtgagccatcatgcctggccttttgaacattttaaaaactgtcctttccaaaagaaaaattttaaataacagcatctatatacaacttttaggctttaaacttgagtttattaaaagggaaataaatgctttggttactaaatgaactgattagaggaaggtattacacagaaagctacttggattattactaacatcaatgtcttctttttctaaaaggtgattttaaaaatcgagctgagatgatagatttcaatatccggatcaaaaatgtgacaagaagtgatgcggggaaatatcgttgtgaagttagtgccccatctgagcaaggccaaaacctggaagaggatacagtcactctggaagtattaggtgatgtgcatgtatgtgtgtgactacgtctcccactccttctccaccacccagccctgggggcaagcaagcactggtccataaacatgccagcatcaactgggagcctcaaccagtcaagttacagagaccataagcatcaccttcctggcaatctcctggccatttctccccctctcctcattggctgctgaaattttagtaatgcgttatcacaaagtatctctttgttaaaggtggaggcaattcctaatgatcctacaatatacataggagtatctttcctgagagtttatttttcaatagttttcagcatatacacagtttctccaaccatttaaagtagtatcacatgagatggtggagaagcaataacacacaaaaaagtagactgaaggtaggattagaagtcatttggtaaataaaggaaattgacattgattatatacctgatatgttagcccttttcacataagtaattttacttcatcttcattaatatgatttttatagatgaccaaatggaagttaaatgatttaacaaggccatacagctagaaagtgtctggactaagatttgaatccagatggggttaactccaaaaccagtatgtttagtttctataagaatcatggatagattaggcacaggggcttatgcctctaatcccaccactttgggaggttgaagtgagaggatcccttgaggtcagggagattgagaccagcctgggcagcatagtgagtcccctatatcgctctctctaaaaaaaaataaataaaaagccatttgtgttgttatgcacctgtagtctcagctacttgggaggctgaggctggaggattacttgagcccaggagttcaaggctgcaatgagctatgattgtgccactgcattttaacctgggagacagcaggactttctcaaaaaaaaaaaaaataaaaagaatcactgatagtaacagctcaagatggtagtttgtggaggaacacgatctcttctctttcattggtggtgtataatctaccaagttacaagactaaaacagctccccttcctttttctttcttttttttttttttagtatttattgatcattcttgggtgtttctcgcagagggggatttggcagggtcataggacaatagtggagggaaggtcagcagataaacaagtgaacaagggtctttggttttcctaggcagaggaccctgcggccttccgcagtgtttgtgtccctgggtacttgagattagggagtggtgatgactcttaaggagcatgctgccttcaagcatctgtttaacaaagcacatcttgcaccgcccttaatccatttaaccctgagtggacacagcacacgtttcagagagcacggggttgggggtaatgttatagattaacagcatcccaaggcagaagaatttttcttagtacagaacaaaatggagtctcctatgtctactttctacacagacacagcaacaatctgatttctctatcttttccccacatttcccccttttctattcgacaaaaccgccatcgtcatcatggcccgttctcaatgagctgttgggtacacctcccagacggggcggccgcggggcagaggggctcctcacttcccagacagggcggccgggcagaggggccccccacctcccggacggggcggcggccgggcagaggcgcccccccacctccctcccggatggggcggcggcagggcggagatgctcctcacttcccagacggggcggggcggctgccgggcggaggggctcctcactttccagatggggcggctgccaggcggaggggctcctcacttctcagacggggtggccgggcagagacgctcctcacctcccagacggggtcgcggccgggcagaggcgctcctcacatcccagaccgggcggcggggcagaggcgcttcccacatctcagaagatgggcggccgggaagaggcgctcctcacttcccagactgggcagccaggcagaggggctcctcacatcccagacgatgggtggccaggcagagacgctcctcacttcccagacggggtggcggccaggcagaggctgcaatctcggcactttgggaggccaaggcaggcggctgggaggtggaggttgtagcgagccgagatcacgccactgcactccagcctgggcaacactgagcactgagtgaacgagactccgtctgcaatcccggcacctcgggaggccgaggctggcagatcactcgcggttaggagctggagaccagcctggccaacatagcgaaaccccgtctccaccaaaaaaatacgaaaaccagtcaggcgtggcggcgcgcgcctgcaatcccaggcgctcggcaggctgaggcaggagaatcaggcagggaggttgcagtgagccgagatggcagcagtacagtccagcttccgctcggcatcagagggagaccgtggggagacggagacagagagggagggagagggaggaggagggggagagggagagggagcccccttcctttttcatgttgttcatgctccttctgaaatactagtgatgcactagtataggagaaatttaaatcagaaaaccttgcagcagatccggccagtttattcattttctagtgttacataacaactaaatagttctgtagagcggaagtccaacaagaagactgggtatctgcccaaagtatcacaaggctgaaataaaggtgttgacaaggctgagttctcatccacaggctacgaggaaaatctgtttccaggctcattcttggtgttgccagattttggttccttgtggttgtaggaccgagaggtctctgttccatgctggctatcagttcgtgggccacactcaactcctagaggccaccacattccctgttacatggtcccttccatcttcaatgaaagaaaagcatatcaaattcttgtacttcatttttgttgttgttttgagacaaaattttgctctgtcttccagatcacggcttactacaacctcaaactccttggcttaagtgattctcccatctcagcctcccatctcagctgagacaacaggcacacacctattttttttttttttttttgtagagacatgatctcactatgtttcccaggctggtctcaaactcccgtcctcaagagatcctcctgccttggcctccaaaaatgctgggattacaggcataagccactacacctagccttctccttgtgccttgaatatctgacttttccttctgtaatcagccagagaaaactctctgcttttaaaggttcatgtgattaggtcaaacccattcatgaaatcatcctatcttagagacaatggttttggggccttagttacatttccaaaatctttctactacagtacctagattagtgtttgattgaataactggaaaaaaagtgtatttataccaaggactgcaatcttgggagaccaccttagaattctgcagtagaaatactgcaatcttgggagactaccttagaatacagccagttctgggttttgctggataataaataggtcacctaatgaagtttggtttactttccagtccctgagaccagaataacactaatacctggaccaggtattttctaacttggccagttctagacagaatgggatttatagttgagtactgggcctgaaaaaaatactcaggtttggctgggcgtggtggctcatgcctataatcccagcactgtgggaggccaaagcaggaggattgcttaagcctaggagttcaagactagcctgggcaacatagtgagaccctgtctatacaaaaacagttttaaaaattagctggtcgtggtggctcgagcctatattccagctactggggaggttgaggtggaaggatcaatgggttgagctcgggaggttgaggctacagtaaaccatgatcacgccactgtactccagcctgggttatagagtgagattctgtctcaaaaaaaaaaaatctatctgcacacacacacacacacacacacactctctctctcgctctctctcacacacacacattctctctctctctccctctctctccctctctctcattaggcttcttttaaatataagtggtaataaaccaattgaagaaaacagtagagatcgtttatctaataaagaatagctgttgtataagctaaagtaatgcttattattataacagataagcccttaactctcagtgagttgcttaatagtaagttcctttctcacttaagtaaagcctaaatagttgggacagtggtggaggagccatattactttatttcatgaaatcattagagactcaacctaatcttctgacatcttcaatatatgacgttccaaggtcaccattgttgttgacacctacttggtagttgcagggggtggaggatacgaatgaacatgtgggaggtttttaattagtctggcccagaaatgggatatatcactttttcccacattccattggccagaactcatgtatatgaccccatctggcaacaagagtgctgggaaacatggtcgactgtgtgcccatgaagaaagaagatgggtttgttggacaagtaagcagtctctatcacagggtccagtaatcacacctctttacctggctattaaaaccattgattgtagagacaaagtcaacagctttgaagaaaataaacaaccttgattagcttataaataatcaatatcatttgacttccattgttcagtggctccagcagttccatcatgtgaagtaccctcttctgctctgagtggaactgtggtagagctacgatgtcaagacaaagaagggaatccagctcctgaatacacatggtttaaggatggcatccgtttgctagaaaatcccagacttggctcccaaagcaccaacagctcatacacaatgaatacaaaaactggaactctggtaaggtcatttcaagatttgacttgataactgtcttgcatttggataaaaaaattattagaacttaagatgacgtttaatagagagctgataccattgcttgctaagtggagagaggcaggggcaccaggaaagatggcagcacttgtaccacgaagtgatggaaagagctactacaggacatgggaacagaaaacagagactgagggagctgactgtgcaaggaccagtaaaagagcaaaggggcaaaggctcctgaaacaaaggagcaaaggctgtgtgtttatcttttcagaatttaaaaagattctagaattgataatcctataaatgataccaattaagattttcgtagaccctaagctacttcctggtagtaactctggctctttaaaggaaatgtttattatttgctgctgcagtgaactcacttgtgacttaggaaagtgcattaacccttttaccagggaggccttcatttatataggtggtgtttcctaggaattagaaatacctagactactgagtactaccatgtgctataaactttaaaaattgcgcggccgggcgcagtggctcacgcctgtaatcccagcactttgggaggccgaggtgggcggatcacgaggtcaggagatcaagaccatcctggctaacacggtgaaaccccgtctctactaaaaatacaaaagacttagccgggcgtggtggcgggcgcctgtagtcccagctactcgggaggctgaggcaggagaatggcgtgaacccgggaggcggagcttgcagtgagcagagatcgcgccactgcgctccagcctgggtgacagagccaggctccgtctcaaaaaaaaaaaaaaaaaaaaaaaaaaaaaaaaatgcatgctgccttcttaagtaacagtgccccaaagcccactaagcctgattcatgatgatgaatcaggcagttatctacagctgtcttctggcctggaaaattactaagtgcagtctcaatttacaacatcaggaaaatgcatgaaaacttgcttggggataccctgaccatgtgaaaatagtaactgtagtcaatcatggtaggattcctatatcattaaatatttccatgactgtagatcaacaacagttgactctgtgactttagtatctattactttagagtccagatattctgtttcctccagtaaaatattcttattgaaagactttctaggaatactgatgacaatctataagcaagctctgtgaagctaattacatttaaaaataaaaagtattttactttttcatctttgattataggaatagaagtggaagtttaaaaaagggtcattaagcttgaagctttttaaaaaaaattcagtcaatgtaatattctatgtcagtttaaaattgtctgccttccagcaacgcagaatcactatgacagcgattatcaaaaaaaaaaacttaaaggcgtggtgataataacaattttaataatttttaaaaatgtttttgagacagagtcttgctctattgccccggctggagtgcattgacgcagtcttggctcactgcaacctctgcctcctaggttcaagtaattctcctgcctcagcctccagagtagctgggactacaggcacctgccaccatgcctagcaaatttttgtatttttagtagagacggggtttctccatgttggccaggctggtcttgaactcctgacctcaagtgatcgctcgcctgggcctccaaaagtgctgggattacagctgtgagccaccgtacccagccaattttaatgaattttgaaaggaggatataatgcttcattcctttcatctacaagtgcacagtaacatttacaaacagatcttctgataaacaagaaagcaaattgctaaagtggctgaataataaagcctattggatgcagttacttcttaagctctggcctctcagcagtcagcaggcgcagtcagcaggtctgagtgattttacactgagcaactgggcagaaaaacctgctgtcacactttgctatatttacttttcaaatttattttttctcagggcagttggtaaaagccccaaggcaagtctgaaaggatacagattcactttcctcagctaacctcaacccttgaaatagcttgtgatgtcaaaggaatgcacctggattgaactaagataggttcttatgtgagaaatgaacaacaaagactccagtgtatggaagccaatgacttccttttaattaccagctataatatgctggaagatcattttgggttttagtctaacatattatttatatgtaaccttggccatgagttcatggtgaatattctaaaagcattctggctttgaggagagtgacagatgattccatagagtggaaaaaaagaaaaacaggaaaactttctctccctccatctaggaggatctaagacaatgacccttcaaggtgaccaggattacactccctttcttccctccctccagccctttcttctttccttccttcctttctccctctctccctccctctcttccttcctttctccctccctccctccctctcttctttcttttctcctcttcttcctttttgtctgccttcattccttccaaatatcctccaaggggataaaaactactgataaaaataacgaagtctattatatcaatcttagcttttggttgctttgacagggatgggaaggagcaagggctggcttttcttttcaaatttaaaaaaattctagagttgatagaatcgacaatcctataaaccgataccaattaagattttcctaggccctaagctacttcctggtagtaactggctctttaaaggaagtgtttattgttggctgctgcagtgaactcgcttgtgacttaggaaagtgcattaacccttttaccagggaggcctgcccttcatttataaatgatgtttcctaggaattagaaatacctacactacttaatactaccatgtgttatgaactttaaaaaacactcattgccttcctaacagtactgctttcatggttaaaaaaaaaaaaaggaacttctctgtatgtattttatctttgttcttctcgtcaaattaagcaaaagtctagcttaaactccttgaagtcatggcagatttttaaattcatagtaaagacagaaagtcccaaatttttaaaaaggaaagacaaacttaatgctaaaatttgagggacagggttatttaaaaagtctacttatagatctatggcttaaaaaaatatatttttgcatccacaaatagcaatttaatactgtttccaaactggacactggagaatattcctgtgaagcccgcaattctgttggatatcgcaggtgtcctgggaaacgaatgcaagtaggtaagcatgaaatattgggaggaacaaatggtttgcaattcgactgtgaagtacagcagttgggggtacaaggagcaaggagcaggaaatgtctgagtgacttgaagaataaacaggagagaatgactaaaattaacttgatatgatgtgttgcaaagaagcaaagatgctgtttttaagccatctcccaaataagccaaaaatacttagtattgtatttaacaactttttttagttttttaaataatcgtttttaaaatacattcttctaagtagtctttctctcaaataaaagctaagtatcttgtagtctaaattgttgaaggtccagaagtttgaatttctgatatttttaaaattcaggaatgtatatcattgatattattcaccaaattaattcaggtgttgacatttatagtcaacgtagcacttatttaagtaatcagaaagtatccctttcaatgctgctttgaaattatcatttaaaaaaattcatcacaacatgtttaaaaattaaggcattgttttctttgtttcctttattcacatacgtccccatgggttttttttgttgttgttttgtttttgtttttgcttttttgagacagggtctttgtctgttgcccaggctggagtgcagtgtcgtgatctcggctcactgcaacctctgcctcccaggttcatgcaattctcctgcctcagcctcccaagtagctgggattacaggcatgcccaccgcacccagctaattttggtatttttagtagagacagggtttcaccgtgttggtcaggctgctctcgaactcctgacctcaggtgatccgcccaccttggcctcccaaagtgctgggattacaggtgtgagccaccgtacccggcctgtcctcatggtttttaccattaccttgtcctaccagcactatttctgtttatttttccttccatttaaatggtcctgtttaatttaaacatctacctttgccttctcttaaggaatcatatccaggaagtcatggttttgatgtattagttactttttcttagcacacaataaatacataacgaataaaatttaaatgtttgtttctccactaggaccactttaatttgaacatgattctcacatatctactctaagtacaagttagcttaaaagttaaaattagtttgtttaacggtcatccattgatccgaggtgttttgtgtccttggttgggacttacatcttttgaaatacatacaaattcataaattcatttttttggttttctttgtgaattataactatattcacatgtaaccaaaattagaatatgttaactgtcctaaagaaattttttcaaagtgcagcaagtaaagcatggatttgttggttgtttatggctgcctcactataaaactccagcagactccacccacactgggcctttcagcagtttagttccttttctttcagtaaaaaaaatggtaccttccttttataaagacttttttttcaaaaaaaaaaaaacacaaaatattttcatacttaatgttacattttctcttcactgaggcataatatggctgtatgacttgctcaacatcacagaaaatggtgaacaggatgtaagaagttaacttactccttatctattactcttctgtctcccatttcactgaagaaaaataacataaaattcatactacaacttagcacttacagaacaagacaattttttgtcagtagtttcttttagggtgaatccttccttcatagatgtcaaattcattgacaaactacaagacagttttttttttttgtcagataatagcccttactttgaatgcttcatagatgtcagatttaatgactactacaaagtaaatagaaggtacactttggttctcaggaatttcacttactgatttgactttgcctaagattatgattactgtagatttttttctctctctgctctttttaatccaagtaaataaaaagctgaatcttattgacctctcaatacccaagcaaactgagtttataccaagcaataattaatgttttctactctggtcaaattacttaacctttcaaaagacttatcaagttttcttttttaaaaaaatcaattaatattttggaggtatttaagaaaattaataacacacttggcattaggaaagaatttcgagaccagaagtttttatgataagcagattcacttaaacagtatctctaaaaagatcatttccaaaatgtacattgctttaaaatatttaaattatttttgagaaaatgctatgtaatattttctctaggttatttaatcataggctaattaaaacttgctttgtaaaatgggaactctttgaagaattgctcctttaataaatacatgggaagtatctaaatggcagaagagtgtggctcataaaatcctcatggacaagatggagaaatatggtccaaacaatattttggtggatccacacacagttgaatcccatgctcagagaatgttaataaattgtgttgtatgacaggaggtgtctgctagcctgttacatagttgtttcctaaacaaatccatgttcatcatgttattaatgacttgaatgagagtatttttaataaaattctcaatttgcagaaatgttaagcttggaaggttaataatgtaattattaggcaacagaatcaatctgagaagaagaaaaaaacttcacagtagttatttccaaacttgggttcaaaaaatccagttgcattacattagaggacggatgccttaacagtcataggaaaagcctcagagaatttaattcatttttcataaatgggatgacagtttagttgcatatatgtatatgactgtgtatgtgtgtatacacccatatacatataattgtatatctacacccatataattcaagaaggaacgtatttcttacacttagttttacagaataacaatgacatgtgcttttttttaagagacagtcttgctctgtcacccagactggagagaagtagtgcaatcatagttcactataatctgaaactcctaggctcaagtgatcctccaacctcagcctcctgagtagctgggactccaggaatgcaccaccatacccggataatttttttaatttttttattttttagagatggattcttgctatgttgcctaggctggtctcaaattcctagcctcaagcagtcctcccacctcagcctcctgagtagctgggattacaggcatgagtcaacatgcctggcaccatgtgttttctttgacgttgagtttttctttatttgtgaaattgacacagttgatgatgtaggagaattttaagtaagacgtggggtagggagtggcagtagaatacttgaactcattgaacttcaaagattgcttccagtcttttaatcctgtgaattattacacatctccaaatgaatgcaaaagaatacattttattttttaatctgagaagtttttaaaatttagtatttttccaaagcttaagttctgttaatatttttaatcaattttgaaccatgtcttagaagtgagttagttgaacaggcttcacaatcgttaaagtatgctttatgatatagctgcaaaggggatctttttttgaaccttttcaatttaatgactgcatctgtccgtgtaatccacatatatttatgcgtaatttattttacattccagatgatctcaacataagtggcatcatagcagccgtagtagttgtggccttagtgatttccgtttgtggccttggtgtatgctatgctcagaggaaaggctacttttcaagtaagtgaatttcacccttctttggcagataactttctatggctatggagtttatttatgagatactgtttctcctaggaagttgtttttttgtttgtttgtttgtttttcagacagagtcttgctctgttgcccaggctggagtgcagtggtggcaaaatctccactcaatacaacctccacctcccaggttcaagtgattctcatgtctcagcctcccaaatagctgggattgcaagtgtgcaccaacacacccagctcatctttgtatttttagtacagatggggtttcgctatgttggccaggctggtctcgaactcctggcctcaagtgatctgcctgccttggccttccaaagtgctgggattacaggtgtgagctattgtgcccggccctctcctagcaagttttaacaaactctggagaatattgttcatttattttctgctatagaaaatgttcaggatgacatgcaggtggcttatgaaacaccttggcaaacctagggagaaaaggcagaactgcctagttgcacattccagggagcaccacagaatatgcaagaggcatccttggagtggtgcagtgcagcgagacagagatattcaatgtgaacggatatttatagtatctttgcatgtttttaagatttttttttgtttgtttttttgagacggagtctcactgtgtcgcccaggctggagtgcagtagcgcaatttcggctcactgcaagctccacctcccaggttcacaccattctcctgcctcagcctcccgagtagctgggactacaggctcccgccaccacgcccggctaatttttgtatttttagtagagacggggtttcatcgtgttagccgggatggtctcaatctcctgacctcctgatccacccaccttggcctcccaaagtgctgggataacaggtgtgagccaccgcgcccagacaagatatttttaagttaggaattgtatatctcaagatataagttgatttcaaattctttaagaaatttcattgaaataaataagtgaaatatttcatcagtgtagaacagtgaaatgttgaatgttaaatttaggacaactgtatttagaagagaattgttcagctgggtgtggtggctcatgcctgtcatcctaccactttgggagtctgaggcgggaggattacttgaggtcaggagttcgagaccagcctggccaacatggtgaaaccccgtctctactaaaaatacaaaaattagccaggagtggtgacatgcacctgtagtcccagctactgaggaggctgaagcagaaggatcacttgaacctgggaggtggaggttgcagtgagccaagatcatgccactccactccagcctgggtgacagagcaagactccatctcaaaaaaacaacaaaaaaagagaattgttcagtcaaaaatagaaacctattgtatttatgagagctacttctgtacacagttttgaattcttcaaatttagacctcttgtaacttcacacctccatttgataatgcaataggtttgatgtaaatgggtgggatttaaaaatgttttattctcttaatgcatttcttcactccctctttaatattattggagagctcagaagctgcagcattctatcagggccactggcaatagtgtgtaaaataaaattcttaattgaattataaatttatagcatatacaagttctagacccattgttttacagcgaacattaatttcggaatttagatttttaaaacaattttttttttttgagacagggtctcactctgtcacccatgcctggtgcagtggtgtgatcaaggctcactgcagccttgactttccgggctcaagcagtcctcccacctcagccttctcaagtagctgggactacaggcacataccaccacacctggctaattttcttttattttttgtggagacaggttcttgctctgttgttcaggctggtattgaactcctgggatcaaggaatcttcccatcccaacctcccaaaatgctaggattacaggtgtgagccaccactcttggcctttaaaaatatattttatgccaaaaataaacttaaatataaaatgtgttcctaataatacctacaactaggtattatgtctcataaaatgtttccgtggacatggattcaaagagatgccctataattaagaataactgggctgggtgtggtggctcacacttgcattcccaacactttgggaggccgaggcaggaggatcacttgagtccaggacttcacgaccagcctgggaaacatagggagaccctttctttacaaaaaataaaaaataagccaggcatcgttgcacacacctttagttccagctactcaggaggctaaagtaggaggatcgcttgagcgcagaaggtcgaggctgcagtgagttgtaatctcaccactgcactccaagctggataacagagcaagacactgaccaaacaaacaaacaaaaagagcggctctgtcaattaatacttgttcagtgcttcaatttagcccactttaatgtaactttatgaattgaatccagctgtggccccctgctggtcatcagtgaaagtacagacaaataagataactcttccaaaactcttgtcatctttatctatagcctaaaataatactggtctgagtttttttaatgaggagttagtaaaaaaattttcctaaaatattgaattaattaaaagttgacttgaatattaggagttcgttacctaagaatgttactctgatttttcatctagcagaaaaatctatccaagagaagcatattcttgaatatatgtttaggacagaggttggcagactactatctgtggaccaaatctgccctccccgcctatttttctatggcctatgaacaaaaatggctttacagatgaacatttacaatctatttgatgatagggcccgctgactttgaaccccaattaagagaaatgttatcttccccaaaagcattccatttctctaactagtaggcctgtttttcaagacttttattattattgttattattattattatatttttattttatccataaaaatgtttggaaatttgtttgctctcttgttacttaagtacctatatagtatcctcttggccccaaagcctaaaatggttgctgtatggctctttaccaaaaaagtttgccaactcttaatttagaaggtataaacgtcagcaagtgaagattaaaattaataaaaataaattaaacccaaactcatttttatatgaatctgtatcataccataataacccttgcattaatgatatatactttttcttttgtagaagaaacctccttccagtaagtatactttcctacaatgcatgtctttctcctatgtcaactaattttctattaatcatctgtttaaagtcaaaagagagaagttgggttatttgtgtaggtttactctcacaagaagttactcaagtttatcaagaaatacatctgtattaggctgttcttgcattgctgtaagaaaatacccgagactgggtagtttattgtaaaaagaggtttaattggctcacggttctgcaagctgtacaatcctggcaccaacactgcttggcttttggggaggcctcaggaagctttttactcatggctgaaggcaaagcgggagcaggcacgtcacatggcaaaagcaggagcaaggttggggaggtgccacatacttttaaacaaccagatttcaagaaaactcagtcactattctgaggacagcatcaagggggcggtactaaaccattcatgagaaatccgcccccatgatttaatcggctccaacaaaccccacctccaacattggggattacaattcaacataagatttgggcaaggcaaatatccagactctatcaacatcccacttcacacttcatacctacttgtaaatggtagtacagagagaatgatgattacccagcctacttgtaaatggtagtacagagagaatgatgattacccagacaagaaatatggtcactaatttgatttcataggcatttgtataaactaacttaaaaaaaatttactgtattttgctaaattgaaaattttcaaataaaattttagttaacagtcatttttttatattaattgaataccaattttgtgcctaacactgttctaaggaatggggatacagcagtgaacaaaacaggccaaaaaccccacaaaactctgccttatggagcttacattctagtagagaaaggcagaaaataaacaggtaatactatatagtatatcagatagggccattatggagaaaaataaaacaaataagagaatatacaatacaaagggtaggagtagagattctaatttcaaatagggtggtcagaaaggatctcactaagtgatttttgagaaaggcctgaagagggtgaggaagcaagttgtgcaaataaccatgagaagagcgttcaggcagaggggagagagcaaattgaaagatcctgaggccaggcaagcctagaatatctgagggatgtcagcgggaccagggtggctggaacagaatgagagaaacagaggagatgagcgtacaaaagtagcggtgggggcagattgtaaggagtcccttttaggcagtcgtgaggagtctggctttggtctgagtaagatagaaagtcactggagggctttaagcagaggagtggtgtcattttaatttttcaaaactcacactggcttctctgttaagaataaactatgagatgacaaaaggtggaagcagggagatcagttagcaaactaccacactaagtgaggcaagagaaaatggtggctggtgccaaagcagtgttggagatgctgagaagtgacagtgttttggatataatgttttaataacttgctgatctgttggatgtgggctgtgagagaagcagagaaatcgaagatggcttcaaggttatgagaaggatggaattaccatttacggaagtgtggaagattttaagaggagagagtttgggagtggtgatgggaataagtggagaggttggagtgtttggaattttaatatttgatatgcttatttgattccaagtagaggttatcagtaactgaatattcaaaatctagagtttggggaaataactggaaatggaattgtaggagtcattggtacatgaaatatgggtgagctccccaacgccctgtagtttgtgtgtacttgttttatgactgtccttcttgtatgtacagatctggcagacctaactttggctctatgggcgtagagagaagatggatgacaaactatctgaggctatggcagctgggagtggagaagatatactgaagccatggcttcagacagtttgtcatctcctaattcctttgaagaatcatctgccattgacttcctgttcccagatttctggctcaatcctggtctctcagtctcgtaagatcctaatacaagtctaggttgaagttcagattatcaagaattagcagtaataaagccagtgagttcagaagggcagggtagctggaaagtgttgctacttcccacccctaacctccaggtgattgtgaggacttctgcttttattgagtgacacgaaaagtaattggaaggttttgagcagaggggagacatcatcttacgtaagtgggaagggtgacatagctgcagtgagggaggttattcttctatcagtatctctagcaaatcaagtagtaatctggtggggaataacttcattcctagacatatgccctcacattcattaaatctgtggccttcaaaatatgttcaataacgaaatggatgactggaacactagtcaccatgtaaaactttttccacggaaaaataaataaattttgagattataatagtcaagctttcaaaatattaaatgttaatatattaaattaaaagttagtaagtctctggtttgtgtattccacaaaaatctttagtatactagccacaagctacatttacgtgcacaaggcttcacactgatgttttgttgcatgactttctctgtgaatattgtctgtaaatataagaaattcagtaagaattgtctttttttctacctaagatatatgttcatgttcttgctgagaaaatgtatggaagtaaaattaactaaaagagcatatatgttccagattggaagtgataatgtagtaaatattgtcttttatattccacaaacaggaagagtaattcttcatctaaagccacgacaatgagtgaaaatgtgagtatctttaaagcatatttatagaatgaatatgtttggggaatagggcagggaaatgaagtaattatatggactttgtgaattttcacttttaatacactttgcaccagtgtctatcactggtgtttaaaaggagctaagtagatgttagcttctgtaccctgtctaggatggcatgataaagatacctggcatttccaatagcagaagtgatctttaatcatatcattatttgtttcatggtattttctataattagtctgccttcttagtatcactaggtctggcattatcagctccctttgacagatgagtaaattaaaacacaggttcttacagggtaacagtggtggagctgggacccaggctcttttcttccctgtagcttgaccaagcagagtggttccagcagagctgtggttctaggactcacctttggttatgtgaagcacttggaacattttagggctatgcaatgtcttagtcatttgggctgctataacaaaaataccatacactgggtaatttacaaacaacaaatttattttcagttttggaggccaggaagtccacaatcaaggcaccagtagactcaatgtctagtgagagcctgttcctcatagatggagacttcctgctgtgtcctcacatagtagcaggggcaaaacaagcaccctctggcctctttggtacgggcactagctccattcatgaaggtcctgccctcatcacctaatcacctcctaaaggccccacctcttaatagtattgcattagggattaggtttcaacatatgaattttgggtgacacaaacattcagaccagagcacagaatatcctgttataattgaaaggaacatttcagaaatgtttgaaaagacgcagtaattacctaactcagaggttttaaggaacataatttagacacttggaccctttgtaaacactacattgatgcagcaaataccattgttactcagattttgtagctctttggatggatattcagccttctggatgattttctcaggaatatagtgggttggggcagggggagttcctatggttttagaggcctaagtcgtttcttgagaaacaaagcatgggttctcagaaatgctttactcatctatggcaggaattctgtcagatttcttctcagtagagtctggggggtggggtggggcgggggagcctggacatcagtattttaaatgcttacccacttttctgtaaaaatttgattttcaaaaactgttccagaaactattacagaattcaccttattttgtggtttactacactgaaagcttactgatgtttaattaggggacaagaaactttgttcccaccatttttgtgcctacaatttatggaaagtctttgtttctgcaatttacagaaagtactcttggagtgtggaatcgaatactcccatccctccaaacagtatgaagcacattgtggctaaactgaatgaacaaaagccatttattttttctttgccttcctctcagttgcccttatcaactaacagctagagtccccttcagttctcttgtgccctaccacagggtttctcaacctcagcactactgatattttgggccacatcattctttggtgtaaggtgctgtcctgtacatcataggatgtgtagccacaggcctggcctccaacaccagatgccggggcatcctcctaacaggatttgtctgcctctgccttccagtcctacctctttactctctaggcaaagcttcagagtaccttgtctgctaggagttagttagttaattccccataaaacaagtttaattaaatatatactggttttggccaggtgcagtggctcacgcctgtaatcccagcactttggaaggccgcggcgggcggatcacgaggtcaggagttctagaccagtctggccaatatggtgaaaccccatctctactaaaatacaaaaattagctgggcatggtggcatgtgcctgcagttccagctgcttgggagacaggagaatcacttgaacccgggaggcggaggttgcagtgagctgagatcacgccactgcagtccagcctgggtaacagagcaagattccatctcaaaaaataaaataaataaataaataaatactggtttttacctgtagaattcttacaataaatatagcttgatattcataagatttatgtttctttaaatatgaattcatatatttaaacctgttttttctttcttttcctaggatttcaagcacacaaaatcctttataatttaaagactccactttagagatacaccaaagccaccgttgttacacaagttattaaactattataaaactctgctttgtccgacatttgcaaagaggtacacgaggaaatggaattggtatttcattttaattttcatgactactaactcacctgaacttgctattttaaacaaatagttctgtcgacacctaaaatataatctggcttcttgtgtctggactaagttaaaagaattaaaatactttgtaatgtcctgggctttgggaaatgttaaccacgtcctaacttctagagaacgttactaaaatataacatactgattgtgaagtcaatccacaggtcatgaaaatataaatcagactctgcacgagagtctgatttagggggtccaacaaatactctgacagatgcaaaaggaacctctggtctcatttctgccagaatcctcttttctcccctaatatcatccttattctgatgctcgttcatcactaacacacccacagaaaggaggaagcgggatgggtcttatgcccaaggatttgcactttgtgtttacttccattcctgggaactaaaagcaacatcaaaagaaatgcctaatggctggagcccacaggtgtgcaccacaggatttgcctggtgtgtgtcactgatttcttcattaaacgtaatttagatggtcaaacacaaacccaagtggcttatttcacccctactgctgcttgccactgcttccttcttgtaagatttctttgaagaggatcagtgactttgacatcagaactcaccactggagcctacacaagtttgcagatacctttccctgcaggagtggtgacttcacatctttctgtctctaaaaattgtgcagtgacattccgggccaagtcccttagtcaggggttgacaattctgcttttggacaaggagggatgtggagggaagaagtaatagtctaccaggaaaatgagacgaaaaagctcagtatgactccctgcatctggtacccctcttgaaacacagtgggcacatgagcaatggctcaaacgaaaagtggatctaatgtgggtttctcaaccgatgaaccacaaaagcttccagctactattacaatgtgaaaattccaatgatccgtttaccagagcaattagactatgttaaaaattcatatcatttgtaacttcttttaattactgaattgatattaaaaacaaaatatggctagggcatgtcctattcttctgggcaaatgtggatgaaaaggtcacttgctacctttgacaactatgaacatgatggttaatcttctttctttttttttttttttttttgagacggagtctcactctgtcgcccaggctggagtacagtggcacaatcttggctcactgcaacctccgcctcccctccgcctcccagattcaagcacttctcctgcctcagcctcccaagtagctgagattataggcgtgtaccaccacacctggctaatttttgtattttagtagagaagggtttcaccatgttggccaggctggtctcaaacctctgacctcaaatgatccacccccatcagcctcccaaagtgctgggattataggcatgagccactgcactgggcaggttaatcttctttcaaaagagtctgctctttctacccaattggcgaagcaaatccccaggattcaccgaacaaatggattaagcacccactgagtgcctagcatgtgcctggacaccaggccaccgggaagatgctccccctttgacttgtctatgacatgctatgtctctcaccagatcccttcctggaggtcgggcttctgtaacatggctctgcccccaaaataaaattttcaccacgagtcagggatcggcaaacattttctgtaaagagccagaaagtagatattttaagtcataaggtccctgttaacaactacttgactctgccattgtagcacaaaggcagccacagacaaaacaagcaagtagtcatgtctgtgttccaataagactttatttacaaaaacagcaggcacagacaagatttggcccacaggcatagattcccaactcatggtggtgaagtacagaaaaaaacacctgtctacaagcttttgtaagaaatcaggctaaatgttacctatgttttggttggaagatttctttggtttgaggaatgctttcctcttgcattggcatgccaagaggatagatgactctgaaagacgcctcttcagacatacctgtcatcacacaagatcaacttcttcagtttaaatgacacaaatccatattgtggaaggaaaatatgtagtgccttagcttcactaatagttgtaaaacttctttttaagacatcaaaggctagaggattcattttatgcagtgcgaacatctaataacactctctgtgtcaaatatatattgtacattaccttaaactattgtaatagctaggtaaaaatccttgtataaaagaatgttttcccccacacaaagggcagagtattgagcactaatttcctattaaaagtatatatatgtatctgtgggtcactggtgtccagacttgtatttgcatttgtgtttacttgaggaacttgaacactaacaactggtaaaatcccattgtaattcttacagcattttgactttattttcctgcagtgaattgtgttgtgtaaagattagggctttaaaatcttattagcaagctttgttttgttttaattattgttgctgttgtaactagatttaatttatttttagttggaggtttgacctaagtctggaccaattgattgcttttcaatacaactttgcaaagaacttcctttttccacaggtggctttgttcgattaaagtctacactaataaaaata

SEQ ID NO: 50 - DNA, 23424 bp, Homo sapiens
acggatcccgacgcgggaggctcagaacccgggggaccctcaccggtggctcctttcccttccatcccctcgacttcccggctcagggcgcggccctgccttcggcgcgggagtgggggactggggggcgcggggtcccagggtggggacgaggcgggctgcaggccctttccccgactggagctcgctcccaagtggaaatgtgggtggagggtcctcattcagatgccccaggcctcggatcctgggcgggggcgcgtggcagccgccaggtgagtgccccaaacccgcccccctccttccccaaagactgactccccctccttttatggagagaggaaggctggggccctggatccgaaccgtggagagcggccggagcgccggggcgggggcggggaccggctctctggccctttttggcgcagcagctctgggcgctgcccgctgccgccgctggggcccgagagaggcgagccggcgacggcggcgcttctgcggcggcctcctccctccccacccggtgccgcaggattgcagctggcactggagggtgggcaagctcgagggaggggcgcggagccccggcgcggagccgggcgcggggctttgatggatttagctgcttgcgcgagcgcgtgtgtgctccctgccgcggcggcggcgcccgggccctgccgggtccgcacgaaccccgagcgcttccgaggtgcgggtcccaggcccggaatccgggggaggcggggggggggggcgggggcgggggcgggggaggggcgcggcggcggcgctataaccctctccccgccgccggccggctccacacgcgcgccctgcggagcccgcccaactccggcgagccgggcctgcgcctactcctcctcctcctctcccggcggcggctgcggcggaggcgccgactcggccttgcgcccgccctcaggcccgcgcgggcggcgcagcgaggccccgggcggcgggtggtggctgccaggcggctcggccgcgggcgctgcccggccccggcgagcggagggcggagcgcggcgccggagccgagggcgcgccgcggagggggtgctgggccgcgctgtgcccggccgggcggcggctgcaagaggaggccggaggcgagcgcggggccggcggtgggcgcgcagggcggctcgcagctcgcagccggggccgggccaggcgtccaggcaggtgatcggtgtggcggcggcggcggcggcggccccagactccctccggagttcttcttggggctgatgtccgcaaatatgcagaattaccggccgggtcgctcctgaagccagcgcggggagcgagcgcggcggcggccagcaccgggaacgcaccgaggaagaagcccagcccccgccctccgccccttccgtccccaccccctacccggcggcccaggaggctccccgcgctgcgggcgcgcactccctgtttctcctcctcctggctggcgctgcctgcctctccgcactcactgctcgcgccgggcgcgctccgccagctccgtgctccccgcgccaccctcctccgggccgcgctccctaagggatggtactgaatttcgccgccacaggagaccggctggagcgcccgccccgcggcctcgcctctcctccgagcagccagcgcctcgggacgcgatgaggaccttggcttgcctgctgctcctcggctgcggatacctcgcccatgttctggccgaggttggtgccgcccccgcgccccgtccctgcgccggctcctccggcgcacaccccccgccggctggggcgccacgggctctgcagagagcgttttggttcctgccagggtggtcgatgtttagattttcccaactgggttctattttctgccatgcctaagtgtgtgtggggagtttccagcgtgttgcgtcggtcgctctgcctcggggggaccggggagcagcgaggtggacgagtgggcagaaacttcggggggcgcagtgtcctctccggggaaggggagctggggcgcagcgggcgctgcagcagcggggtgcggggagcggggaagggggtgtgtgtgagccggcggagcctggggaggagagaagggcggcggataaataggtaggggcggctgctgcggaagcccctggccgggcagggtgggcagcgccaagctgcagccctcggttcccagtccccaagcccggcggggctcagggccggcgcagtcccgcccgcccgggcctgcttacaggtggctgagcgaggcgagctggggctgggccaggcgtccgcaccctcccaccgcggcgtccccgcccccccatccccatccccatccccatccccgggagctttgctgtgatgaatgactttccacagcccccgtcgtgggaacttagtgcttcaggctccccagcgacccccgactctccttaaaaatcggggaggggagtgggggaggccagaggtgagggtggtctccgcagggcacggagagctgcgcgaggtggaagtttaaccctcgctttccctggaggcttcttctcccggccgccggctggatttgggcgtcttagtcggcgctagggccgcggctgggccggagcccggggtggggcgagtgtgtgagtgagatgtgtgtgcgcgtgtgtgtgtctgcgcgcgcgtgcgtgtgtttgtgagacggagagacctctccacgggttcggcccgggattccggggcgtgaaatttaagccctgcctggattaaagtgttagggctgccgtgactctcgccgacccgtgacgcattttaacttgatctttctagatgttgatctcactattaaatcagaaactttcggccccctcgctgccccctagaccttctgtaactgacaccccgggtggaggggccggagtgcgggggcttttgtctgaaaatataaaggggggggggctttgattttgcaaagggcggaacatggatgcgggtggagaatttggggtctcttccagccccacccccggcttctggttccagggccggggcgagggctccgcgggggctggggcggggactgcggccggcgctcgcggggtctcctcgggcccggggcggcggcgctcctggcggccgggggcgcgtgccggcggggtcggggccgcgggcgctgaccgtgtggcctctgcttgcaggaagccgagatcccccgcgaggtgatcgagaggctggcccgcagtcagatccacagcatccgggacctccagcgactcctggagatagactccgtaggtaaatcgcgccccttccctccgcgcgcggggagggcgcgggcgggcggcctgtgcgccccgagctggggccgggcggggcgccgcgcaggagcgcaccgaaaggtcagaatccaatccccagccataagcgcccgggcggatgagtcaggagtttctcttccagtctccactttctctcccagcggcggccgagggctgctcgctcgccccgggattgttttcgcctttaaggaaaacgccgcgtgtgtcacacaaagttcagccgcggcctccgccaggtgtgcgggccccgcgcctgccctcgggccgggggagcggcaggatccggcccagaccctgggcgcagagccctggcccgtgcgccgggcgggcagcccgcggagcgaggccccaagggcaggcgcggctcccggtccgacgggcgggcgggcggaggcggcccccgggtcagggcccggccccctctgtaatccctgcgagctggtgccgcgttcttgccgcagggctgggcctctgtggctgcagaagccggtgtctttctgttttcacgacccaatgaaaagccttggacgcatctgctgcctgggggctatttttgcggctcaccctcgggccctggggccgggccactagagaacacagcttgtttgcaagcacagagttttgctgcgggttggcaagggttaaaggggcctctcaccccgggggaccccggtggaccacgggtgggtgggaggggcgagggtgtagggtggccgcccgcccgctcagggctagagagccccttcctagaaggcgaggtctctcttccaggcgtgcgtggcgctcttttcaaaatgagcactcggcctgggaactccagtcggagccttaacctggtttaaaaaggggctctgcgatgaacttgttaaaaagagtaactaaaggcagcagaattggaagaagttacgtgacatgaagattcttctctccctgcaaaggactctgaaaaagggggggcatgcggggattaagtgaaatcacatggtctagtcatttggaaatttgtacctaattatggtggtggagaggcctgaactattttcgtttcatgccaaaaccattttctaacaaggccgatggtttctgtagtttcttgacccaggaaatccctgggctgatccttatcgggggcggagggtggggggtgcggtagagtttcactcccacagcacagctgggcggggggattttgaccggatccctcagtggataactctagggaaaaggatctggctctggtttgtgggggggaatcccttgcctgaatctcgctggtcctggatgggtttggaaaagtggggggggggggctgcttcctggagaaggtttcagggctttttctgggggggggtgctagcagaaggggaggcttgtggagagctgggcctcctcgtgggactggctttggaagctgcagggaaatgggccattcactttctgctgggactattcttattctggtcttggcgccccgcctcctccacccccacccattatcgcctttagcattgcagcttcgtggggtatgctgatggcattcctcacccgggggcttctaggtcgtagggtccgaacagaaaaaaacaaggatgcccctaagctagtcctggccggtttcaaattccctctgcagtcatgtcccaggagctctctcctcctgccccagggaatgcagagtggatctcagccctcctgtgtccgtgagaggttttggggtctgaataggattctcctagtgtctgggaggctttgtgtgtgagaatatgggggtggcatctacctcctctcttgcccctggtgggggaccttttgtaacataggggggcctccttggtcctgtccagtcccctccccaggtgtggctgaaaacagaaccagagaaacccacagtctctcgcctgaggacaggagaggcaccggctgctcctccagcttgtagggggtgtcttttcttcaactcccgttctctgtcgtagggagggttgtaaactggttgaggtcagttctcattgggtaagcatccctccgggtcctggactcccttttcaatccagaggtgcttctggtctgttaggggcaggggacagtgcaggggctcatgaggaaggggctgggtgctgggagaaacccaacgcaacgaactttccctcggagtccctttataacccttccaggctgatgttcttggcattaggtgcctctaaggcccacgctgtaggaagcagaaaagaggctttgaggaatcccaggggtgcgccccagctatgctgactcctcctccaggtgggtggggctttgtgactggcatttggctcctcccagcatgcaggctgcgtcccactgtacagttggggagactgagccaggcaccgtctggggtcttggccgctccttgactgtggctggaggagcacgggtagtgggattcctcaccatcctcccggagcccaagcgtttcattcggagggtgtgctggagtgaagagtgaaggcttttcacctgtggcttttagatccagaggccagcatgtggtcttttaatgaccggcagcccgcgtttagggcctgtttgtcctgtgtgcagtggcagctggggagctttgttccccaaagtggtctggcctggcgcccgtggttcattgagcggctgataacgtaaatagccccatctcgggccagtaatgccagaccaggactgatggttgggagattctccctgtcctggagttgtccttgggacatctgtgcctaaaagacaaaagggaaagcctcctggttaactgtcctgggagcagttttaggggtgattcttgccggccaggccacctgggcctgggctgctcagagctgtgtttggtgagctgtgggcggctttggtgagcgtggtccactctcggcatcttgagctgggagcaaagggtgggcttggtagactgggagctattccccctctgtcccttgtctcaagaaatttgccagctcaggctttctgggggtcaatgagctagcacggctgccgtcttctctgtttattaagccagggctagagggtggcggggcacggggactgtgctctgtggacgcagaccacatgagtctcctgcgagccacttctggtcctgttatatttctctgggcctcagtttcctcggatgtgaagaagtgatagcacccaccgcacactcagaagctaagtcattggtaaagcagctaatgcaaacgtggctatcacaaggcatcggaaaatgggagctggtgttattgaattttctcctacgagtggagaacggacccgttactctttggtttggccatggcaagatggccaccaccaggatgtgattcataagtgtcactttttcatgaaaagaaatgctgcttgtaacagttggttgatgggaaattcttactgcatgagtagttctgttctgatcttattttgggtctcaaaaaaaattagtgtcattggaacattgagtcattttcggtaaaaagttgggctccgggcgagcttcgtctttgcctgacaccttctgtgaggtttgcgggcttcattttaaatccgcaggctcctcgggggtgcggaggaagctgaggtttctccggttggtttgtggatagtcacggatgcctcgatgggctggggagagacactttgggctgctagtcctgaacccaggaggtgcagagcccattagccgtctggattggtgaccgggacttcccaagcttcccaggagggggcagggagatctctgtgcctctggagcatcctggctgtgaggctcactgtctccgcgcctgttcacccttggttatatggtggggggggcaggatggagggagatgggaagagactccccagctgggaccagggggccaaggcaaggaggcccagagccacccgcggtgcccaggtgcgggcagtgtgtccatgggcaggactgtgggtcctctccctactgcgggatttggagagacctgagactcccccagcctgtctgctgtagccgtcagcgcctgtgaaggggtggtgtgtgcagctgggtggggtggcggggataggttctcagttctgctccccggtcagtgctggtcttggctctgggccactgccccacctgcacctggccgcctggctgtaaacacggctcgcagatgccagcttctctcaacccctctccgcaggccgcctccctctgtcaggctgcgggaactcctccgtgtagcctccacgagaggccacgtgccctcctgcctctcctcatggccgctggccctagagtagactcatttcaggaatgagtggggtctggcccgcagcccagtctggcggcttccagtgcccctcagaggttaggccacttcttccaggagtgctttagtgagggggagggagggagacgtacaggcacctgcagaaatctcagcggcctctgcttctccctcgctccagcccccagacagaggtggggcctggcttagccctgtgcccctcggggaggtgcacggagctgggcggcctcaggcccctcctgccccggggcagccctcacctgggctaccttggaggaggcaccgtaggggagaccacctgcaacctcttccccgaagggccctgcgcttcgtcacgggcccctgaatgtggggacctctgtgctaacggggcgttttctgcggtttccagtgtttcatgccctgcatctctggaaagccctggtgggaatcgaggttctcctggagggcccctaatggcgggagctgtgaggggctgtgccgccaggtgcctgttccccagtggctcccaaagctggtctgtgggaagtgcggctggacaggcccagggcacagcgcacgggcctggggcattcacggtgttctccttccgcctgcagggagtgaggattctttggacaccagcctgagagctcacggggtccatgccactaagcatgtgcccgagaagcggcccctgcccattcggaggaagagaagcatcggtgagtccaggaggccgcgatgggcagggcagggccgggtcagggtgagtccaggaggccgcgatgggcagggcagggccgggtggggaggagctgcccgctctcccagcgcagtggcctcaggcaagccacccgttccctcctccctaaaataggcctggccctggtgcctctggctctggcctctcccgaggcctccctccttcgagggtgtctcctgccccagcccgcctgctcctcctggagtcctggtctgggccaagagagcttccaggagagaagagccatcataaattccttaagcgccctgtcttgtcggggcctgtccccaggagccttgccggaaacgtggtcgcgcctaatttccaattcgcagtgtgggcatcgtgctcctgcgccggctgctgaactggtggggacgcgcgtgctgtgtccggcggctgccccccgacaccctcaccacacccgtgtgccccgccccactcacacctggctccagggctccacccccgcgtccatttgggggatattttgtcccttcttacaggacagccccatggccctccagccccctgaggaggaactagcaggtttggggagttcaggggccagtccctgctttctacccaagtcccgcgtcctcgggggtcccacctgatgggtttgagccctggtgctgctcatggctctggggccctgagcaggtggacccccctctctgagctgtggtttcctccatgaagatggattttgtatcttccaccttaaagtgtcatgtgtggctggctagtcccagctgatgcaagcaggccctccccaggtgacatttgctgtggggtctgcattttgcacccttcagaccacttttgaaggctagagcatgcagcaagtgctgtaggattcactgttaaggccccctcctcccccagccactggccccacctggactaggttcccctctgcccctgccacccccagtctctggccccacctggactaggttcccctctccccacccccagtctctggccccacctggactaagttcccctctccccacccccagccactggccccacctggactaagttcccctcccctccgagccactggccccacctgtccaggtccctccagcctgcaggcaccgggctgggctcctctggatgtgtggtgctcctgcccacccagcccctaagcctctgctcccagctcagcctctgctgcctgggaggaatcctggcctgtggcttaccctggttgccccccaggcccagctggagccgcctcagccctggggtggggccgtggtcgcagaggccggtccccgctcactgtgcccccgccgttgcagaggaagctgtccccgctgtctgcaagaccaggacggtcatttacgagattcctcggagtcaggtcgaccccacgtccgccaacttcctgatctggcccccgtgcgtggaggtgaaacgctgcaccggctgctgcaacacgagcagtgtcaagtgccagccctcccgcgtccaccaccgcagcgtcaaggtgagccctcccctcccctcccctcccctcccctcccctcctctcctctcccctcccctcctctcctctcccctcccctcctctcccctcccctcccctccccacccaagcccggggccgcccctaccaagcagccagggtccctcctgcatccaccaccacagcgtcaaggtgagccctgcccctcccctcctctcccctcccctcccctcccctccccacccgagcccaagggccgcccctacctagcagccagggtccctcccgcgtccaccaccgcagcgtcaaggtgagccctgcccctcccctcccctccccacccgagcccggggccgcccctaccaagcagccagggtccctcacgcatccaacactgcagcatccaggtgagccctgccccacgcaggcctgagggtcgcccctactgggttgccagggtccctcctgggaggccacaaggtgcccctggtgtggctggtgggggtgcacggctgcgctcccatctccctggcaggtacactgaggcccagggaggagaaggagcacctgggggtgcgggaaaggcagggccggccggggcttctgctctgctgctctggcgacgagcctggcctcctttccacgccctagaccacagtgcgggggccgttttgggccttgcgaggtgtcgagctgcttagccggaagctgtctggcgtccccgggccctggagggtcctgtgcgggctcttcagtgggggccgaggtgcatggcaggaggagtagggggtggatattcagagcctgcattgccttttgaagtgcctgacctttggagggcccccccggcttcccccctaaagcagcccaggagaaggagaaggagtgcttggggtgggctcgaggccagacagcagacttccttccatagaatcccagggtgagcccctctttctttaagttgggggtggtgcctgccttcttcaggctgctttagcagaattccatccactaggagctgattagcaacaaatgtatttctcaaagttctggaggctggaagtccaagatcagggcgccggcagactgtgtctccgctggagccgtgttttctgggttcatagatgacaccttctcgctctgccatcagtgtgaggggcgggggatgaacatgctccctaggctgctttcgaagggcactaattccattcatgaagcctctaccctagaaactaatcgggccaggcgaggtggctcacacctgcagtcccagccaccgtggaaggctgaggctggaggatcgctgagcctaggagttcaagaccagcctgggtaacatggcaggaccccatctctacaagaaatacaaaaattagccaggcgtggtggcaagtgcctgtcgtcccagctactctggaggctgaggtgggaggatcccttgagtcgggaggttgaggctgcagtgagctgtgatggcatcactgcattccagcctggacagtagagcaagactccgtctctaagaaaaaaaagagaaaaaaggacttaatggctaccttaagacaccccacctcctaacgccgtccccttcatctgggatttcagcgtaagaatcctgggggtgctggcgttcctgccacagcagggccttcctccctggggttgcgctgggggaggaacagcacccgggtgaacttgctgaaggtcttcttgcgttgctgaggccctggggctcatggctgggccccttctccctgctttcagggaagtgtgcccagagacctgcaggatgcagcgccctgggtgggctggctttggcctgtgtttgcgcctctctggcctcattttcctcacctgtgcaatgggtctgaggcagggcctggcccttctgggagagccgaggctgctgccatcttgtttgcaagggaggtttcctgcctgttggggcatcagtctcccgttttcgggatggggttgcagggtgagtgtctaaggtatcttctagcttctgtgaggcctggctggggctggcacctccctggggctcccatctgggagggatgggctctcttagggctcttctccctggaaactggcttcagttgggttaaagtgctgttgatgctcccacctgacctgcaggacccatgagtttgagcagtgggcacaggcgggtgcggcccctagtccaggaggctgttgctttgactcagagcctcctggcttggcctcagctgagaatttttttttttttttttttttttttttttgggacagcttcttgctctgttgcccaggctggagtgtggtggtgcgatcatggtttgctgcagcctcggactcccaggctgaagctatcctcccacctaagcctcctgaatgctacaggtgcatgccaccatgcctggctaatttttaaattctttgcagagtcggggatctcgctgtgttgcccagcctgctctggaccccctgggctcaagtcagctgaggatttggtgacagctgagcctgcttttcctggaatatggggtcactgaaatgatgtttgaggatttaagttttggggctacattagtaaccattctttaactttagaaaagaattatttcacacccccgccccccactgttgtgactcctaggccccggagggagatggggcggcggggagaaggttctccgggaaggactttgcagccagccgggtcgtttcctcgtcacacgaccgggcactttagacccataactgggacttatcttggcctctggggacttggtcctctgaggtgctgggtattgagtaagcagattccacatcttactacccgggatctccaaggccactcactccccttttgaagccccaagatttttccagggccctgggagtgcttgtctgcggcactcttctgtcctcaggatatttaccgccggggggtcagggaaggaggggaggggagggcctaactcaggcctccaggtccaggtgtggctgggtccccctggcatgagcccccctggcatgagcccagcaccatcccctctgtcctgtgtgcctccctggggcgcagtttctgcctttcggtgggccttggcatcctccctggttatattttggaggcccttgtgagctctgagtccgggatgcctgtggtcttgttctcattagagattctcatgtcagttctgggtgctgggggaggcttggaggtacggggagaggctctcagcccatggctcagccttgtgcagcccctgcccttcccaccctggcctgtcatggggtgaggataggagggcttggccctacagggcagtgttctctccctcccccggccccctgaggaggctgggtggggtctagaggcttccagcaccctctggccagtgcagtgttgggggtgagggccagttccccgctgggagtggcccctgctttgctctgtgcagtggtagagccaggaccagggctctccctctgggtctcatctgccgggacagggtgtcctaaggcctcagggctgtgtcctgcagcagagcctggcggcccagttcccacctcctcagacccaggcccccttcatgttcccgcttctgggaggcgtcttctccctgcccacccatccgagggttggaggaaaacatccggctttggacccagggggctttggctgaggggacaaaggtcagagggaacaggaggcccattttggaggctcagccaagagaccggtcctgccgctgcggatggaggcggctgtcaacctggcgaggagatgggccccagagcctcagactctgtgcctgtgagtgggcatggatggggtcagctgaggtcaaaggggttggggctggccgggaggggcccccaaagtctgtccacccaggatgggcatggcatcccccatttccagtttttatgcctttccggtcaacattcagaggtctcttgttagaagatggatggtagtgaagctgggagtgtcactgcctggcacagaccctgctgggatcaccaggatgtgactgaccggcagccctgggggagtgactggccggggtccctagctgggtgggtgtttccttgcactctgcctggcacagttagctcttggtgcctggacgcccgactctcccccagacccaagcctcgggggtaggacaggagtgtgggcctgaacgtggaccatggggatgagatgccagcccgaggactgcaggggtctagcctggacggagctggctctgagcccaccttgctgtgctggaggcttccagaaggtgtgtgctcacctggtgcttgggatgggcctctgctccctggaacagagtggctggggtgttacgggtgagaagctcccagccacgactctgtccactctctggggtctggtgcaggagtctctaggtgggcggagtggaggtcctcttgagccaggctgggcaggggcctcttacacgagcttgaggtctgggcattgcttccattcttaatggatatgggggcagtgctgaaggaggcaggatcttctttttttttctttgttataaagacagggtcttgctttgttggccaggctggtgtcaaattcctgggatcacaggtatgaacctcctccacgcccgacttgagggattttttttttttttttgagacagagtctcactctgttgcccaggctggagtgcagtggcccgatatcagctcactgcaacctccacctcccgggttcaggcaattcttctgccttagcctctcgagtagctgggattacagacactcaccaccacgcctggctattttttgtatttttttagtagagatgaggtttcgccatattggtcaggctggtcttgaactcctgacctcaggtgatctgcccgcctcgacctcccaaagtgctgggattacaggcgtgagccaccgcacccagctggggtcctcatgacccaagtcagcatctggattgagtgacattccaagtctctgtcgagagacacccaggtggggctgtggggcggtggggccagggctctggactctaggctttctttccgtgaaagaggtgagaaggagtgcaggctagggatggagattcaacgctgtgtgactctgggcaaggggcttcccttgtctgtgctgtgtgttctcatctctagaatggaccacgatggtgtcctcacagggtagctgtgagggttacagtgacgggcacgtgcggtccagtcaggtgtctttcatggctaatactctgtcttggagccttgaaagggtcaggccgtaacctggagttggggtggggtcccccgcagggagtggctgtcccaagccctcctcagggggtctctgcagcttctgggctttgtagcagtagggactcggcatcccaggtctagaggggtgacggcatccctgggttgtagtcttgggtgagttcgcgccgggagtgttgaggtggggcggcttacgacgcagatgaactcagccgtggggaatcggaatgtctggtgtgataaggtgcagcccacatctctgggacggaaaaaggggagggacatggggaccccccccatcacttgggcttcggcttggggcctgggggccggggtaccccccgtgggggtcctgaggacattgtagtctgttctttggacttggccttcttttatggaggaggtttttgtgagaatccaatattcattttgtgttcttgggagaaaaatgtagctatttcctggccagacagaggtggcggaacggcccggaatcctggcatactcagaaacaggtgcaatcatcgctgtttgtttttgtttgataaaaacgggcttgtctgaggaggcagtgggttcccagacgagcggccgtgccatgtgcctttcgcacggtgcccagaggggtggcatttctgttgtgtcctgggagcccacgcgcccgcggtggccggccatctcgagtggttgagagcgagcctgcccctcgcctgggcgtctggtgtctggccagacgggcctgcggtctctgccgagccaggccctggtatctgccctgccgagggaactaggtgaggctgcttgttgaccaaagaggctgtgccatccggagggtcagggccgggagcagaacagggcgccctgcccgagcccatccccacgaacccagatttcagagcccacctgccccatgcctcacttggccacccctgcagaggctgggggtgggtgggagcagcagagtatgggtgcttcgagcctgggagatggcagggtgtgaggctggtgctgttcctcctgctgggacctgtgtccagggcctccaggggaggggaggaaggaactcggtccctgctgaggcaggagggggctgggcctggttttgcgcactgggatccctagttacttactacctgggcagttcttgactcagggagggctgaggacatgcttgcagggctgggggtggctgaggtcccaggtggccctgctgctcctcttggggctttgctgcagttcatcctcgggccgggcctctccgaccccaggccctcaacaggagggtggctctagacccactctctgcctgtggtgggtgggtggtggtactgtgctgagcttggggaccagggggtgggttggttttggggctctggattagaatccacgccagtggcagcccactcttgaaggctggctttgtcctcgtttctggggccttctgcatgtgcagcctcatttattcctcaactcctgggtgggtgtgattggtctccgttttacagatgggaggtggaagtgtgtgcacggcctgcggaggcctctctctggaggattctgtcctggggaaaggggcagattgccgcgggagtgtggaggctgatctgaggcctcccgagtggaacggagccccatgtaggaagcggcagtgtcctggccgctttctctcacgctttgtgacgtagcgaaacctcccaggccaggtcctgtttctgagctggctcctgaccccaggcgccccacgccctgcaactgttgagctcatacttggctgtctgctcacgccccaggcagcccagaccacttcacacgcctgcaggcaccctttgcactgtgggttaaccattaactcagcctcggacaagcctggtccccagcgccttagggaccggcttaccttcggagcctgcctggtcccagggtgcagagctgaccttctccctgggggccctgctgatgcccagtctccagagtctggagtccccccttccccccaagaaggttgggaaacattcccctcctccctccttcaccctcctgactgcctgggaggcagggccactgggctgggggcatctggccttgggctgaggtctcctcattcacccagcagcgtgcattcccccacgcccctgtgctcagggggtgacccggcctccgtttcctttctagcctcagtttccccatgaaccgtgaggggtgaagtgggtgatccatagtggctgttcttgcatttagaccctgcatgcggcagggctggttccgtgggcacagatggagcgcctgctgggtgctcagctccccagggcctgggagggcaggaaggtggtggctattccctggtgtgtgctccagggggcaggtgggacagcctagcaattagggacaggcttagttagagcttgcctgcgcctcagtttgttctgtaaatggaggtgccagtcttgcctccttgtagcatggttgggaggatgaaatgagtgctggggtttgggctgggagagccaatactctactcatgcagtccctggctgtgtattaggggtctgttgatgccaggcgtgtgcgtgcttgcactctgtgtgtgtagtaagattcccacgatggggcccctgtgtacattacacatgcatgactggtggggggtggagttgcctccccatgacagggtatgtgtgtgcattatacaggtgtgtgtgtggggtggagttgtgttcccgtgacagggcctatatgtgcattatgtgtgtgtgtgtgtgtgtgtgtgtgtgtgtgtgtgtgtgtgatttcttgcctctcttgttgaatgcctgaagctcccctctctggcctggactgggccattgtctgcctgcagctccccggggaaggggctgtggaggcaggacccccatgttgtggttttgtgcctggagaattgagggcaggcgtggctcgcagacaggcaaagtccagtccgaagaggggaacccagctgaggtctggttcgcttttgagctgcctgtgcctgatagccacggcctgctggcctgtgctcctcctggatcatcttgtgtagcctcggtgatggcccaggatccctggccctggtttccgaggtcaggcctctccgagcccaaggagagcctcggacctgggggagccatgaggggaccctgggtatgggtctgctggccctgctgcctggggccggcggggaggtggggccctcatcaggccagcagctgggattatcatctggacgctcaagtccacagcaaccttgggctaggatacagccacgaaccccccattcctaggccatggctttaaatttttttttaatattaatagagacagggtcttggtgtattgcccaggctggagtgcagtggtgtgataccagctcactgcagcctcaaactcctgggctcaagcgatcctcctacctcagcctcccaagtaggctgggactacaggtgccaccatggcttgctaatttttaaattgtttttagaggcagggtcttactatgttgcccaggctggtcttgaacccctggagttaagtgatcctcccgccttggccttccaaagtgctgggattacaggcgtgagccaccatgctcagcctggcttttaaaatgtatttaaaaacaacgtgatcatttgaaaacatttcccagctgcacatccacacacaagcaaacactttccctggccacctgcaccccagaactcccaaacttccacaccttagcagtgtgcatccttcagcccccccaggcacacgtgaacctttgggtttattttaaacaaaaataggatgagtctgctaaataccatgctccaacaccaggcgcggcggctctcacttgaagttccagcactttgggaggctgaggcaggaggatcacttgagtccaggagttcaacatcaacctcggcaacatagcgagatctcatctcttccacacaaaaaaaatatttaaaattagctgggcatggtggcctgtgcttacaggtgggaggctgaggtggaaggatcacttgagcccaagagcttgaggctgcagaggctatgattggcctaggtgacagggtgagaccctactcagaaaaaactaaaacacacacacacaaaactgcactgcagcttgtaggtttttcacctggtactgctacactccccaccacaaggtagtgtttctgggaggaggtcaggggtcaggctgctctctcctccctctcagcctgtccccggctcccagcacgtcgtgatgtccgaagctccatgcaggcattcatggccgggctctgttctctctggcaggtggccaaggtggaatacgtcaggaagaagccaaaattaaaagaagtccaggtgaggttagaggagcatttggagtgcgcctgcgcgaccacaagcctgaatccggattatcgggaagaggacacgggtgagtggctgccttcgtcggcatcggtgttggagaacaggtcttcagagccttgcttttggggtgttaggtggcccccttgagcgcaacgcttactgctgtgagcatctgggctgctgttgaaggattcgttgccctgctcccgggccagatgcctgcgggggagacggatcccacacctgcaggtgtccggtggggagggtggcccaagctgcggcactggcaggagaggagattcaggtctcactgagaggggctgggagtgcataagacacccaattcattagtgggctgcggggctgagctgagaagaatctgcagaagggcctcctgccagggtgggcgggaggagcaggttcgaggactgcagttgccctggctggctggggtctctccttcaccccgccacgcggactccacccaggagcagaatggcttctgtgccctgctatggctgggccctgggagcatgaggggactcagaagtttctcggtgccagggtgctggccttctcttctggaaagataaacaaatgccgtaggtatttgttgcttcagttcttcaccccgacggccgtccctcggcccactcaccgccctgcccttttgttaacaggaaggcctagggagtcaggtaaaaaacggaaaagaaaaaggttaaaacccacctaaagcagccaaccaggtaggactgtctgccggacacactgagtcctgcagggcggggaggtgcaactgactgatcacaccagcaaatcacgcttcctgtctcgccgggtgcggcggggatgtggccctgattggccttgatggtgtctgctgggcttgggtctccttgctccccgtccgctcctgcctcgcagaacgccctggcccgtggctcactcccgcttgggagcctgcctccagctttgtccttctctttgtcgttgattggggatgcaggagcattgcacatgaatggaacaggttgggcgacctgagcagcggtggggcagctctgagcgcctggccactctgggatcacccaccccatttgacagatgaaaaaactgaggcttaactgagattacagataaggactgttggaggctgaatatatctggaaatcctttataaacgtgcagggctgttggctactgtgttggaaattgcatttggctgctagtaacaccagacagcacagggattgagataagatcgagcttcatgactttcatctaagggtgggattgcagagcagggagggtagtcttgaggtatcatcagtgtccgccttctgtctggctagtggcatccatctgcagttgcctcatggcccaaggtggctgctaaagctccagaaaccacatctgtgctccaggctggaagaaggagtgagcgggggggggggggaagggcaaaataacacccttagagagctatcctggaaatcccacccagtgacttttgtgtttttctcagctgccatccctccactgcaagggagcttgggaaatgtctcctagcaagacatgtcgcttcccagatggaggtgggacctgggcagccgccatcatcacggaggaggcagtttcaagccttcctggtccttggcattggcccgtctggcttgggaaagttggagccctgtctggcctggttccccctcctggcacgtgggactccatggtggccaaaacaaatagtttctttagaagagaggaggatctcagagatagggtgtctgagaaccctggctcctgtttgcaatgtgggacttgggcctgcgggtgaggtccattcatgaggagcctcttgggaggaaattgtccacttgggcgggtctttgaagcagtccaggactgttggtcagccttggctttgtttgctgaaagtgtggcctggtgggtggttttgtgcctgcctgtgggtcccatttctacagagcgttaggctctggcctccatgggcctgctggtgacagaccccatggtgagaggctggcactcctgttgtcccatgcctggctggtactcatgttcagcctataggcagcccacgtgttggagtgtgcgatggagaggccacatgggatgtggaagaattgttcttaaacgatcagcataggtctgcctgggtgcagactcttctgtctggctggtggcctccatcctcagggttgtctcatggcccaaggtggctgccagagctccagaaatcacatctaagccctaggctggaagaaaggaaggcagagagaagggcaaatgagccattcttggcctcagtttcccccatctgtacaatgggagaatggggcttggtctctagacatgttctgtgagatgctgtgagcctaatcccaattcctgtcagggtactgcaacatggccaatgtggcaaatgtgattctggaaatttcttgaaaacttgaaatccctgtgtgcccctgattgggttaaatgttttcaccctgttttcctcctatgcagccatgtgtgtgctgggtggttcacttggtcggtggtctcagtgtctgtctttcccttctccctgcagatgtgaggtgaggatgagccgcagccctttcctgggacatggatgtacatggcgtgttacattcctgaacctactatgtacggtgctttattgccagtgtgcggtctttgttctcctccgtgaaaaactgtgtccgagaacactcgggagaacaaagagacagtgcacatttgtttaatgtgacatcaaagcaagtattgtagcactcggtgaagcagtaagaagcttccttgtcaaaaagagagagagagaaagagagagagaaaacaaaaccacaaatgacaaaaacaaaacggactcacaaaaatatctaaactcgatgagatggagggtcgccccgtgggatggaagtgcagaggtctcagcagactggatttctgtccgggtggtcacaggtgcttttttgccgaggatgcagagcctgctttgggaacgactccagaggggtgctggtgggctctgcaggggcccgcaggaagcaggaatgtcttggaaaccgccacgcgaactttagaaaccacacctcctcgctgtagtatttaagcccatacagaaaccttcctgagagccttaagtggtttttttttttgtttttgttttgttttttttttttttgtttttttttttttttttttacaccataaagtgattattaagctttcctttttactctttggctagctttttttttttttttttttttttaattatctcttggatgacatttacaccgataacacacaggctgctgtaactgtcaggacagtgcgacggtatttttcctagcaagatgcaaactaatgagatgtattaaaataaacatggtatacctacctatgcatcatttcctaaatgtttctggctttgtgtttctcccttaccctgctttatttgttaatttaagccattttgaaagaactatgcgtcaaccaatcgtacgccgtccctgcggcacctgccccagagcccgtttgtggctgagtgacaacttgttccccgcagtgcacacctagaatgctgtgttcccacgcggcacgtgagatgcattgccgcttctgtctgtgttgttggtgtgccctggtgccgtggtggcggtcactccctctgctgccagtgtttggacagaacccaaattctttatttttggtaagatattgtgctttacctgtattaacagaaatgtgtgtgtgtggtttgtttttttgtaaaggtgaagtttgtatgtttacctaatattacctgttttgtatacctgagagcctgctatgttctttttttgttgatccaaaattaaaaaaaaaaataccaccaacaaaacccgtggacgtga

SEQ ID NO: 51 - DNA, 43479 bp, Homo sapiens
cacttccgccccgggcgcggctcgggccacgcccacctgtcctgcagcactggatgctttgtgagttggggattgttgcgtcccatatctggacccagaagggacttccctgctcggctggctctcggtttctctgctttcctccggagaaataacagcgtcttccgcgccgcgcatggagcctcccggccgccgcgagtgtccctttccttcctggcgctttcctgggttgcttctggcggccatggtgttgctgctgtactccttctccggtaggaccccggggcgggttcgcgcgtccgcggcgagactagagctctcctcagtcgggcaagagtcgcggggcggggctcacagcaggccgtgcctgtttggggacagggttctctgaggggtgcagtgctcagatcccgggggtatgtggcggggaatgcggggaccacgcagagcccgaggtgaagcttgtttggtggcgtcgtgtgcgcggccagcatttacgcaggatctggctgcgtccctaaaaaaagcgtgaatcgtgttttcgggattgagccagtcggccaggggagcgcggactgggcgccctaggtgagggcttgttctggagtgcacaggtgcgtgggagtgttgctagggcccgtgctgtgtccgtggtgagagtttgccctgtgttcccttggtgccttggtgagtggggtgttcattagggcttggacagtacccgcggtaagggttgcagtgcgtctgctgtgccccatgtgctgggctgggcgagcaggggcctggccaggtgttgctgggagcgtgctgtgcgtaagtggcctgtgtgcagagttcactgtgggcaagacagctcaactgtttgctttgaatggagtgagcgcggactctggggctagggagggcatgttgagtgagagcaggctctcggtgcctggggttagagaggtggtaagggcgcgccatgctttttgtgccttctgtgaacagtctccgtgttacctgagctcctattagtttgtaaatggctgcttttttggggggtgggtgggccatcgagtcttcttcctgttcccaaccaatatagatagtatctgattccattgcctaatggctttttgacattgttttccttcttttcattactttgagtcatatttgagagatgtgaaacaacctaaaaaacaatggtagccaaacctagtgagaaattagtatcctaacaaaggaaggcagataatgttaatcttgttttcccctgcagctcataagctaaagcttaaggcctatcccactaaatttattttgtatttcattgaatggaatcaatacttttaaaaatgcatgctaggccaggcgcagtggctcacgcctgtgatcccagcgctttgggaggcccaggcggggtgattgcctgtgcccaggagttcaagatcaacctgggcaacatggcaaaaccttgtctctacaaaaaaatacaaaaattagctgggcatggtggtttatgcccgtggtcccagctactctgggggccgaggtaggagattcacttgagcccaggaggtgaaggctgcagtgagctgtgatcatgccactgcactccagcctagatgacagagtgagaccctgtcaaaacaaaacaaacaaacaaaaaaaaaacccgctaagaaatacatgcttattgtgcgatacgaacagaatcaaaagacagctatttttaatattttggcatatttgtttctgccttcatgtgcgcgtcatgtgtatctatgtccaaattatatttaggatccaataacatgtatagtttctacgttgcatttttttccttaggagcattcattcaacgaatatgggtcttgtatgtctggtgctattacactggtaggcaataacaaaccattcctattttcttgatccttttttcactatttgtttacacacacattcatgcaggaagataagcagggactttgttttgctcaatgataagtgctcagtgccgggaacacagtagataaccaataaattatttgctaaaatgtattgggattggcagacattaaaatccaaaacataatagtgacaaataaattatgaaccaagggaagtgctctggaggcaagcagtataattttcagatataaatctgacagcatttaacaaatgattggagagagggaaggcttctctgctcatcaaacagactttggggcatctgtgcttgctgttccctcagcccaggaacattctcctcctgacctgctgcagaaacagtctcgctcttctgcaaactcagctggaatgttacaccctcagagaccttctctgatcaccccacctcgcgacccccccatctcaggttgaacacatacaacccagttcaagtccctcttcacttgtaatcacccttttaaaatgaccttttctgttctttgtctcaccctgtcagaatgcagggatcctgtctgtcttgtcgcacttgtggttccaaaagcccgatttgtttacctctgtatctgttaaataccagaaaattaaatatactatttggctggggcttagagcctaggaaaaagttcctcctgcctccaagaggaaggttctttaaagagctatgctcaggatggtctttctgcggtacctaaaaagctagggcagtggcagctgagagccagaaaggatctgtctcccctatttgttgactctgcagggcttccagtacttcagtcttgcatctcactgatcattaaaacgttcattttgaaggagggtaatgggagtagggagtagtggtgataagaagaaaacaaaaggacttttttttttttcttttaagattaatgtttagaataggcttagtgctagaagttcagcctggacagcataagcagacctcacctatacaaaacatgtaaaaaaaaaaaaaaaaaattagccaggtgtgatgttgcatgcctgtggtcctagctacttgggagactgaagggggaggatcactggagcccctcatggtcaaggctgcagtgagccctgatcatactccagcttggataacagagcaagagaccctgtctcaaaacaaaacaaaacacacacacatacacacacaaacaaacaaaaaaagaaacaaaataggaagctgaagaagataatgaaagcgatttgaaatagaggaacatagaattatgaaatgaatagggtgcaacatggaaaataacaaaactaagaatgaagagaaggaaaagcaaggttaagtttgaggttcataagggtaaatcaagacaggtatgaaacctagagaaagtaaaaatgagaagtcacgatgctaggcagagagaatacgtgaattaaaataaacattcaatttttggagcaactcactctcacaaggagaaggtttcgtaagcagacagtgctgtgcatgggagacctgccctctcaaaggtagttgccaaatggttccagatagttgaaggaaacatgtatcaaatttcaggccagtctcattcctccagaagaggagctgcttttttggacaaaacccgcaatctcctgttgtgcgtggtctcttctgcctattttaggtgttttccttatttccagtgaaagaagccaagatcagtaagcacttacacagtagcgtctcagtttccttactgggcatactacaatgcaaagagagcagtccatatctggtcacctgccaggataccagaagactgggagataggcagcacaagaaatggcctaatcttctttctccattgtgctgtagaatgattattttcaatatgaaattgattacaatatattcttcacattgttttgtgtttgacagcagtggattttgaataccaaattttttttgaatagctactctgagtgacatattgtgctgggtgttgtggccacatggatgaatggagttggccttgttaactattaaacacaaaagcatgtgatagttacctgagagatccatgcaggggagagtccaggggaaggtgactgatcactgcttcccagggggaggcagaaaatgcttcctggaggagatgatgggtggattaaggaagatgagttgagcaggagttgtagctaccagccagggaggaagggtattcagagcagaggaagcaaggtgagcaaaggcaccaagatgtgacactactggactgccaagctattcagtgtggcagagtagggcaaaggaggcaagaaagaaggaagaggattaaatcacagggtgagtaattctgaaaagcaacagactcatcaggagtaaacactcaccatcataaattcagactttcacgttattacctgtccttttagggcaacttgagccttttgtttgacttagcacaacatgaatccaaactagggttgttttgattttcccaggcacggtagcagacaatttcttgaatacttatttgcagatagagtttgtcagtgtcagcatttcttgtgcacccacaaggtgagtatagtagaaaaagaagaacatggttcttgacccccaggaacttgccttttaagagaagacaccctgaagtgacaagctgttataagttagtgttttaaactatggaagaacaatctgagcagagtactctatactgtagaagacttcttagaggagaagttacttttgaaatgaatttagaaaaatgtggggaaagatgcatccatatatattttaagatcaaagacattaatgctgtctcttcagtttattgtcgaatgtttattcccaaacaaaccaaaagctaataggatgttacttaaaacatgcaagtcccatttcctccactgctatgagcactcaggtaaaagcatggaacagtcatttaaaatcttgccaagggcctttctgttttttctgtactacctgctgccagaccacagtccatggctgatgaaagtgatatcagtacttcatcttcatgttcctattctcttatccctagatgcctgtgaggagccaccaacatttgaagctatggagctcattggtaaaccaaaaccctactatgagattggtgaacgagtagattataagtgtaaaaaaggatacttctatatacctcctcttgccacccatactatttgtgatcggaatcatacatggctacctgtctcagatgacgcctgttatagtaagtaaacaaacctcttttttttttctgcttgctctagagatttgcatacattttggggtacatattccactacggtgatgatgattttcttcttgtaaaatgaggttcaagataacaatgcatttttgcaagctttgagaaatcaaaatctccaagaaatcattttcctggcaatagattgcctgggtgaatatgaatcttaagtttgcccttataataagtaaataatgaaaattatattcccacccattcaaaagagcactgcagaattttgattttgattcagatctgttttataactggattgaaaactatcaaaattattttctttcaggagaaacatgtccatatatacgggatcctttaaatggccaagcagtccctgcaaatgggacttacgagtttggttatcagatgcactttatttgtaatgaggggtaagttgctccttagaggaaataagggaagtgttagtaattttatttttgttttgcttctcttcttaagcattcctgtaaacttaattttgctttctatgtgacaagttatacttctagccaaacaactcttggatgttttatggagataggcaagatatatagtaaatagaaagtaattgatatttaaggaaagcaaaactacttgctgtttctgacaataagtctgttgtaagcattaagaatgtagtaatcatgagaatttgtccttcacaactgagtgtcccctatttaaatctgccaactcttagagttgaagtagggctcacaaaaatgagaaatagaattgccaactaaagatacacttgtatccagatgactctgtaaagtgttatcagaccaaaactgacgcggttagcctttaccatcatgttgatcaaaatctctcagttgaaaaaccttatttttgagactgctacagtgtgaagcatctcaagagcaggtactgagccctcggtaatagcctttgttctgtagggttttgaagttgtatatattggagatactagacatttaagataaatgtgcatttatagagtaaatgtaagtattctgctataacagaatacttgaggctaggcatttataaagaaaagaaatgtatttggctcatatttctggaggctggagagttcaaggggatggcagtagtgtctggcaagggcttttgtgctgcatcataacatgctggaaagtgaaagggaaatttagcatgtgcaaaaaagacaaagcacaagggagggggttctcgctttataacaacgtgctcttatggtaatgaatccaagcctacaagaatgagaactcattccctgaagaattaatgaagaccctctagaaaggcattatacctcttaatgacctagtcatttcttaaaggccccaccacctctcaatgctgttacactggcaattaaatttcaatatgagttttggtagagacaaaccagattcaaacaatagcagtaacacaccataatatagaaaaagtaagtgagtcttggaggaaaaatcagctgtgactatgtaaggcaactgacagtttttaaaatttggtcaagtagaaatattggaatattcagttgacacatactgcttgctaggcacaccgagggataccaaaactttaagacagtgaccttcctaaaagaagttctaaccttattgagaaataatatatactgagagcaataaaagcaaaatactaaatgagaaataccaaataagtagaattattcatgataattactctaagagtccagaaggaggagagattcctgtgaatttaaatcagggaagatttcattgagtataggggtatacttaatgaaagtattcttatactcagtgagctattcctagaaatacactctgttctaaataatattaatagaagctaaaactcatgtagcactatctatgtgccaaatgctaacttatctaatcccctaaacaaccccatgtactgttatccccttttaatcaattaggaagctgagtgaaggaactttaagtgacttacccaagctcaagaaactagataagttgagaagcagggacttgaatctatccattccagctctagggcctgttctctctacacagtccttgtccttactgtgcaaagtggtgtgagaaaaggcacagaaatgaatgtgtaatgtgattgcaggaggcagcaaagaggctgggtggaaaggcacagcagatttatttagacatctttgctcttggccaatatatattcaaatggggaaactctatttgattaaattgcagatttatttagcactttcgttatatagtatgttgtttaagaaaccaccccctcaaactactgtagtgtagaaaagaaaccatataaaaaattccttcattattatgtgtgtcttattaattgctatacaaaacagtaaccctttcttttctcatttagttattacttaattggtgaagaaattctatattgtgaacttaaaggatcagtagcaatttggagcggtaagcccccaatatgtgaaagtaagtaaattctttttttttaaatttagaccagtagtcctcaaagatttttgcctcctttacaccctttacactttaagattaacaaagatcccaaagaggtttcttttatgtgggttatatctattggtatttatcatattggaattcaaacggagaggtttttaaataattattgattctttttggttttgtttgtttttcctaagacacggtctcaggctatttcccaggctggggtgcagtggcacaatctcagctcattgcagcctcagcctctccagtagctggggcttcaggcatgtgccactatgcctggctttttgtaatttttgaagagacggggttttgccatgatgcccaggctggtcttgaaatcccatgctcaagcagtctgcccccgtgggcctcccaaagtgctgggattacaaatgtgagccaccccacctggcctgattaatttgtaagaataaatgcaatacaaattaacatatgtaacataatttttatgaaaaataataattttccaaatcaaaataaaattagtgagaatagtggcattgttcacattttttgcatatctcttcaacatctggcttaaagcaagattgtatttggcctgttgtgttatcacacaatatgtagcctttggaaaaatatcactatattcttattaggatcagagtgaaaaaagacaataatattttggtggtattgtgaatcaccaatttagaaaatggatatatttataaattgcaaaggatttcttaactagcaccgagttaagcatattttctcattaattgtcagcatttcttgtgatgactagaacagaacttagcatggccttccaaataaatacaggcgtattaggccgttttcgtattgctctaaagaaatacctgagactgggtaatttataaagaaaagaagtttaattggctcatgtttctacaagctgtacaggaagcatggtgctggcatctgctgggggtttgggtaggcctcgggaaacttaacaaccattgggaaagacagaaggagagcaaggtgtctcacatggcaggagcaggaggagcaaggtggggaggacgggaggtgttgcgcacttttaaataaccagatctcccaagcactcagtatcacgagaacagcaccaaggggacggtgctaaaccattcatgagaaatccacccccatgattcagacccctcccaccaggccccacctccaacattgtggactacaatttgacatgcgatttggtggggacacagatccaaaccatatcaataggtatttacactttaagaaaatgagatttgttctgaaagttagttactacattaatggtttgaatttgggatgatatatttgctcatagaaaccttcttttaaatccatattgaattcacaaacagcttgtagaaaccctatattgacaaatttattgaagacacagaaattttactaatgctgtcttaatcttttacatttcctttcctctttttcttcatttttaagaggttttgtgtacaccacctccaaaaataaaaaatggaaaacacacctttagtgaagtagaagtatttgagtatcttgatgcagtaacttatagttgtgatcctgcacctggaccagatccattttcacttattggagagagcacgatttattgtggtgacaattcagtgtggagtcgtgctgctccagagtgtaaaggtagtgtttcaatttatttccttcttcatttgtaaatactatggaaacattttgtaaatagtttcatctacagataaacaaagcaggtgtatgtgcttcctcctcctgtataattggtttctaatttattttaattcaggtcaattcaagtcaaaaaatagttctagctagagttccctatttctcacccctacatgttcttggcatttcattttatacagtgtgaactactgtgtacctgcatgagttagaagtttttgtttgaaagaaccaaaaaaaaaaaatacacactggcttaaagaaagtttcatcttgtattacaagaaatctaagagttctggctatggtagtggtaaactgtgacagactaatcgtctcacaaataaaaatgataaactctggataaaaaaaattttttttttaaagaccaaatgtttaaggcactctggagtgaccaaaagtatgaagaccatgtaggggacttgcccatttaaagaaagaaatcactgaataacagtgatttaaaagtatatactccccaagtacacatgaaacattctccaaagtagaccatattctagacaataagacaacttttaacaaacttcagaaaattgaaatcattcaacatgcattatcacaatagaatgaaagcagaaatcaataacaaagccaatccccaaagaattggaaagtgtacaggacacttctaaataacccatgcataaaagaagtagtcagcagggagattagaaagtgttttgaattgaataaaaacacaacatctcaaaatatccaaatatgtaggatgcagctaaagcattgcttacaggggaatgtatagcataatatacttgtgttagaaaaaaagaaaagtctcaaatcaatgatctaattttccaccttaagaaactaaaaaagagcaagttaaatcccaaactagcagatgtaaggaaatgataaaaatagagccaaaatcaatgaaattgagaaaagaaaaaaaaatagaggaaatcagtgaaaccaacagttgctacttggagatcaataaagtgtgtaaacctgtagccagactgacaaaaaaagacgcaaattaaccaatactgagaatgaaagaagtggtggccaggcgcggcaccccagccagcttgaagaccctgccctcctgcagccggcaggggcagtcactcccggacttgtccttttagaagttccagctttaccacttgctggtggagcccaaccactgccgcagggtcctcatcgccaacacgcctggcagatccaagaggagatggcccaggatgagacgtggcacacacaggcacccgagagtgtggggttggcgttgttccactgcctggtttctgcagagatcctgtgcctgtggcctgtgcccgccatgtggaagccagagggggtgtgccatgccccccgctttggacactgctgcgtgaaggggccagttttcagacctttgctctgtcacctcagcactggcgccaggagccctgaagagcagcatctgggagacggacagccctggggaaaatagaggaggcgttcagaagtagctagatgagatatttgaaatactgaagaccaaaaaccccagtttgcatggaagaactggcctcagatgtggtcagttcctatgatgacctggacacacggtgctgacccacacgatgggaggtggccctgcaaagcattcagaggcttgggcctgctgccgtccggcctcccacctccagctgcaattgcattctgacctgggcaagtaggaacacgtagtggagatcctgatggagacctgagccaggcgtcccggagtgctggccaggcgtggagtacgggatccagctaagggagactggccagcctatagccccccagccttgctggctcctctgctaattccagcagggtctgcagccccagacccatccccttccttcccgtctgcagagggcaggccagaggctggtctcagtgggagctagggctctcctcaagggctttttgaccttgggccagtcttgacatccccacagccctgcgcccctcatcacttttcgtgtctctcggagacggcgagctgcaactgcagcaatcttgtttaaatttaggtaggtgaatttcttagaattaagtttcatatgttttgagcaataagttttcttaagatatatatattttaatctttttagttttatctctgaatattttttattttttttcaatgtattttttttctggaaacattctgtgctgctacattagagcctacacagtttagttggtacatttcattcttttaaggttcaaataagggattttattttccagtgagtttccttgcattgttaacaagtcaacagcgttaacgtatgattttttggttttttttttttgtatactttaaatttgtgtgcaacccttctcatttatgccctgtgttacagtgagagcttggtcaaagtggggaaaacacacacagctgctacactttttttttttttttttgtcattggaacatttgtgccatgtcttcctagacttaagtgtaaattatggagggttttatttgacaatttatatgtaaatgtcattgaaggctaaggttaaatctttggaaatcacaggcaccagttgatctttagagacctcagatcccctcaggtggcgccttgtgataggcggtgttctgggaggcttcctgtcaggttccacagcacaggcacctgctctgggcacggactgagctcctggggtgtgcacggagctgcggtgcgccagtcacatgcgcttggaaacagcgtgtgctgctggattggaaatgcctacgttgctctgttaaattggtgctggagccaaaacctaaggttaaatttaagtctagaatgaaagaaatctgaatccatgtaattaatggccgctcgatcttgagagtccttgacggccctgcctcaggaagtgaggtgggggtgcctacacctttcactttccttcctcacgtccaccccgtatgtgtttctcatcctttttctgacttccccccatcccttagccaaaaagctttatattcttttgtgcatatggtcattctttaatatcagtgatgtaaactttacttgattactttacaaaattattcaacagacaaacaaaagaatgaaaaagagaatatcactaaatatcctacagacatttaaaggatgacaagggaatattataaacaactttatgcctacaaatttgacaactgaaatggacagattccttgaaagatacaaaatgtcaaaactcacttgaagatatggataacctgaatactcctatatctaccaaagaaataaaatttgtagttaataacctactgaaggtccagatggcttcactggggagttctaccaaccatctaaggaataaatcacagcaattctacacaagcgtttcaagaaagtgcaagaggagggaacacttctcatcccattttatgatgatagcattgtccttatacgaaaaccagaaaacaaaaacattataagaaaattacaaataatatccttgatgaacacaggaccaaaaatcttcaacaaaatattagcaaaccaaatcctgtgatacataaaaagaaaagtaaatcatgaccaagtaggatttaccctatgaatgcaagattagttcaaatgcaaaaattaatcagtgtaatttgccacatcagtagactattaaggagaaaaaaaatcatgtggttatcttattagatgcaaaaaacaaagaaaatgtttgacagaattcatcatcttattttttcatgataaaacttctcagcaaactaggaacagaagggtactatctatcttaccctgataacagacatctacaaaaatctcacagctaacattacacttcatggttcaaaaaaattatacttagtggtaaaaagtaacattgtacttagtggttaaaaaaaccttacttacatttctgtctaattaataaagacctaattctggaaggaaaacagtgaggatgtccactcttaccactccattcagcattatattggagatcccacccagtacagtaaggcaagagaaagctattaggcacacatgttggaaaagaagaaataaaaactgtctctactcacaatgagatgccactaaatacctattggaaaggccgaaatgtaaacacacacaccccaaactgacaataccaggtattgacaaggatatggagcagatgaaactctcatatactgatggtgagaatcaaagtgcaatgaccactttgggacatttttggcatttcttataaagttaaacatactcttatcatacaactcggcaacccaaataaactgaaaacattttcacacagaaacttatatgaggatgttcacagcagccttattcataatcaccccaaactgcaaatcgccacatgttcttgagttggtgaatgaatgaaccacctgtgctacctctaaaagatggactcgtactcagcaataaaaaggaatgaactgattcatgcagcaacacaaatgaattttgaaagcatcatgcttagtgaaataagccatactaagaagactgtaatttcatttatgtgacattctgaaaaagtcccactatagggataaaagcagatcaatggttagctggttgtggaagtggggatgagggggaagaggggtaactcacaaaagagcatgaggaaattctggagagtaatggaacttttctgtatctttactatggtggtagttacatgattatttgcatttgtcaaaactgatacagctgtacacttgaaatggtgaattttactgtatgtaaattatatccaataaaccaacctttacaaataacattaggtacaattagacacaacaaaaggtcagtgaacctgaagacaggtgaatagaaattgaaccttatttaagaagaaatgttgactaaagaaagagagaggcttacagacctgtgggagagtatcaagcagtgaaacatacatgtaattggagtttcagaaagacaggagagagaatggtgtaaaatattatttgaaaaaatattggccaaaaattatccaaattagatccaaaacaacctcagatccaggagattcagtgaaccttcagcaggatgaataaattattaaaatttaccaccaccaccacccccctgcagtagtttggtaaaaactaccaaacaaaattttaaaaagcagccagtgagtggggaaaacaacaaaaacccgtattacatttaggagggcagggacaagtaagaatgacagccagccaagttttcttaagaaaatgtggttacaatatggttatctctgttagtgctgaaagaaaaataaaacaccctagaattctgtatgaaggagaatatattagttaacatttaaagtcttttaaaaaatgtttttaacatcttgcattccattccttgtctctgttcacactggaaattactactttgtactactttttctgctaaagcagatatccattaattctgaggtttctctaattttccagtggtcaaatgtcgatttccagtagtcgaaaatggaaaacagatatcaggatttggaaaaaaattttactacaaagcaacagttatgtttgaatgcgataagggtttttacctcgatggcagcgacacaattgtctgtgacagtaacagtacttgggatcccccagttccaaagtgtcttaaaggtacaaaggttatcttttttctgtcttggtttgttattgttgttgctgttcattttagactttatttctttgatattaactatcagtcatacaaaataactgaaaagaaacaattttagtatttaactctgtcttgtattcatttctatgccagatgaatgacacgaaattcacataaaattctgctgttgtgattttttgtgcttttccagggttcttagcacgttatgtacattgcatgggtatatgcttttaatatttttatgtataaaaagtgaattacaacaactttttggaattgaaacatgggcatttttatctaagtaagtcaacaatggcataattcatataaatgaaatgagagcaataactcccaagtggttgatcttctaacattattttgtttcctagtgctgcctccatctagtacaaaacctccagctttgagtcattcaggtttagtagcttcttccttatatgtcttcttccttatatgttacaagatataaggaattcctggagaaattgccagcaataactcccaagtgtttggtccaatctacattattattttgttttccagtgtcgacttcttccactacaaaatctccagcgtccagtgcctcaggtttagtaatttcctgcttatagtttttcaaaaatcctttaaattcctggtgattttttataaaatccttcaaatttctggtgatgttcacttatttttagtaatgaaaggagggaggacatttgtatagccattttagttgttatacatagtgattctaaaattatttgccataatctgatataaacaggaatatgaccttgggaaagttgtataaattttgaatgtgtttatatatatatgtttacattatatatagagaaattgatttagtaccttccttattgggtattagtaaggtataagtgggatgcatttaaagcacttagcacagtgcctggtgtagagaaagctcttagagctagccaatatgacttatcctacacttaaattaatgttagggaaggggaaggttcatgtatgtttgttagtatgtgtgtgtgttaatatgttaatatgtttgtttgttaatatgtatgttttgtgtcatcaactttgctattttattcttttcagaagtgatctgttgacacctttactgagtttgttcctattgcaggactctttcatttcctggaatgcaactagtttgagtcttctgatgtaaaacatttaaacagggaaatttctgctgtcctcagaacaagatctgtatttctgcctcttccctacccacccctcttccacacctcataatgttatttattttttttctctttagtgggcagttttatctggcaatagcaactcaattttatagcaactgaaaggcaggaaaagtccttatttactgaaataaaatagaagacttttgcagggactcctggtcaaccactgtgcttatgactggagagattattttgatatgatggaaggaattatcctgatttcagcactaccatctctggtttcactttgcttccagcagaagcaagagacaatagtaattgtgggtagcacttcagtctgggcagactgtgcttagttaacatcatttctgtggtcttcagtttccctttagtataatgtgagtgttgaactgaaatctcaatcactggcttctaatttggttatatatttcctatctccctaatattttaaaggatcgaagagaattatgcatgttaacatagtaattaagataccttcttataggctgggtggggtagctcacacctgtaataccagaactttgggaggccgaggtgggtggatcacgaggtcagaagttcaagaccagcctggctaagttggtgaaaccccatctctactaaaaatacaaaaattagcggggtgcggtggcaggcacttgtaatcccagctgctcgggaggccgaggcaggagaatcgcttgaacccagtgggcagaggttgcagtgagccaagatcatgccactgcactccagcctgggtgacagagtgagactctgtctcaaaacaaaaaccttcttataattcctgtaagagcttggtaactggtagcctcctgagttgagtgctgtagggtttgaggggcaggaagagatgagttttttagtggactgatacatgagcaaaacaagattgcatgtgaaatttatactcagtgaggcatccgggcttaactcacatgctcctagtgggtatatgcactaatactacgtttgttgatacagtcttttgaaagagttgatgataagcatttcataaagtatttataaaacactggtatagcttagtgttggagagcagaagagagaattgcttgggattgtcaatgatttcttatcatctgctagaggaagactaaataacaacatcatgatgttaaggtagatctaaatgtgttaacaagaagaaaagttgaggaagtcctaagtggaaaagagaaagatgtaaattatgtagtatcatactacttacagtttttaaaaagatacatatgtttaccccaagcacattccctttttttttttttgagacagagtcttgctctgtcacccaggatggcgtgcagtggcgcggtcttggctcactgcaacctccgcctcccgggttcaagcggttctcctgccacctcagactcccaagtagctggtattacaggcacccaccactatgccggctaattttttgtatttttagtagagacggggtttctccatgatggcctggctagtctcgaactcctgacctcaagtgattcacctgcctcggcctcccacagtgctgggattacaggcgtgagccaccacacccatcctcacattactttcatgatggttatcttctaagatttccattataaaatacagagtgtggtgagcattcttgtacatacatcttacatacttgtgcaaatatatatgtaggttaaattctaagatgtggaattgcaaagtttgtaaagtgtgtagttttcatttgataaacttaaaaaatcaatatcaaaattaaagtcataattttatattgataaggccctggtgaatttataaaatcaaacttatttttctaggtcctaggcctacttacaagcctccagtctcaaattatccaggttggttaactctttatcctactgatattgttaagaatttatttatttatttttattatactttaagctctagggtatgtgtgcacagcgtgcaggtttgttacataggtatacgtgtgccatgttggtttgctgcacccatcaactcatcatttatattaggtatttctcctaatgctatccctcccccagcccctaacccctgacaggccccagtgtgtgatgttccccaccctgtgtccatgtgttctcgttgttcaactcctacctatgagtgagaacatgcggtgtttggttttctgtccttgtgatagtttgattagaatgatggtttccagcttcatccatgtccctgcaaaggacatgaactcatccttttttatggctgcatagtattccatggtgtatatgtgccacattttcttaatccagtctatcattgatggacattcgggttggttccaagtctttgctattgtgaatagtgccacaataaacatacgtgtgcatgtgtctttatagtagcatgatttataatcctttgggtatatacccagtaagggattactgggtcaaatggtatttctagttgtagatccttcaggaatcaccacactgtcttccacaatggttgaactaatttacagtcccaccaacagtgtaaaagtgttcctgtttctccacatcctctccagcatctgttgttcctgactttttaataatcgccaatctaactggcgtgagtggtatctcattgtggttttgatttgcatttctctgatgaccagtgatgatgagcattttttcatatgtctgttggctgtataaatgtcttcttttgagaagtgtctgttcatatcctttgcccactttttgatggtggtgtttttttcttgtaaatttatttaagttctttgtagattctggatattagccctttgtcagatgggcagattgcaaagattttctcccattctgtacgttgcctgttcactctgatgatagtttcttttgctgtgcagaagctctttagtttcattagatcccatttgtctattttggcttttgttgccattgcttttggtgttttagttatgaagtatttgcccgtgcctatgtcctgaatggtattgcctaggttttcttgttgggtttttatggtgttaggtcttacatttaagtcttcaatccatcttgagttaatttttgtataaggtgtgaggaagggatccagtttcagctttctacatacggctagtcagttttcccagcaccgtttattaaatagggaatcccttccccatttcttgtttttgtcaggtttgtcaaagatcagatggttgtagatgtgagttgttatttctaaggcctctattctgttccattgatctatatatctgttttggtaccagtaccatgctgttttggtcactgtagccttgtagtatagtttgaagtcaggtagcttgatgtctccagctttgttctttttgcttagggttgtcttggctatatggactcttttttggttccatatgaactttaaagtagttttttccaattctgtgaagaaattcagtggtagcttgatgtggatagcattgaatctataaattaccttgggtagtatggccattttcccaatattgattcttcctatccatgagcatggaatgttcttccatttgtttgtgtactcttttatttcgttgagcagtggtttgtagttgtctttgaagatgtccttcacatccatcccttgtaagttggattcctaggtattttattctctttgtagcaattgtgaatgggaattcactcattatttggctctctgtttgtctattattggtgtataggaatgcttgtgatttttgcacattgattttgtatcctgagacttcgctgaagttgtttatcagcttgtggagattttgggctgagacgatggggttttctaaatatgcaatcatgtcatctgcaaacagagacaatttgacttcctcttttcctaattgaataccctttatttctttttcttgcctgatcaccctggccagaacttccaacactacgttgaataggagtggtgagagagggcatccttgtcttgtgccggtttccaaagggaatgtccagtttttgcccattcggtatgatattggctgtgggtttgtcttaaatagctcttattattttgagatatattccatcaatacctagtttattgagagtttttagcatgaagggctgttgaattttgtcaaaggccttttctgcatctattgaaatagtcatgtggtttttgttgttagttctgtttttgtgatggattatgtttattgatttgttaatgttgaaccagccttgtatcccagggatgaagccaacttgattgtggtggataagctttttgatgtgctgctggattcagtttgccagtattttgttgaggatttttgcatcgatgttcatcagggatattggcctaaaattatctctttttgttgcacctctaccaggctttggtatcaggatgatgctagcttcctaaaatgaattagggaggattccctctttttctgttgattgaaatagtttcaaaggaatggtaccagctcctctttgtagatctggttgaattcggctgtgaatccatctggtcctggactttttttggttggtaggctattaattattgcctcaatttcagaacctgttattggtctattcagaggttcaacctttcctggtttagtcttgggagggtgtatgtgtccaggaatttatccattgcttctagattttctagcttatttgtgtagaggtgtttatagtattctctgatggtagtttgtatttctgtggggtcagtggtgatatcccctttatcattttttattgcgtctatttgattattctctctttacttctttattagtcttgctagcggtcatttttgttgatcttttcaaaaaaccagctcctggaatcattgagtttttgaagggttttttatatctttacctccttcagttctgctctgatcttagttatttcttgccttctgctagcttttgaatttgtttgctcttgtttctctagttcttttaatggtgatgttagggtgttgattttagatctttcctgctttctcttgtgggcatttagtgctataaatttccctctacacactgctttaaatgtttcccagagattctggtacgttgtatctttgttctcgttggttttaaagaacaactttatttcagtcttcatttcattatttacccagtagtcattcaagagcaggttgttcagtttccatgtatttgtgtggttttgagtgaatttattaatcctgatttgcactgtggtctgagagacagtttgttgtgatttctgttcttttacatttgctgaggagtgttttctaccaattatgtggtcaattttagaataagtgcgatgtggtgctgagaagaatgtatattctattcatttggggtgtagagttctgtagatgattagtaggtctgcttggtccagagctagttcaagtcctggatatccttgttaactttctgtctcattgatctgtccaatattgacagtggggtgttaaaggctgccattattattgtgtgggagtctatgtctctttgtaggtctctaaggccttggctttatgaatctgggtgctcctgtattgggtgcatatatatttaggatagttagctcttcttggtgaattgatccctttaccattatgtagtggccttctttgtctcttttgatctttgttggtttaatgtctgttttatcagaaactagaattgcaaccccttttttttttgctttccatttgcttggtagatcttcctctgtccctttattttgagcctatgtgcatctttgcatgtgagataggtctcctgaatatagcacaccgatgggtcttgactctttatccaatttgccagtctgtgttttttaattggggcatttagcccattttcatttaaggctaatagtgttatgtttgaatttgatcctgtcattatgatgttagctggttattttgcccgttaactgatgcagtttcttcatagcatcgatggtctttaccatttggtatgtttttgcagtggctggtaccggttgttcctttccatgtttagtgcttccttcaggagctcttgtaaggcaggcctggtggcgacaaaatctgtcagcatttgcttgtctataaactattttatttcttcttcacttacaaagcttagtttggctggatatgagattctgggttgaaaattattttctttaagaatgttgaatattggcccccattcttttaaggctcgtagggtttctgctgagacatccgctgatagttggataggcttccctttgtgggtaacctgacctttctctctggctgcccttaacatttttttccttcgtttcaaccttggtgaatctgacgattatgtgtcttggggttgcacttttcaaggagtatttttgtggtgttctctgtatttcctgaatttgaatgttggcctgtcttgctagtttagggaagtcctcgtggacaatatcctgaagagtgttttctaacttgattccattctccccgtcactttcaggtacaccaatcaaacgtagatttggtgttttcacatagtcccatatttcttggaggctttgtttgtttcttttcacttttttctctaatcttgtcttctttttttcattaatctgatcttcaatcactgatatagtttctttccacttgatcgaatcagctattgaagcttgtgcatgcgtcacgaagttcttgtgccgtggttttcagctccatcatgtcatttaaggtcttctctacactgtttattctagttagccattcatctaatcttttttcaaggtttttaccttcctcgagatgggttagaacatcttagcttggagaagtttgttattactgaccttctgaaacctacttctgttaactcatcaaactcattctctgtccagttttgttcccttgctggcaaggagctgtgatcctttggaggagaagaggcagtctgttttttggaattttcagcttttctgctctggtttctcccatctttgtggttttatctaccttttgtctttgatggggttttggtgtggatgtcctttttgttgatgttgatgctattcctttctgtttgtgtgttttccttccaacagtcagacccctcagctgcaggtgtgttggagtttgctggaggtccactccagaccctgttttcttgagtatcaccagcagaggctgcagaaccacaaatattgctgcctgatccttcctctggaagcttcgtcccaggtggggcacccaccacctgtttgaggtgtttgtcggccgctactgggaggtctttcccagtcaggctacatgggtgtcagggacccacttgaggaggcagtctgtccagtgtcgaagctcgaatgccatgttcagagcaccactgctctcttcagagctgtcagacagggacgtttaagtctgcagaagctgctgcgttttgttctactatgccctgcccccagaggtggaatctatagaggcagtagcccttactgagctgcggtgggctcctccagtttgtgcttccagttctctttgtttacactgtgagctactcaagcctcagcaatggcagacattcctcccctcatcaggctgcagtgtcgcaggtcaatctcagactgctgcgctagcagtgagcaaggttctgtgagcgtgggacctgccaagccatgcacaggagggtatctcctggtctgctggttgttaagactgtgggaaaagtgcagtatttggtcaggagtgtactgtttctccaggtacagtctgtcacggcttcccttggctaggaaagggaaatcccccaagtccttgcgcttccgggtgaggcgatgccccgccctccgtgggctgcactcactgtccagccagtcccagtgagatgaaccaggtatctcagttggaaatgcagaaatcacctgtcttctgcatctatctcgctggagctgcacaccagagctgttcctattcagccatcttggacaagatttttttttacttaaaatttttttaaattaaaaacttaagacatatctaaaaaaatgttaagaatttttaaatgatgggtgaaaaataacatcttgttttaatttgcatttcttggttcttggtttttagttgtttttgtttttgcttttttgagaccgggtctcactctgttgcccaggctggagtgcagtggtgcaaccacggcacactgcagcctcaacctcctgggctcaggtgattctcccacctcagcctcccaggtagctggaactacaggcacctgccaccacacccagctatttttttgtgtgtgaattttttgtagagacagggttttgccatgttggcaagtcttttctccaactcctgggcttaagcgatcctcctgcctcagcttcccaaagtgctaggattacaggtgtgacccaccatgcccggccaatttacatttctttaattatcagtgaatctgaactttttttgatctacatttatttattcatgtgctttgtctatttttctgttaggtttctaaaatatttttcttagtgatttttgagagctcattatgaattaaagcccttttaatatgaagtgaacagttttttccaggttcttttgttttgtcagttttaagcttgttatactactggatatagattactttttataacttttaattacatgagtagtgtatgaatatacttttgtagaatttcaaacattacaaaagtatatagagtaaaagattagttttatttttaactcattacccaagttaatcactgttaatagtttagggtttctttttaaatctatttttgtacatcaacatctttttttaaaaagttttattttagatttgggggtacaggtgaaggtttgttacataagtaaacgtgtcacagggatttgttgtacataactatttcatcacccaggtattaagcctagtacccaatagttaccttttctgctcttcttcctactcccaccctccccggtcaagtataccccagtgtctgttgtttccttctttgtgttcattagttcttaccatttagcccccacttataagtgagaacatgcggtatttgggacgttcctgctgaagacatgcgctcgttcttttttatggctacgtagtattccacggtgtatatgtaccacattttctttatccagtctgtcattgatgggcatttaggttgattccttgtctttgctattgtgagcagtgctgcagtgaacattcatgtgcatatatctttatggcagaatgatttatatttctctgggtatatacccagtaatgggattgctgggttgaatggtagttctgcttttaggtctttgaggaatcgccatactgcttcccacaatggtggaactaaattacactcccacgaacagcatataagtgttcccttttctctacaacctcaccagcatctattattttttgactttttaataatagccattctgactggtgtgaaatggtatctcactgccgttttgatttgcatttctctaatgatcagtgatactgagcttttcttctgtatgttttttggccacatatatgtcttcttttgaaaagtgtctgttcacgtgctttgcccactttttaatggagttgtttttctcttgtaaatttttttaagttcctgtaaatgctaaatattaggcctttgtcagatgcatagtttgcaaaaatgttctcccattctgtaagttgtctgtttactctgttgatagcttcttttgctgtgcagaagctcttcaatttacttcaatcgtacttgtcaatttttgcttgtgttgcgattgtttttgatgtctttgtcatgaaatctttgtctgttattatgtccagagtgatattgcctaggttgtcttccagggtttttatagttttgggttttacatgcaaatctttaatccatcttgagttgatttttgtgtatggtgtaaggaagggatccagtttcaatcttctgcatatggctagccagttatcccagcaccatttatttaatagggaatctttttcccattgcttgtttttgtcagttctgtggaagatcagatggtcatagatgtgcagccttatttctaggctctctattctgttccattggtgtatatgcctgtttttgtaccagtaccatgctgttttggttagcgtagccttgtagtagagtttgaagtcaggtaatgtgatgcctccagctttgttctttttgcgtaagattttcttgactattcaggctctttttggctccatatgaattttaaaatagttttttctagttctgtgaagaatgtcgttggtagtttgataggaatagcattgaatctgtaaatagctttgggcagtatagccattttaatgatattgattcttccatccatgagcatgggatgtttttccatttgtttgtgtcttctctgatttctttgagctgtgttttataattctcattgcagagatgtttcacctccctggttagctgtattcctaggtattttattctttttgtagtaattttgactgggattgcctctctgatttgactctcagtttggctgttgttggtgtataggaatgctagtgatttttgtatattgattttgtatcctgcaactttggtgaagttgtttatcatctggagcagcttttaggccaagactgtggggttttctaaatatagaatcatgttgtctgtggacagagatagtttgacttcctctcttcctatttggatgccctctgtttctttctcttatctgattgctttgcctaggaccatcaacatacttttatgtgtaattatacatgtagtttggtgttttctcttttcttaaaaatgatattatgctgtacatatttttctgcaactttttccacttacactcttagattgtagttgtgtttagatttattctcatactttctaatgatgacttaagtatataccataccttatttaactattctcctatcagaggtcatttatatgttcagacgttttatattaataggtagttggatgtattgatcttttccctaatggctatgactttggtgtctttcttactaaaactttaggtcttctgtatgctgaaattgtatgaagatttcaaccatgtgttctgactttggtctttgcacttaaatcattagtaaatctgaaatttattctggtgtatataatgagatatatggttccacctcgccccaccccagcaaccaccatccaatagctaaatagcaccattttttgaataagttgtcttctccccaactgatttgaaatgtcaatttgtatcatacattgcattcataggtgttccatcctcttttctcctttgaactttgtccattcttctattcttgtagcaaaagcaagtctttttttttttttttttttactgtagtactatatgttttaataactgccgggaacacttccttttcagaaatttctaaggaactctatgttattttttccaaataaactttttatcttatcattttgaccattttaagtttacaattcagtggcattcagtacactgacattgttatgtaaccatcagtaccatccatctctagaatattataatcatcccacactgaatctctactcattaaacagtaactctccattcctccctatccccatcacctgatgataaccactatctactttttgtctcatgaatttgcctattctaggtaaatttatataattataataagtggagtccacttatatggcatcccactatttgtccttttgtgtgtggcttattttacttagcataatgtttttaaggttcatctagatctatcttgtgacatgaatcagaacttcattcctttttatggctgaataatagttcgttatatgtatatactatatttcatttattcattcatctgttgctagacacttgggttggtttgtttttaccttttggctattttgagtaatgctgttataaacataggtgtacacatatctgtttgagttcccgtattcagttcttttaggtatatacctgggagtagaattgctagatcataagggaattctatttttaatattttgaggaactggcatactgtattccacagtggctgcaccattttacattcccaccagcagtgggaacctttaacaaaggttccaatttttccacatctccaccaacacttattaaattgtttttttagtaatagccaagtgtcttagtctgttttgtatgtgataacagaataccacagactgagtaacttataatgaacagaaatttatttcttagagttctggaggctgagaagtctaatatcaaggcatgggcatctgtgagggccctcttgctttgtcataatatgatggaaggcatcacatggtggaaaggaaaagagacggtgagagagagagtaagagggacaaaaccatgccctaaataacaaacacacccctgcaataacgacattagtccattcatgaggacagagccataatgacccaaacacctcttaaaggcgccaccccaataacattacattgacaattaaatttcatcatgagttttgaaggggacattcaaaccatagaccgtcctaatagatatgaagtagatatgcatactagatatgcatttccctaaaaattagaaatgtgttgagaatcttttcatgtgcttattggtcatttgtatatcttctttagagaaacatctttttaagtcttttgcccattttcaagttgggttgacatttgttactgagttttaagagttatttatatgttctggatattacttccttatcaaatatatgatttacaaatatttcctctcattctgtgggttgccttttcactctgttgatagtgtcatttgatgcacaaaatttgcttttaattgatgaaatataatttttttcttgtcttgcctgggcttttagagtcacatccaataaatcatagccagatcaaatgtcaagaagcatttcctctgttttcttctgagagttttatagttttacctcttatgtttaggtctctgatctattttgagtttgtgtttgtatatgataagggtccagcttcactttttttgcatgtggatatccagttttaccagcaccatttgtagaagagactccctttccccatttgactgttccttgtcacgcttgttgaaaaccgtttgaccatatatgcaggggtttatttccgaggtctctgttctattccattggtctgtatgtctgcctttttgtcattaccattgttttgattattatagttttggaatcagaaagtgtgagccttctcaactttgctctttgtttctaggattgttttggctatttgtggtcccttgagatttcatatgtattttggaatggatttttctatttcagaaaaaaaaaaccaaaaaataccatcatcaggattttcataggggttgcactaaatctgaagattgctttgtatagtattgacagtttaaaaatactaaatttttccaatccataaacacaagtgtctttccatttattttatatctttaattttttttagcagttttgtagttttcagtgtacaagtctttcacctccttagtttattcctaagtattttattctttttgatgctattacaaatgatattgttttcttaatttccttttcagattattcattgttagtgtatagaaatacaactgagttttgtatgttgattttgtaacctgccacttaactgaattcatttattagttctaagagatttttgcatgtgtgtgtatatgtgggatccttagggttttctaaataaaagatcatgtcatctgcaaacagagcgaattttatttcttcctttctaatttgaatttctttttcttacctaattgctctgattagaactttcagtcctatgtcagatagaagtggcaaacatggacaccctgtcttgttcctgatcttagggaaaaagccttcattcatttaacattgagtatgatgttagctgtgggtttttaatatatggcctttattatgttgaggaagtttccttccatttcaggtcaactctaaagcatttatttttattaatccctcttttttttttttttttttttttttttgagacagagtctcgctgtgttgccagactggagtgcagtggctgtgtctcggctcactgcaacctccgcctcccgggttcaagcgattctcctgcctcagcctcccaagtagctgggattacaggcacgcactaccacacccagctaatttttgttttttttttttttagtagagacggggtgtcaccatgttggccaggatggtctcgaactcctgacctcgtgatccgcctgcctcggcctcccaaagtgctgggattacaggcgtgagccactgtgcccggctaatccctctatcttttaattttaattagaatcacattggatttatagactaattttgagaaaatagtacagataaatttgcatgttgaaccacagaatgttgtcacagaaaatgtgagtggggaggaagaagaaagattatgacattaaatgtaagtttataaatttttatgatactactttgagaaacattaatatagtttataaggaaaattatattttaagggattttctacaaaggtgaaaaaaaatcaccctatgagtttaaaggattttaagctttatatttaattctttccttcttttattaatttaatctatatttcttcttttttcctaggatatcctaaacctgaggaaggaatacttgacagtttgggttggtatagctatcatgacaaatataagtggtagtatgtgtagaaacgtgtaggtaattagtttttatgaggtgcccaaacataggatccttggtagggtaagataactttcttaaatgctgtgtttgtatgtaggttaaaatatataaaacacaattttctttccacattatattgttattttgtgatggtaatctgtcgataaattttctttctattcatatcttatatacatgaaccttaaagcaatctaagttgggtttattttttctgtaacacgctgatttaacacacttgatgtaggcttacgcagtttacacaatgcatgttaaaaaaaaagatgaagtgcagttgtgatataggccaatgaaaaataaagatttcttaataagtaaaaacaaaaatctattacctttcatttcttagactagtttggtaatggttaatcattttatataatgcaccttaggcttgttttttagtatttgccttacctccaaaatctgtggtccaagtaaatctgttgccatcttaaactgttaaacacttgataactgtttatgagatgagaagagcagagttgaacatagcactttatgctttgacttatagcaatttaataaaagtaatggcagtttagaagcaaaggtactagggacagaaacagttctaaaaattaagattttataggattattttgtgttctctagatagtcaaaaatgtattctcaaatttctctgtatattttttatccatgtgccctggtgtttcatttattatgggaatcctattggtatttaggactatgtcttaattttggggcagggcagagtatggaagtagagaggatgggaaggggattgataagataaagtattgtttgtgaagactttgtaaataccatctgggcaatagaataatagaaatttatttatgactcactctacagatcacttttggaggaaaaaatacaaattaaatgtctaccaaaataagaaatgacagaatgactgttgaactaaaccaactctcatgggataatacttttcaaaaatcattttcctttactatagtgaattctaattactctaataactttaccgctaaataacctgatgtggtagctatagagaaaaacagtgaaaaatgaggttcccattaagagtttcacaagtggaacccttaacctggaaactggttagaagggttctatgatcaaaatgacctggatgccctagcagtcatgctaaaactatataaaaaatttttttttcctctgtagtcttgtattagtccattctcaatgctgttgtaaggaacagtctgagaccgggtaatttataaaggaaagagatttaactgactcagttctgcagggctgaggaggccccaggaaacttataatcatggaggaaggggaagcaaacacattcttcttcacatgatggcaggaaggagaagtatgagaaccaagtgaaggaggaagccgcttataaaaccatcagatctcgtgagaacttactatcatgagaatagcatgggggaaactgcctccatgattcaattacctctcatggggtccctcccacaacacgtggggattatgggaattgcgattcaagatgagatttgggtggggacacagccaaaccatatcaagtgtttagatgatctgattgaaataaatgctatctggagatccatgtgttcaacatcttggaactgttttctttctcagatgtttgggtcattgctgtgattgttattgccataggtaagtatcacaaattttgacaccacttaagtcaaaaaattattgtgaagacatgcattttaaaaatagtttttcagtttctatagttttttcagcttgtaaattggttaaaccgatttaggaaaacctgactttttatttgatatacttaactacctaccttgtgttagtgattttatactctgttatattctgtatatctacttagtaacaaagcctaagtaatacatattttctcaagatgatcagtaatattagttggcttcccaaatgtgcttttgatagttttctaaattaagcaaggacttttctctgacttactatggactgtgtaagtgattatggggagttggatttagatagcaaagagtctggatggaatataaatgtgtaggtgcttaaataacatttgaccactgaaatgtaaccaacatttatttcttctgctagatgttgaatcttggtgattagttttcagaattatatgtcatttgtttcctggtttcttatagttgttggagttgcagtaatttgtgttgtcccgtacagatatcttcaaaggaggaagaagaaagggtaaattaaagcatgtttcttttaacttcttggtccttcttatacttaacatgcttttgtgcagcttcagtttgtaatctgtattgcatgctatcttttttttttttttaaaaaaatgcctgcattagtttgtcctaccaattgcatttctttgctaaaaatattttcagctacttctaacatcactgcaacataaaaacatctgtgcagagttcctacagctattatgactttaagaaaaatttcttttggatttgaggtttaagttatttagcaaatcatggaccactcactatgaggccttctctaccctattccctatttccaaaattgcactaatggccaaaattaaatttaaagtatttcactgtggagactttgacagttgtattcactggaatttttataatgaaagtttccacttgtctatatagcttagctagttgcaagaagctatgtaggcatatcatttaaatacccaatttggtgtcttttcatttaaagttgttatttatacatgttaaactgggggattcaaaacaacactatccgatttccctcttatgttctctgaatttaccagattgcagtaaaactgatagggttaaagttaaaattgctgagaggggttagatctataaggtacctcaattaactgtgtcttttaatatataaaaatgtaaaaagtgagtgggtttagaatagaagaaaaatgtacaagtacatatcttctaaagaaaatagggttttaaaacatcaaactcaaattttagttaaagagcttacagtttaacaaaagacttagaatgaatcctggaacacagactaagattaggtgctttgaaatttctgaaagataatatacattcatttttactgatttttaaaaactgttttcccctatagttttagaaatagctttgaaatcaaacctaataattttaagacttttggtactcatggttttatgatatatattccttttatactgatcatcaggtttgggctaagtcataaaagtacaagctttactcataaggaactcaaacttttttcatattacttggttatcttttgaaatacccataatcccttcacttgaatcttaaatcttgtattaatggaacacgatatgcatatttgatttatctatcagttgtatattctaaaagttacatatctacaacgtgagtacaaaatattatcaatggaatatttttacaaatccataaggtttgcgtagaaacaagttctaaagaaaacaaaacaaagtcgcattctgcttattttccttctttgtttaaaatatcactgcatcagaatttttaaaggttcattaacaagtattaatcaaactctctctagctagcagttaatggtttttctgttgttgttttttgcttttttgtgatggagtcttgctctgtcacccaggctggagtgcaatggcgcaatcttggctcgctgcaaccttggcctcctgggttcaagggattctctgcctcagcctcacgagtagctgggattacagtcgtgcaccaccaccaccggctaatttgttgtacctgtactagagatggggtttcaccatgttggtcaggctggtcttgaactcctgacctcaggtaatccgcccacctcggcctcccaaggtgctaggattacaggcatgagccaccgcgcccggccttaatgggtcttttaaagctcaacagttatctgactgttacactcccaaatgaaaggttcaatagcagtagtgaactgagattccaaaattaatttgtccagtgatttttttttaaagcccatattttacagcatagggtccaactgacagttgccattattaaaattttaaaatattttgggaaggtatgatatctttagccaatgcaacataattaatcctgcaaatagtagcacaacttgaggaaaaatagtccagaaaatggtgtgagagacgaaactcctaattgcctttgaactttaaaatataaactgcgtgggaatcttttagaatagatgttaccctttttatgacaggaacatactcgattggaaattcagcatatgtaatggctgaatccaaagctaggctctctttatggatctattattttgtagttccatgttattttgatagctgaactgaatgtgagggtggtttatctttcttcttcagagtctagaggaatgtttctctgactttaatgtgcacattagtcacctggaaatctgttaaagtacagattctgattcattgggtttggggtggagcctgagaccctgcctgtctagtgagctcccagtgctgatgctgctgctgtgcctgggctacactgaccagggtgttgcccactactgatgtgcctatattgttgaagtctgaagaaacactatgaagcttattggcaaatttttctaatatttaagataattgaagtttttaagattcctcatccatgtgtatccttaaaaaaaggctatggggtaataaatagtacttggcttttcttaccttctttaactcttaaaaaacaaagatttccagccgggcctggtggctcacgcctgtaatcccagcactttgggaggccgaggcgggcagatcacgaggtcaggagatcaagaccatcctggctaacacggtgaaaccccgtctctactaaaaatacaaaaaaaaaaaaaaaaaaatagtggcgggcgcctgtagtcccagctactctgggaggctgaggcaggagaatggcgtgaaccccggaggcggagcttgcagtgagcgagattgcgccactgcactccagcctgggtgacggagtgagactccatctcaaaaacaaaaaacacaaaaaaaccccaaagatttccattattttctttgcactgtttaatgtccataatcttgtccccccagattggctgttgtggccttagaaacttcttataaagactataaaatgtctggaggcacttctccacttccgggggtaactggaagcaggctagcaggcacaaataatctcaaattgttgttaaagcctggcacaaaatgtatttcttgtaaactggtatttatggtgatttgggaacgtaattactcttctgcagccttcatctcaaaatacaaaaatagtgtaaggagtcattttaagatcatccaacatcatttacattacttgataaaaagtgggcaaaaggttaaagtattctgccacttttctgtttcatagctctcagctgagaacagtataggataccagtgggtccgaaacaggtcccatccacatgctccctccttttcccttcccatttcctttctttactaattcttctaccatactttttagtcttggaagccacagccctgtctttgctactgcttcagtcctgtattgcatggcatgactgtgcttctgaacaacagatgccttttgtttacataaatatttaagtaatggttttttttaaatgcatgattattttttaactctagttaagcatccctggataagtgacagtttggctaagttagtgaaagttatttacataatttatatatttattacctgtgacaaatagtttttccttttttccattaatggtatttattattttgtataacctaaactgacttttaatgttacattaatattgactgacccaattactttattaaaaatagtggtcagttcaggtaattggggcatatagtgacatggggcaaaaaaaggatcaaattaacttaaatgtttttctagttggcccttaaattcttgagcatttaacccttcaaaaatttttgagcaactacaaaaatgttttgtaattagtttagaaagcatccttacaaaattagatccatctcagaaatatgagacgccatgtaatacaaagttttgcaacgatgtctcctcaggttgaaaacagatgtgccacaggaagacacttcttaatgtaaaagtccagagacatctgaaaatacatgatgtcataaagttgatttctagataatattacatggatttgatacatactcaatgtattccctcaaaattgagggtgttaggccgggtttggtggctcacgcctgtaatcccagcaactttgtgaggccgaggcaggccgatggcttgagctcaggagtttgagatcagcctgggcaacatagtgagatgctgtgtcttgaaaaaaaaaaaaaaaaaaaaaaaaaaaatcaagagtgctagagaccggtaccatttctccccaacaatctgttattccttgaaaacattttgacatgaatcacttcatgcaaaatggcttcaaagataaacatattaaacaggaatttccagtctgtttatctgctggatgatctatatgacttcaaagttcaagtagcttctagcacaaaattcatgtttccagtccttcagtgagaatgagaaagtcttaagttatgaacctaattctcagctttcctgctactctcttacactggattttatcccacttgttatgctactcgtttctttttggtttgaagtcactattttattcagccgttttctcttcctctgttcagcacatacctaactgatgagacccacagagaagtaaaatttacttctctctgagaaggagagatgagagaaaggtttgcttttatcattaaaaggtatctgttttctgttgtttattttcagatgtcctttcttttgaaaaatattcagtggatatatagatatcaataacctgagcaaagagatattggcagtaaatatcaaagaggaaatttacattcctgttccctttgctaaattattgatgtgttcttataccattccctttgaaaacataatgtgtactgacaggctttgacgtaggctttaaatagagttatgttcccctagtccttttatcagacgatctcacttctaccttgtaaaacagctgtgaatccaaaagtaagaatttgtgagccaactgggaaataaccacagaatcaactcattttaagtgcaaggaggaaaaatgcccttttatagaaaccaaaatatattttacttagttttgtaaatttattcaattccaacgtataaataactctgtaaagacattttatcagtttccctgggctgggatatttttagcatatcaaaggaaaacaaaaaagtcctcagattttgaaaagtaatggattgcattgccttaaacccttggaccctgtccaccttctgtctttgaactgaactggaattattcctctgtttgtgctagaatgtgtgtccgcagagctgggaagagatggagatacatatcccacctcttataatgtgaggccctaacctaggttataattaaaagtttgggagcaggatctacaaaggccagctggaaggacaatttcttagtaaaagcaaagtgatgtctttggttacaggaggaaagggaaagacaaaacataccaaccagaattggcggtctgggcctacccagtcctatatacagtagttccttcttatccacgggggatacattccaaaacctctagtggttgcctgaaacctgggagagtactaaaccttatatatactgttttctcttaagcatgtatacctatgatcattcaatttataaattaggcacagtaggagattaacagcaataactaataactaataatatcaattataaaaatatgccagcatcactactcttgtgctctgaggccactaagtaaaataagggttacctaaccacaggtactgtgataccgtgacagtcaatctgataaccaagacagctattgagtaacaggcacatagtgtccacagcatgggtatgctggacgaagggatgatttatatcccgggagggatggagtgggacagtgtgagatttcatcatgatactcagaatggcacacaatctaaaacgtagttctgtaattttccatttaatatttttgaccgtatttgactatgggtaactgaaaccgtgcaaagtgaaaccgtggataagggaagcctactatatcttcttagtctcttaggacacttttgagactaaagccaactaggaaaatagtttttagactctctctgagcttcagggtatctgtaaacatttgaagataatttaatgaatgctgtagttaatattttgccatcttcaaaatagcttcattgttatatccaataaatgtttctttaaatttatgttaatgccttttatctttggcatagattggatttttatttaaaactttatttaaagaaagagattctactactatgggaaaaaaatatttacttagaaaaatatagtggtggccagtcctggtggctcacacctataatcccagcactttgggaggccgaggcgggcggatcacttaaggtttgagaccaggttggccaaaatggtgaaaccctgtttctactaaaaatacaaacattagctgggcatggtggtgcacacctgtaatcctagctactcaggaggctgaggcacaagaattgcttgaacctgggaggaggaggttgcaagtgagccaagatcacaccacactgcactccagcctgggtgacagagcaagactctgtctcaaaggaaaaaaaataaagaaaagaaaagaaaaatatagtggtcttggagaattcagtgacaggccaaaccattaagtctgtcatcacaacagtccttagggaactgcaatattataagtatagtaatgacgcagtagagaaccataatgatggcctccccggcaaagaagaaccaacccgtttacgcctgaggttgcaattttttgaatttttgcagtcagaccctggcgatgaccttgagcagtaggagataaattccacatgcttagcgttccagtaatggaacactaggcataaatgggttattaaagtatccagaattaacatgcttagctgtgacattggaaaggcaatgtgtttgctgtggcacacatactagtaaataatgactggtccgaatttggttttcgtttgtctattaaagtcaatttactaaggcagggagggcccagagctgtgctgtccagttcaatagccatgcgtgactgctaaggacttccaaagtggctagtccaatgtcaggtatgctgcaagtgtcaaacacacactggatttcaaagactaagccaaaaaaatgtaaaatacatctcaatattttggttatactcggttaaagaaaataaaattatttttgcctttttatgtttttaaaagtggcttctggaaaattttaaattacatgtatgactggcatcatctgtctttggccagcactagactagaataataggttttataaagatgtctattgttatactaaaagtgtgacgtaaactttagttatttaggagactcttagtggaatacatgattttcttgacagtgaggggtagatgaggcatcacatacttgaacagttagaaccactatctttttaaaggttctgtgccagagctacagctttaaaatggagggatcaggaaagcatgcgtttgtctccagtctttcccattggccctacatcaaaatgaggacatagttactaagtactttgtgtgctactgctctatttcttgttttggaggggatcaaaaatataagacagggataaaggaaggttttttttacagtgagaccagttgaacatttgaaattattttaaaagaataatttatttcccaggttggtggctcattactatatttttttaattgttcattttctgaataggcttctggaatttaatttctgtacttaattatatttatctttgacatgatctttataccttggtttgcaggaaagcagatggtggagctgaatatgccacttaccagactaaatcaaccactccagcagagcagagaggctgaatagattccacaacctggtttgccagttcatcttttgactctattaaaatcttcaatagttgttattctgtagtttcactctcatgagtgcaactgtggcttagctaatattgcaatgtggcttgaatgtaggtagcatcctttgatgcttctttgaaacttgtatgaatttgggtatgaacagattgcctgctttcccttaaataacacttagatttattggaccagtcagcacagcatgcctggttgtattaaagcagggatatgctgtattttataaaattggcaaaattagagaaatatagttcacaatgaaattatattttctttgtaaagaaagtggcttgaaatcttttttgttcaaagattaatgccaactcttaagattattctttcaccaactatagaatgtattttatatatcgttcattgtaaaaagcccttaaaaatatgtgtatactactttggctcttgtgcataaaaacaagaacactgaaaattgggaatatgcacaaacttggcttctttaaccaagaatattattggaaaattctctaaaagttaatagggtaaattctctattttttgtaatgtgttcggtgatttcagaaagctagaaagtgtatgtgtggcatttgttttcactttttaaaacatccctaactgatcgaatatatcagtaatttcagaatcagatgcatcctttcataagaagtgagaggactctgacagccataacaggagtgccacttcatggtgcgaagtgaacactgtagtcttgttgttttcccaaagagaactccgtatgttctcttaggttgagtaacccactctgaattctggttacatgtgtttttctctccctccttaaataaagagaggggttaaacatgccctctaaaagtaggtggttttgaagagaataaattcatcagataacctcaagtcacatgagaatcttagtccatttacattgccttggctagtaaaagccatctatgtatatgtcttacctcatctcctaaaaggcagagtacaaagtaagccatgtatctcaggaaggtaacttcattttgtctatttgctgttgattgtaccaagggatggaagaagtaaatatagctcaggtagcactttatactcaggcagatctcagccctctactgagtcccttagccaagcagtttctttcaaagaagccagcaggcgaaaagcagggactgccactgcatttcatatcacactgttaaaagttgtgttttgaaattttatgtttagttgcacaaattgggccaaagaaacattgccttgaggaagatatgattggaaaatcaagagtgtagaagaataaatactgttttactgtccaaagacatgtttatagtgctctgtaaatgttcctttcctttgtagtctctggcaagatgctttaggaagataaaagtttgaggagaacaaacaggaattctgaattaagcacagagttgaagtttatacccgtttcacatgcttttcaagaatgtcgcaattactaagaagcagataatggtgttttttagaaacctaattgaagtatattcaaccaaatactttaatgtataaaataaatattatacaatatacttgtatagcagtttctgcttcacatttgattttttcaaatttaatatttatattagagatctatatatgtataaatatgtattttgtcaaatttgttacttaaatatatagagaccagttttctctggaagtttgtttaaatgacagaagcgtatatgaattcaagaaaatttaagctgcaaaaatgtatttgctataaaatgagaagtctcactgatagaggttctttattgctcattttttaaaaaatggactcttgaaatctgttaaaataaaattgtacatttggagatgtttcatga
